United States Patent Application Publication US 2020/0377945 A1 - sequence listing, part 6

SEQ ID NO: 934 - DNA, 92558 bp, Unknown
  gut microbiota DNA sequence
tctcgccggactcgtccttgaacgggtcgaacgcctgggtgctttccagggcggcggcctgctcatccaacggaatgcccttgccccaggtcagcgtgtcttccagcggcgcaaacgtctcgccatagcggccggtgcggccggaatgcacggaattggccaaacgggcgatgccttcagacggctcgtcactgccctcgatggccttggtcgccgccgccagcacatgatgggcggtgtcggacttggcttcgacttcggcatccgggaagaacagggcggaatcgtaggagccatgagcctcgtcacgcacgatcttgccgttgtgcagttcgaccacgcgcttgcgcatcgagttgacgatctcttcgttatgcgtggccatgacgatggtggtgccggtgcggttgatggcgtccagcacttccatgatgcccagcgaagtggtcgggtcgaggttgccggtgggctcgtcggccagcagaatctgcgggtgattcacgtaggcgcgggcgatggccacacgctgctgctcgccaccggagagctcatgcggatagttcttttccttgccggtgagtcccacggtattcagcaccttgggcaccaacgatttgatggtggaccgccgcgtgccgatcacctcaagggcgaacgccacgttctcccatacggttttgttattgagcagcttgtaatcctggaacacgaagcccagcgaacggcggtactgcggcacttgacggttggtgatgcgccgcagatcgttgccggccacgcgaatctcgccgctggtggcctcctcctcgcgcaacagcaggctcaagagcgtggtcttgccggagccggacgcacccacaaggaacacgaaatcaccgcgttcgatatcgaggttgatgtcgtcaagcgccggtcgggtgcctttgggatagatcttggacacattgtccagtgagatcagtgccataatgctgtttactcctcggtttcggcggagcggcgctgttcatggcgccagcggatgccggcctcgatgaacgcgttgatgtcgccgtcgaacacggcctgagtctggctggtttcgtagccggtgcgcaggtccttgaccatctggtaggggtgcagcacgtaggagcgcatctgatcgccccagctggccttgatgtcgccggcgagctccttcttcttcttggcctcctcctcgtggcgcagcacgagcagtcgggactggagcacggccatggcggaggcacggttctgaatctgcgaacgctcatcctgcatggtcaccacgatgccggtgggaaggtgggtgatgcgcacggccgagtacgtggtgttcacgccctggccgccggggccggaggaacagtaggtgtccacgcggatgtccgtatccggaatgtcgatatggtcggtggcctcgaccagcggcaccacttccacggcggcgaagctggtctggcggcggccctggttgtcgaacggggagatgcgcaccagacggtgggtgccgccttccacggacagtcggccgtaagcgtagggggcgtccacctggaaggtggcggacttgatgcccgcctcttcggcgtaggaggtgtccatgaccttggccttgaagccgttacgctcgcagtagcgcaggtacatgcgcagcagcatctgcgcgaagtcggccgcgtcgacgccgccggcaccggagcggatggtcaccacggcggaacgttcgtcatattcgccgtcaagcagggtctgaatctccatctggtcgagatccttctggatctcgccgatttcgctttgcgcctcgtccagagagtcctgatcgccctcctcgtggccgagttcgacgagcgtttccacatcgtcgatgcgctgggaggcggagttcagacgcttcagctgcgattccgcggcggacagccggctggtgatcttctgggcgttttccgggtcatcccacaggcccggggccgcggcctgcgtttcgagatccttgatatcggccttgagtcggtcgacgtccagcgccttggcgatggattcgtatttggcgcgggcttcgccgatcgcctgggtaaagtcaaattctgccatcgtggtttaccttactgttgattctttgagattccttgggaagtcacgtccttgttgacagccttcgcacattcctctggcgttggcgggcattgccgcgccacacgcgcatccgcctgcaatccatgctgtcagaaggttccgggcctgccttgccgataaccggccgggcgacctcacgaatccctcgcatcagacgtgttcaactgcgggcacgaatatgcgaaggcaacgtcaaagccccgcgtaaatcgccgggatgaccagggagccgagcatggccacagctatgaccacgcacaccacacgcacgatggtgcggcggcggttctcacgctgctgtcggctgtcctgatagttactcacgagaccaatagtgtactcaccgcttacgaccgcaggacttgccgccgacgcccgccctgccggtggacccccacggccctttcccttgcgctttcagcgccgccagatggtgtttcatggccaccagcatgatgtgcgaatcctcaaggcccaggtggcgttcgttgtgggcggaatcaagcgcgccctgacgtttggcgtaggcgtcgagcgtgttgtctccgtaaggatgctcgttggtgggtaccgcgccggggtcccactgccggctcatcggcagggtatcgatgatggtgatgcgcccggcgcggtagctttccgcgtatccggcgacgttcagcatgaaccagctatgttcgaaggtggcgttatgcgccacgtacggctgctgggtaagccgcgcgagcaggccggcctgggcttggggccattcgtcgaagagtcggtacccggcctcgctgctgcggccgcatacatcgatgccggtgagtttggcgatgagggcgttgccgagcgccgcgttttccggcggcacgccaaaagcgaggcgggactggccgtaggcgtcgccggcggcgtaatagccctgctcataggcgtatgtctcgggttcgccggccgggcgcggactggccatgttcatgaactcgaagccgacgtcgatgatgtagtcacgtgccggatcgatgccggtggtttcgatgtcgatgcccatcaccgcatccacgtcgcggccgggcaggtaggcgtcgcgccagtcgggcttgggatggtgtccggtagcgttgccagacgcggcggcaccacccggcagagcggcaccacccggcgaagtcgcgccggagagattggcgcgggccatcgccgcatcgcccgcccgcttctggaagcgctgggccttacgccgttcggcgcgtgcgtcaagaatcgctgccgtacaatcttggacatcgtccaaggcgactgttgtggggaacttgacatcgctgttttcggcggcagtgtttccggcagatgtgccaccggcttcgccgctcagatccagcatgccttggtcatcgttcgacgggccgctgccggagtacggcttgagcacggcaatggtggccctcccccgccgttcgcgactgaccgcccataggtgttgctgttcgcccagatgcaacagcgtgttgatgttgtcgttgagccgacgattggcgtaggcgagcgcgcgaggcagacgataggagccgatgaaccggtcgaaatcggtcatgaatgcgctgttgcattgggcgatgatcgattccagacgctcgcgtgtggcgtagtcggccttcaatgcgtcgtggatggactgtggggtggattccggtattgtgccgacgccatgcgccaggtccagagaacgcacccagtcccagtcgatggtggtgccatcggcgtccttgggcatggacgccgcccattggggaatgtctcccttggcggcgtccagccatgtgcggtcgatcatagtgcgaagccgagttcttcagcggcctcggtgggcaccgggtcttcgcaccagtagtcctcgaggttctcgttggtggtcagcgaacggatttcggcgcgatcgatatacagttcgccgctcaaatgatcggtctcgtgctggaagatgcgtgcgggccagccgtgcaacggctcgctgtggtgcttgccgtcttcatcatcccattcggcggtgatgtcgagccaacgcttgcgcacagcttggtatccgtcgaagctcaggcagccctcgtagaacgaggcggttttgtcgctggtgggtttgtagctcgggttgatgatcacgtggaaggggaattccgcgatttcgcgcggatcatcctcgtcgtcgcgcacgtggtcttcgaccacggcgagcgcgagccccaagccgatctgggtggcggcgagccccacgccgggtgcctccagcatggtggtgtgcatcgtatcgatgagtttggcgagcgtacgcttggaaagctggccattataggccactgtccgttggcgcaacaccggttcgccggcctgcacgatgggcaggagcttctccttgccgccggttttgatgagttgttcgacatcacggttgagttcgaggtcgactttggcgttctttccaaacattgtttttttccttagggaagggtgctacagcgcgagttcttcggcgacgatcttggcgaggcgggtgcagacttcgtcggcgtaggcttgggtggcggcctcggccatcacgcgcacgagcggttcggtgccggaggggcgcagcagcacacggccggtgtctcccagcagttcctcctcacgggccacggcatcctggatgcgcttgttggtggaggcggccttcttgtccacgttcggcacgttgatgagggtctgcggcagctgcgggaagtcggcggcgagctccttcaggctcttgccggacttgacgacctcgttgcacagggtcagtgcggtcagggtgccgtcgccggtggtggcgaattcgcggttgatcacgtggccggactgctcgccgccgagcgagtaatcgcccttgagcatttcctcaagcacgtaacgatcgcccacggcggtttccacggtcttgatgcccatatctttcagggcgagcttcagaccgaggttgctcatcacggtgaccacgagggtgtcgtggttgagcttgccttcgcgctgcttggcgcgggccagaatgcccatgatctggtcgccgttgatcatgttgccgtcttcgtccacggcgagacaacggtcggcgtcgccgtcgaaggccacgcccatcacggcatcggtggccttgaccatggcctgcagctgctcggggtgggtggaaccggcgttcttgttgatgttgtagccgtccggcgaggcgttgatcacgattacatccgcaccggcacggcgcagggcttcgggagccaccacggaagtggcgccgttggcgcagtcggccacgatcttcagtcccttgagcggcttgggctgggttttgtcatcgttcagcggagcgatggtggccaccagatgatcgatgtacaggttggtggcagtggtctggtcgtggctcacgcggcccacgccggcaccggtcgggcggtcccagtcctggccgagcacggcctcgatgtcgtcttccttctggtcgggcagcttgaagccgccgcgtgcgaagaacttgatgccgttgtcgggcatcgggttgtgggaggcggagatcacggcacccatctcaacgttgagcacgctggtcaggaacgcgatgcccggggtcgggatgatgcctgcgtcgatcacgtcgaatccgccggcggccatgcccgcagacagggcggaagccagaaaatcgccggacacacgggtgtcacgacccacgagcgcgcggcggcgcccctcaggctgatcgtcttgggtgccggcgtcgccgagcacacgcacggcggcatcgcccaaatccaacgccagacgtgcggtcaaatccctattggccagtcctcgaacaccatcggttccaaacatcttcggcatatgaagttccactccttgtatcgcgttacccgcaccatcgtagtcgttgtgctccaccctaggacccgactcggcaaaaaaccgccacggaatctgctccagaaccggaaatcagcattcaacagccgcaatggcatcacccacaaacccgcatattcatcttgttcggcggatgaatgatgagatacattcgttagcgggcatgccgggcggaccgatgcactccggcacgggaacgaagccatcgcactagtaagaacgggccggcaaacgcgcctgtaaacaatacagcggcaaatacgacgaacggaactacccagcgtacatcgataaccggcaaagcaacaccaaacagaacgacggcgaggaacacgctgagccatgcgatgaacatgcccaacggcatctcctctaccggggtggtctcggccatgaatgcaacgatctattactccgatgttgtggtcagtatgtgcggcagttgctcgtcgcggttgaggaaagaacgcgtttggcagcgaagtagcgtatgccgaccttcctcagtgcgggcgtataccatggtgcaatgcgtcaggcagcggtccaactgccggctcagtatctcggcgtcctgctggcggcgggcaaatacggacgggcaggggaagctcacgcagtaagcgcgcacgccccattccttaccgatgatgacatatcgcggattgttgatgggcgcgagtagctccttcataacgccggcgaacagcacctgctcgcgccgcgaaccgccaatcagcatgacacgcaatgccgtgaatctgcgacgtgtctggcggatcgaggaagtcgttcaccgcttcgcctgccgcgctggtttctaggcgctcaggttccgcagtcgccaaatgccagacattggccaccttatcggggtctgcgaccacgctgcggttgacggccatgctgtatgcttcactgcatcagtgtaaggcacgaatcaataggttttgagccccagatcgatggtaagaatgatgccggcgattacggcggcggcgcgcatgatgtttgcgggaatcttgcgggtgatggacggggcgatgtacccgccgatgaagcatccgatgcacagcatgatggcggccggccaatcgaccgcgccttggatgatgaataccactgaggcgctgatgttcgcgcctgtgccgatcagggttttcaatgcattgatcttgtggaatgggccgattttggcggcatcaagcacggcgagagccaaggtaccggcgcccgcgccgaagtagccggagtagatggcgaccgccgctacgcccagccatacccaccaggaatcctgactcatgggctgcacgagttgttccggcgggcggtgaggtgcggtaggggtggttgcgcgcttggcggcttcagtggcttcagtggcttcagtggcttcgatgtgcttgagttgcgcggtggcatccgcggcggcttgcttggcctgcatgcggccgcgcggattgatggcgatgatcagcgagctcagcaaaatcagcactggtgcggcaaattcaaagacactcgggtcgagtttgagcaacagaaacgcaccggccaccccgccgaatgcgccgatgaccacatacgtaatggagcgtaccgcttggcctttgagttctttgcgcgcacccatcacgccaccgatgcccgtgccgaccacgccaacggtgttagaagcgtttgccaatacaggcggaatgccgaacgcgagcagggccgggtatgagaccagtgacgatgcgcctaccgcatagcccacgaatcctgcgccgattccggccaacagaatcagcagtaatgaagttatggaaaagcccgcaatcattccccgtatccttgtcgctcatcgaccggcatattgccggccttgagcgagaatacgctgttgaggattggttgcgggttttatgttggaatgtggacgtagcttctcgcggaagcgactcccctcagtcgcctgaggcgacagctcccctcgcgcccgaggggagccagaaggaaatcagagcgcttcgttgtattcgcgaaccttgagggtgcggtgggaggatgccacgttttcgacgatcagacgcttcagggcattgtcggcggcaatgtgctcgtccagccaggcgtcaccgagcttgaccagcgtggcgggatcggcgtagcccgggtacaggccgttgagcagggcgtcggccatgtggtaggtcttgttggcccagacccagtccacagtctcgaagtacttggcggcgaacggctcggccagatcggagcgcggggtggcggagaagccacgggccacggcctcgagctgggagttggtcagctcgtcgttgtggagcgcctgatcccaagcccattccttggcctcagcggtggccatggaggcacgggcgccgtaggcgaactcgcggttttccgtggtctccttcttggcgagctgcgcgtccacgtcgtcgttggtcatctcgttgacggaggtgagcgcttggacgatggtccacgtgaagttgttgtcgatttcgaggccttcaagacgcacggtgccgtccagcagaccgtgtgcgttggcggcgaatgcggcgtcgccctcctcaccgtagcccaagtaggcggtgacgagctggaactgggtgtccgagccggcttcggcggcgttggccagagtccacagttcggcggccacgtggcgcagcacatcgtcgcggcgggcgggcgccacgtagtggtgggcggtggtgctcatgcaggccagcgcgtaacggaaggtggtggattcggtttccgtggccagaagacgcagggtcatgtccacgaagcgttcggccgggaattcgccgtcacgggtcatatcccagaaggcgagccaggtcacggcgcgggccagggcatcatcgaaacgatgcaggttggcttcggcgaatgcctgggattcggcgtcgaaacgaatcttggtgtaggtcaggtcatcgtcgttgaccagcacgaatgccgggcgcggcttgccggctgcggcctcgacgatggtggtttcgccatctacatcgagttcgaactgctcggtgcgcacgatcttgccggttgcggcgtcttcgttgtagaagccgacggccaggcgatgcgggcgcagcaccgggtgttcggccggcgcgctctgggtgagcttcagttcggcgatggtgccgtccgcgtttacggtcaggccagtggcgatcgtgttgatgccggattcctccagccacttggcgctccaggccttgagatcgcggccggaggtcttttccagttcgctcagcaggtcggccagggtggcgttggagtaggcgtgacggttcaggtagttgtggataccttcgaagaactgcgtgcggcccacgtagaatgccagctgcttcagcacggaggcgcccttggcgtaggtgatgccgtcaaagttgacgtaagtgtcgttgaggtcgttgatcggcgcgacgatcgggtgcgtggtgggcagctgatcctggcgcagcgcccagctcttctcgccggagcagaaagtggcccaagcgtcatgccattcggtggcttcggcagtggccagcgtggaggtgaattcagcgaaggactcgttgagccacaggtcgttccaccacttcatggtcacatagtcgccgaaccacatgtgcgcaagctcgtgcagcacggtcaccacgcggcgctcggccagcgcgtcggtcaccttggattcgaacacgtaggagtcgcggatggtgaccatgccgatgttctccatggcgcccgcgttgtattcgggcacgtagatctggtcgaacttggcgtacgggtagggcacgccccaggtcttggcgtagaacgcgaagcccttcttggtgatgtcgaacaggtagtcgacgtccttcgcgaaggccttggccaacgactgtcggcagtactgggccattggcacggtacggccgtcttcgttcaggtattcggtgtgccattcggcgtacgggccggcgcagatggcggtcaggtaggagctcatcaccggggtcggctcgaagtcccacagacgggtgctttcgttcggcttgtcgccgagggtgccgtcgagggtttcgcgcggatcgtcctcgatggtggcaaccggcatgttggaggtgacgatccagctggcgggagcgagcaccttgaagtcgaaggtggccttcaggtcaggctggtcgaacacggcgtagacgcggcgagcgtccggcacctcgaactgggagtacaggtagatgttgccatcggacgggtcgaccgagcggtgcaggccctcgccagtgttggagtaacggcacctggcttcgacggtgacctcgttcttctccttgaggtcggtcagttcgatgcggttgtcttggaaggccacggccgggtccagggacttgccgttgaggtcgatggaggtcacttcgtcggcgatcaggtcgaggaaggtcgacgaaccaggcttcgcgttgaagcagatgaacgacttggaaccgaagttcttcgcgccgaccgtcaggtcaaggtcgacgtgatagtgaatcggcgcttcgataacggccttacgttcttcggcttcaatacgagtgagattagaaccgggcatgacttcaattactccttacggtcgtccctggataatccggactacttggtttctacggtttcgacgtcctgggcgatgtcggccacgacgggcacgatcatcggcttgcggtgcagctggcgcgcaacccagctgccgagcgtgcggcgcatggtctgctgcagcttgtaggtgtcgcgcgtgccctgcatcatctggtcgttgagctgttcgacgatctggtgacgaaccttgtcgaactcgctttcgtcctcggccacggcattcaggtagatcttcgggccggtgacgacctcgtgattgtcggtgtcgaccaccacgaacgcggagacgaagccctcggtgccgagaatgcggcgcttttccagctcgtcatcggtcagctcgccgacggaatcgccatcgacgtacacgtaaccacacggcacggagccgacgaccgcggccctgccgtggtacaggtcgaccacatcgccgtcttcggccaaaaccacgttctgcgggtccacgccggtcttgacggcgatcaggccgttggccaccagatggcggttttcgccgtggatcggcatggcgcacttgggcttgacgatgttgtacatgtacagcagctcgccctcgttgcagtggccggacacgtgcacggcggcgttgtcgcggttgacgaccttggcgccgagctgcacgagcttgttgatcaccttgtagacgccgtgctcattgcctggaatcagggagctggcgagaatcacggtgtcgaactcgttgatgtggatatcgcggtggttgccgtcggcgatgcggccgagtgcggccatcggttcgccctgggagccggtgcacatgaagacgagcttgtcgtcctgaatgtcgttggcctgcttcaggtccacgacggtgccttcggggatgtgcaggtagccgaggtcggcggcgatggacatgttgcgcaccatcgaacggccgacgaacacgaccttgcggccgtacttgtgggcggcgtccaccacctgctgcacacggtgcacgtgggaggagaagctggcgacgatgattttgcgggtggcctgggcgaacgcttggtcaagggccgggccgatggaggtctcgggcttgacgaagccgggcacctcggcgttggtggagtccatcatcagcaggtccacgcccttttcgccgatcttgccgaattcgacgaggtcggtgatgcggtggtcgagcggcagctggtcgagcttgatatcgcccgtgtcgatcagggagccggccggggtcttgacatagacggccagggcgtccgggatggagtgggtgacgttgacgaattcgaggtcgaagggacccaccttgagcttctcacggccggcaacctcaaccttggtggggttctggtggtgttccttgcacttggcgtccacgaaggcgagggtcagcttggagccgatcagcgggatgtccgggcgcagcttgagcaggtagggcacgccgccgatgtggtcctcgtggccgtgggtgagcaccagggcgtcgaccttgtcgagacggttcttgatgtagctgaaatcgggcaggatgagatccacgcccggctgctcctcctcggggaagagcacgccgcagtcgatgagcagcaggtgaccgttgtattcgatcacgttcatgttgcggccgatttcacccaagccgccgagcggcgtgatgcgcatggagcccttgcggtacttcggcggggcgatcagcacggcatcctgctggggtgcggtggcctgccgggtggcgttgatcttacgggacggcgtacggctgttggatccgttggcgttgcggccgcgcgcggaaccgcgacggcgagaattcgtgttcttgcttgttttcttttgttcttgtgccataacctttttgggatttctgttgtggtgcctctgctctgtcatgcaggggcggcgggctggcaacccgtatgcagcgtttcgggcttacagcagtccggcagcgcgcatgccctcttcagccttgtcaagctgagtggcgtcgggaccgatgttcggcagacgcatggtggtggaggggataacgcccttgaccttgagcgcagccttggccatgacggcctgatagccgtcgccattcaacgcgtggacaaggggggcgagctggttggcgaggcgacgggcggtagtgatatcgccgcgatcgaatgcctggacaagctgctgcatggggttggaggcgacgtgggcaatcaccgaaatgatgccgacggcaccgatggagaggaacggcaggaacaggccgtcatcgccggaataccaggcgaggccggtgcgctgctgcttctccactgcggctgcaagatcgccggtggcgtccttgacagccttgacgtgttcaagttcggccagtcggtcgtaggttccgaccttgaccttcaagccggtacggccgggaacatcgtagacgatgatcggcttttcggcggattcgtcgacggccttgtagtggccgacgataccgtcctgcgaggggcgggaatagtaaggcatgacgacgagcaccgcgtcggcgcccgcttcctgagtctgttcgaccatacgcacggtgtgtgcggtgtcgttggagccggcgccggaaatcaccggaacgtcgacgacctccttgacggccctgaccagctcgaccttctcatccatatgggtgacgggcgattcgccggtggtgccattgaccaccagaccatccgcgccatcggcgacgaggtatttggcgagcttctgcgcggcggcgaaatcgacgctgccgtcggattgcatcggggtgaccatagccggcagaatgcggccgaaaggtgctgaatcaagaaggtgcatgtcatgctcgctcatagtgttcaccgtacttcccattgtggactcttatactacgtaccttgattgttgctgaatgcgtggcattatggccggagccggtggcaatgccgtgatgcgcgtcccggcgcgcttccctgcctgaaatgcgggggcgactactggtcgactgcgggtcgattacaggtcgaggaagcggtcgaggccgatggtcaggccagccggagcgtcgccggcgagcttgcgcacggcaagcaggacgccgggcatgaagctggtgcggtcgaagctgtcggcccgaatggtcagctgctcgccggcattgccgaagagcacttcctcgtgggcgttgaggccgcgcagacgcacggcgtgcacgtggatgccgtcgaccacctggccgcgtgagccgccatcggtttcggtggcgtccggcacgggggcgagtcctgcggccttgcgcgcttcggcgatgccgtgggcggtgtggatggcggtgccggagggggcgtccaccttggtggggtggtgcagttcgatgacttcggcggattcgaagtatttcgcggccttggtggcaaagtagtcggccagtacggcggagatcgcgaagttaggtgcgatgaagaccttctgggtttcgggcttcggaccgttggcgatggcggatttgatctgggcgagtttctcgtcggtccagccggtggtgccgaccaccacgtccacgccttggccgatcagggtcagcacgttgttcaggctgacggacggcacggtgaattcgatgaccacatcggtgttgtcggtggtgatctgggtcaggtcgtcgccggcatccaatgcgagcgccagctgcgtatcctcggcgttgttcaccgcttcgaccacgtgcgagcccatgcggccctttgctccgaccaccgaaaccttgatcatgtcttcttccctgtctacccgtacctgcccggcaatgtacccgggacgttttccaatcggcaatcagcctatcaccgcaggcccctcacgccaataccccgtccacagaatcaagctccctctgacgagccgaaccgtgaagtcgagctccctctgatgagccgaaccgtgaagaaaacgccggaggcgtttttaggtgagggcgaacgacagtgagcaataattcagttggctgaaagccatcattaattgcgttcgagctggacgcgaagcggactgagggagagaccccggcgaagccgccaaccatccatcgggcgtagcccgatcccgtttcacccacgccgcttggccaaggcccatccggccaacgccaatggcacggacgccagcgtgaagatgaatggcagcatcatgcccacatgagggttggaggcgtcaagcacaatgccggccacggacgagccgatcgacgtgccgaccgtgcctgcggtggttacccagctcagtccttcggtcagggattccgccggcaccagatccttgacgatgaggttgccggtggcgaacgtcggcgagacggtcaggccggcgaggatttcgaagacgcccagcaggatgagattgtccattgacaaccggaagaacacgtagccgacggtcagcagcgacaggaacatcaccatatgcgcccaatgggagcctttgagttggcaagagccgaacaccagcgcgccgatgcacgagccgaccgcgaacatcgccaattgcagaccgaggaagggctcaagtcccatggatttcatggtggcggtaatggacacgtcgaaggacgtgaagctcatattgaacacgatgaacacggcgagcaacggcagtacgccggcatagagcaatacactcttgggcttggcaccgctgcgtttgagttggcgcagggtcagctggtcggcatcttcgcttgcagcggggctgccgtcatcgtgcgcggccacgctgacctgttccacgatgaccggcggctgggtggatttcagcgagaagaatatggtgccgccgatgccgcatgccacggtgggcacgaacagttgggataccggatgcacggaggtggccagccaagccgccagaatcggccccagaataaagacgatctcgtcaatggcggcttccatggcgtaggccgtgttgagcagctgttcgccatcttccacaccgcgcaacgcataggaccaacgggttcggaccaatgcgccgaatgagaactgcgtcagacccatgatgatggccaaagcgaacagcagcggaatcggcacgcgcaccaacgccgcgaaggcgaaggcgagcatggccacgatctgcacggcgagcgcaagccggcccacgcgggcttggccgaaacggtcgaaggcgcgggcgtagaacggggtgacgcagctcatggccagcacataggcggcgctcatggtgccggcgatggtccaattgtcgtagagatggttgagcgccagaacgatgccgagactcatcatggagatcggcaatcgtgccaccgcaccggacaggcagaacgccttggctccgggcagcatgaacaggcgctgatagggcgagtgggcagcagacgacttcgaaaccgcgcgagtcgtggacacaataactccttactggtgcgttgtccggcacgtgcgcccgcccacacgtgccatccgagggtagcggttccccagcaacgtcacgcggtgcgtttcaaccgcggaccggtacgtggccagtcgtcttcatcgtcggagatgccttgcgatgcataaggtctctccaccggtgaaggccgtccgatgctgtacaggtcatgagcctttgggctcagtcgttgtcagattgttcgggaatgccggagctcaactcggtaaggatttcctgtttggttttcgcacgggcgcgaagctcgcgcaagccctcgtcgggctcactgacatagtagagagtggcgtcgacactgtccaattccacaccttcgaccgctgccagcagcagtcggtacatgtcgagctgggcaagtttgcgggtgatgtcgtctggcttggtgggccgacgaccggttttccagtcgaccacggtaaagcgtgcggtggtgctggacgggtcaagtccaccgatgaataccgcatcgagtttgccattgactaggcccacgcccggcacgtccacgacaatggcacgctccgtccacgccgggatgcgcttggcccacgatgattcggccaatctgcgctgccacgccaccagcttggactcggtggcattgtcgctacttatggaagtggcggaggcggcggatacggcggatgcggattgttgagccgtgggctgtgggacagcgggctgccgtgtggatggcttgcggcattgccgctcccgttcggccaaatcggccaacatggcttcccgggaaacgaatcccgcatcctgacctgtatgcggcatacttgattcggcttcatatgccagtaccgcttcatccggcttaccggcattgatgaattgctcagcccacgcatggaactgcgtgccggcttcggccgccggagacgatattcgtggaatcggacggataatgctacgccagtagaggcgctcctcccgttcgctcatgccacctacgcgggcttgcaggcttgtcacgttctgacgtccggcggccagaatgcgttgcgccttggctttgactgcctcatcaagcgactggccgctggcggcatcggccatcaaatcggcgtcgtccaccagcaattgcgcccgttgcagcagtggaccggcgtcttggtgctgctcaagtgacgaggaatctgcggcgataacatcgatgccacgtgacagctgttcatgcactgcgtcgctgagggtagccggccacggcaattcgacagcggcatccgtctgcgtaatcggcgtctgccatgcctcccccaccacggcgtcaccgtatgccgcggcatgctctccgataaagaacccttcgggaggggcaatcgcttcgccttgcgccgagatcagcatgggcttcccggcattggcggcttgcagccgttccacacagtcctgagccgatatcgcatgttcacgggcttggagcgcgtcatgcacttcaagccagaaattggatggctgagcggcgcgagagcctttgggcaccactgacgggtcccgcccggattcgcccgtataggcgcaataggtcatcagggcatcttctcgcgcacgggtaagcgccacatacatcaatcgacgttcgtcggcatgcagccggcgcccatattcctccgcctgcgtcaaataccagccggatgcatccacttcttccacgccatcgccgaattcgcgcatggagccgaacacttcatcatcaataagctccacatcatccaaagccgccaacgatgcgatggggtcggcttccacatcggcatcatgggggaatcgcggcagaatgccggcatcggcacgcataggcacgggtacggcggtggggttggtgagccaggagtcggcggtctcatgatattcgggtgcggtccagtgaccttgctcggtgcctcccgtatggtgctcgtccagcacgatcttgagatggtcgccctgattgctggggaatccgacggcggtaagccccactaccgcaacggcatcccattccaaccctttggactggtgtacggtcatcagttccacatccaccggagcgtcagggagactggcggcttcatcctccaccgaagccagatgatccacccatgtgatgaacccatgcaacgagggagtttgctcagcggcaatctcttgcgtgtacgtatccaccaaatccacaatcgcatccataggcatatgcgccaaagcgggattggcgcggtgctgcggattatgcagcacaccggccaatacggtgtcgatgtcaagatccaacgcttctatgccggcgcgaatcacgtcgcccagtggccgcccgacggcatcatgcacctgacggagcatcaccgcggcccgggttatggcgttgcgcccgtgtgcgctcaaccgttcaagcagttttaccaggtcgccgcgtagcaatacgtctggcaggaataccgcattggccacctgatcgcggtactcacgcaccacagccgcccattcattcgctggtgtatccggttgggcaaggccggcctgcaccaatgcttggaagcgttgttccgtgttctgttcttcagcaaaacgggccaacatggtcaaatccgctgcggacatggtgaatcgtggcgtggccagcaagcgcatcagcgatcccgtatcggtgtggtcggcggccacgtgcagcaacgccatcagatcgcggatttccggacgttccaacagcgcggaatagccgaccacgaatgtggtcaatccggcctgttccaatgccgcctgatattcgggcatatgtgatttggaccgaaacagcacggcgaccggcgctttctgttcgcccggcatctgttcctgttgttcggctgcggaacggtgccgtgcgatggccgtcttgcagaaacgcactacggcgtcgatctcctgcccggccgtggcgaagcccagtactcccaatgttccttcgggggcatcaggcatggggtcgagcgatgagacatcgacctcacgcatcaatgagctggaaggacgcgacggattggagcgcaacggcagcgtgagattattggcggcttcgagcactatacggctgtttcgcctggtgacggacagcgggaatggcttgtatccggcagacaggtggaaatcttgctggaacatacggaatgcaccagggctggcaccacgccatgcgtaaatcgactggaacggatcacccaccgcgttgacggcggacctctgtgacgcatccacgtggaacagtgctgccagcagagcggcctgcgtggtggaggtgtcctgatattcgtcgagcagcacgtggctgtacctgcggcgcgtacgctctccgatggaggggaagcgctcgataagctgatacgcggcaatggtgaagtcggagaattcggccatattgcgttcccgcttggcttgggcataggcctccaccagctggagcagaatatcgcgtttgcgtgtggtctccagcagcgcaccgcaatgataggtgcagcgggcgtgcaaatgttcggcacggtcatcgagcttggcttgccagctggcgtcggtatctttcttcagtcgtttgatcttggggattttcggctcgtcctcgggcatgggttcatctgcaacggcttgttgcaatcgattgatgaatgccgaatcccattgccgtactcgattgatcgcatcatcgaagctggtgcagccggcaccgatcatggcactgccaatggcatccgacaacgccagaacacggttcgccaaactggagaaggcgccaaaatcctcactgaacgccagatccatgtgactgtcgatgacttcggtggccagttgaagcgctccggctgcgctcaatggttgcgtgttctgatcgaatccgacaagcagtccatattggcgcacgatggtctggaagaaggcgtcatacgtgaaaatggccggcttgaggaatgcccgatcagacaccgtggcggtcgtagagcccgccatatcaccggccactgcggcggagacgcgttccagcagttcgcctgcggccttgcgtgtgaaggtcaggcccaggatgcgttcaggtgccacacctcgattgataagcgcgatgatgcgttgggtcatcgtaaaggttttgccggaaccggcaccggcaaccaccaatacgtcagcatcgactggcgcatcgatgatggcggcctgttccgcactgggagtgaacgtgctcatgcttgcctcgtttcgaaaatcgtgtcgatctggcctgcacaggcagggcagacgttcttcatacggcagaatccgatatgggtgtcttgcggatgggcctcgatgatggctgatctgctggccgccgcggcatagaatacgcgggcgatcatggtcagcgaccataacgtctgcgtaccggcgagcgcggcgaattgcgcccacgcttcggcactcacaccttcgggaggagtagccggatctatggcgggtatgtcgaagaaacggttggggtctttataccagtatcggggcgtgaacggttcggcattcaacgagccatcagtgaacagcggcggctggaaggcaccttccggagcgtagcttctggctggtgccgcattctgcccgacatggaatagcacgctttggctgatatgcggcattgcggcaagtgccttggcaccgcgcggcccgtcttcggggaacacgaggccaagctgatagcacacgagctgcaaatcattgaaaatctgtttgaccgtgggcgttctgcctgttttgtagtcaatgaggcgaatgcattcgccgccgtctgcgagtacgcgggtttccatacggtcgatgcgcccggacagtctcacggtcagatgctcgtccatgccttccggccaccctccgaccagtgctcccatcagacggaccagcgtgttccgaccgattgggtgcaggccgggcacggcattgtatgcgtcgagtatgtcacgcacatcgaatcgtgcggcaaactcccgttcgcattcggcaccggccaatgcgccaatgctgaagttgctggagttcttgccaagatacgtttccggatcggcgtcgctgcgcacaaagtaatcggcgatgttgcgcagggtatccgccgcggactcgtccttacgggtggcctcatagcggttccgggtgtcggctatggcattcggatcaggacgtttgctctgatagatggcattaagccgtgccgagacagcctcgatgcgacgttccgcgccggccgtggagtccaagcccagtgcggccaacgcctgggcattgtgggaaagatggtccagcccttcctcgctgccttgctgcgcaaccgcatggatgagggttccgaaactggtggccacggagctggggcgaggaccggcgaaccggttctccagcatccagcacaccgggcacgcccataggctgtcgaccgccgatggagataaggtgaccatgggcgcggcctgcgcatccgtcttgcctttccctgtttggataccgtcaggctgtacaccaccagatgacgcgctgtcggatgaggcactgtcagatgaggtatcgccagatgacgcaccgccagatgacgcaccgccagatgacgcgctatccgattgggccggcgattccacaaacgcccagctctgcggatttgcggcgcgcacaccatgctctaacaggagtgtcaacgcaatcgcggcgtcctttgcggcagcctgctgcggttgagcagtggccagaaccgcgcgggcggcgctgaccaacccacgtgggtcggcgtccaatccggccagatcatattcggcgaatcccgcatgtgcccccactgtggtgaaaggcgcctgttgccggttgcgcggatagtattccggcagatacccgaagagaaagtccgaggggctcatgctgtcgttccataccgcgctgatcatgattcgccgtgcacgggtcagcgcgaccaggaaactcttcttctcgcccgacaatacagccgcgaaccgcggatcatgcccggttttgtcgctttcttcaagcgctcccctcagcacgagctcggcaaggtcttcaccaccgaacatggtgttgcgcccggcgaggttcggccacacgtcttgctggaccaccggtatccacgcatattcccagtggcgtccggccgcgcctgccggcgtagtcaatgtcaccgcgtcttccaccggtcctatgtgggccaaggaatcggcctgcacttccatgccccgaacctgtgccatgaatgacgtgatgtctcgactggcggtggaatcatcggcgaactggaacaggcgcattgccgcgtccagccggtcattggccgtacgcccctctgccgtgttgaataatgccgcacgctgccagaccggtgccagaccggtggcgttccacgcaacagacagcgcatagcgcggctgtacgcgctggcttgccggcagccgctccaagccggaagcaacgctgcccaccagatgccacaggttcgcaaaagcgcgggcctgagggtcgttgccgagcaccgcgtggatggatgcgagcgcagcctgcgccggcgcggcggcatcatcaatggcaagcatcacgtacagcgcgtcaacgccaaaggccaagtcatcgccggacggttcaccgagtatttcgacagacactggcaacgaagtcactgacgacgaaaccgctgacgtcgaaaccactgacgaggatgtttcacgacctgtttcacgccgtgtttcatggtatgtttcacgcaatgtttcccatgccgtcgtcagagaggtcagcatggcatcatccgtggcgagatgcgccagcgactccaacgaccccatggccgattcgatcggcgcaagccttgcgggacgcccctgaccgggtttggccccggcactcaccaacgggccgttcatcaacgtggccactctagtccttatatatgccgcgcaggaagccaacgtcatctggcattccgccatcccctcggcacgcaatcgggcaagctccacaagcgcgaacaatccctgcacgaaagtctcgtccttcaaaggacgggtgaccgacgaataccgcaccggtacaccatctcggcgcagtcgttcgccgaacagccgcacggcggcattgtcgtgggtgatgaccgccatgtcgttccaccgaatatgccggtcaagatgcgcccgcttgatgcgccagaccacatcatccagctcctcacgtgaggatcggtacaggccggcggtcaccgtgccgtccgcctgataattcgctgcatcgactccgcccagtatggcggtcagcttgccgggacgctcggccggaggcagcggctcgtcttccggcgagggaatcgacagcgaaatacgagacgcgatcacatcagccatcgtcatgtgcgactgatcagcgacggcactaccgccaaccagctgttcttccttggccttcagccgcccttccacggcacggcgcatcagatattccggatacgatccgcggaaggtctgcaccgattcatccgggttgccgaccagcaccaacttgacgccggcattccccaactcctccaagaagcgcatgccggccagcgtggtgtcttgaacatcatccacaaccagcagccggggcaagcccaacgcctccacacacataggccggtcggaatcatccgcgtgatcggcggcgaatgcctcacgcaccacacgagcgcctgccaccagcaaatacgaggcatccaaacggtattgccccggatataccgcgctttgggctgcaatatattcacggcgcaacgcgaaagccaaacgccattgcaccgacaatcgcgcgtcctccgtcacggcgtccaagagacgtggctcttcgtgaacgcctacaccgagctcatccaatcgggccagcatatcgcgcaactggctgataaacgcatctgaaatacctcgcgtgaacctatccgcgctggtcgagccgcctgccgacgtcggagacggcgaatccgacccttgttgcgagaggcttgattgtgcggaagcggccgagccgggcatctcgccggcaccggcatcgcgtatgagtctcgcccagtcatcctgggcaaagtagacgcgcagcaaatcacaggtgccgcaatcatctcccgctacggcatggcgcagatgcacggccatgacttgacgcagcaaagcatcctgttccgcaccgttcagcaatcgaggcgacggcaatccagttccctcgcgcgaagccgatatggcccggaatgccacggcacccagcgtggtgaccggcctggcctgcacggaaaacccgagctcacgaatcacccgattgcccaatgcgtcggcggccacacggccggatacggccatcaccgcctgcgtgccaccgtagcggcgcagccccgccatcaacaccgataaggcgaattcagttttgccgcttccaggcgtgccgacaatcagcctcgccgctccatcacggtcgatgccgtccagcactgttccaggttcaagtctcgtcatcatggctccagcctaaacccgaccgtcacagagggaaaaattttaccgaacccgacgaagaatcgtacccttgacggtatcctgtagaacgaatgcagggagagcgcattttccaaggagggagggaacagatggacaacattccgatgagaccgccgaagctgcccggatatgatttcgtccagatgttgggaagcggtgccaccgccacggtgtacctatataaccagcgtatgcccgcacgcccggtggcggtaaaggccagcgccaaaacccttgacccacgggccgctgccctgttcaaccgcgaggccaacttcatggccaagctgtcatcccacccgtacattctgccggtatatggtgccggcgtcacctccgatggccatggctacatcgtcatcgaatatgcgccgggcggcacctacaacagcatcatgaaggcccggtccatgacctgcgagcaggtactcgacctcggcatcaagctgtcaagcgcgctgttcaccgcgcatcgcagcaatatcatccatcacgacatcaagcccagcaacattctcatcacctcgcagggcttgcctgttctgggtgatttcggtatctccaccgatgtgtatgaccgcaccgaaaccggattctcgccgccgtgggcaccgcctgaggtgcttcagcatctgaccaatggttcggaagccgccgacatctattcactggcggccaccctgtacgccatgttcgtcggctgctcgccattccagcacgattatcacccgcgttcgcaatcggaactgatttcgctgatcgtcaaccagccattgcctcgcctcaaccgccccgacgtgccggccgatgtggaagcggtgctgcgccgggccctgaacaaggaccccgaccagcggtactactccgcgttggagttcgcacgtgccatgcagcgtgtgcaattcgcatatttcgggcatgccactcccgttaccgtggaagggatgccggcctatcccaaagacatcgagcgtcggcgccgggccacggaccagcgagatcagatcacccgttcgtcacggcgatgggtcaaaccggtgggtattaccgtcggtatacttgcggcgatcaccgcagcggcactgatattcgccttcgtggtcgttccccgcatggacagcgccaccggatcagataccaaacaggtggcgacgcccggcaccaaggatgatgacaacaaccgcaataatcaggatgacgtgatcaccgataccgcgaacgcccagattccttccccggagaatctgaacggcacctatgcggcggatgggtcatccgtgacgttcacctggacgaatccagacccgcaaagcggtgatacctatgcgtgggccatagtgcagggcagcaataccgaccagagcgcgcaaaccgtcacaacgtcagatcccacggtgaccgtcaacgcgcaggaaggctcgcagacctgcattcaggtgtccattgtgcgcaagaaccgccagatgtccgtcagccccgccatcgcctgtgcggccaagccgcaagaatgatccgctcgccactgccgggcatgccaccctggcattgcgtatcgcatcagacgtgcgcccagcagcggcgaattcaccaaatggacaacaggaacggcaggtattggaaccgtaaagcgttgtcattacaccagcaaccagagaaaacaggggtcagggagttcagatggccacatcgtcccagtcatacgatcgtcgccgacgcatcagcgcggctttgcgccgccttatgccctccggagggcatacgtggacggttcccgtaatcacgctcctgctgcttctgggacttgttgccggcgcggtgatcatgagcaccgtcacgcgccgccatgtgcaactggacgatggcaccgtatgggtcacttcgctgaaaaaccagaaggccgcacgattcaacgtaaagaacaaggaggccgacgccggcgtctcctcctccgccccacgattcgacatcgcacagcataatggcgacaccatcctgaccgaaacgaccaaagcctccaccatcaaggcatccacggtcagcaccggtgtcaagaccgacatcaaagccaacaccaccactgtggtcggcggggataccgcagccctgatcaacgagaagaccggcaatgtgtggaccggcttgtcggaaaaccttgattccgtgacccccaccacttccgatccgaaaataaagctgggcgagggcgggcgcatcgcagtaacccacgatggcaaggtctacggataccgtccatccgacggtatggtgctgcgtcttgacaatcccagcagcgccaaggccaaaaccctcgaatcgctgaccgacggcaagcagcagaccgttgaaagctttaccgtcatcgggagcacgccggtaatcgcaaccggcaaaaccgtcatattcaagggcggccgcgtcgatgtcgacacgaccggcaccctcacccttcaggagcctcccaccgatgacatacagtccgattgggtggccgcggcatcaccgagaggccttgcgcttatcccgttgaagtccaatgccaaggcgaatttcatagccaacgggggcaaggcgaatccagcacgaccggtatcgtccaagggctgcgtgtactcggcttggagccagaaggccagcaactacattcgcgcctgctcccccacggataccagcgtcaagccgcaaaccctcgaatccgtcaataccacttccgaattggtgttccgcaccaaccatcgccttgtggtgctcaacgacacggttaacggcaatgtgtggaaccctgaggattccaccaaagtcatcaaaatacagtggaacaaaatacagaccgagcagaccgagaaagaacagcagaacaacgactcggccaacaaccaccacgacttctccaagacctgttccgcacaatccggccaaatcaaagccgaggatgatgaaatcggcgcacgagccggttcggaacagattctcgacgcgctgcgcaatgacgagcagaccgattgttccgtactgaaaatcaccaaggttggcgcaccaaacaacaaagacgtcaccatttcgccgatttacgacggccggtatctgcaactcgatgcctccgccgcatccgcaggcaccgttacctttacttacgatatttccgatggtcgcggccagacctcttccgccacggtgaccgtaaccctgaatgatggaggcaaccacgctcccgtacagttcgacactcctcccgagatcgatgtggagcagggagccagttataccgccaatgcgctgagcagcttcaacgatccggatggagacccgctcactctggtctccgctgtggcccagaacaccgaccaggtgcaggtgtccacccgagccgacggccagcttacgttcaacaccggtgcgctggcgtcgggacgtgtgggcgtcgaggtcaccgtctccgacggcacggcaaccggcaccggcatggtgtatttctcggtcaagcccgcgaacaccttggccgcggtcatcgacccggtagcgaaaaccaccgttcccaacacggataccgtcgtcaagctgtcctcttatgtgcatggcacttccttgcagccggcacaactgactcaggtggatacgcccaacggcgcttcgacgaccaccaatgcggcggatatgtcgttgacgttcaaggccaccaatcccggcacctattatgtgccctacatcattactcaaggttcgattccggccaccggattggctcgagtcgaggtgcagcctgccaccggcgaggccgccaaaccggttgccgccaacgatgtcgccctgcttggcgcggataataccgccattgtggagccgctcaccaatgacgtcgatccgatgggcggtgtgctgtccgtcaccacggtgagcgcaccggccgactccggcatcaaggttggtctcgtcagccataagcgcgtgtatatcaccgcgcgtcaggtgcccacgaagcccgtcgcccttacctacaccgtggccaacgcctccggaaccgccaagggcaccatcgtgttgcagccgccggctctggccacctcgaattcagtgcccaaggccagcaatatcaatgcccaggtgcgtaccgacggcatcgtgtccgtggatgtgcttgaccatgtggcctactcggatggcaccacggtcaaactcaagaacaacctgcaatacgacaaggggacgttcaagggtctggccttcgtctctggagacacggtccgctaccaagcatccagcgagaccggcaacttccccatcacctatacggttgaagacaatctgggtaatgtggcttccgccaatatcaccattaccgtgcataagagcgacgcagcgagcaaggccgcgccaaccccgcatgacgccgaagcgcaggttgccgccgggcagaaggtccgcatccccatcacactgaccggcatagacacggatggcgacgacgatcagctgttgggtctgggcaacaaggcacccacgctgggccgcatatccgaagtcggttccgactacttggtctatgaagcgtatccggattcgtccggcaccgacaccttctcctatgccgtggaggattggaccggtcagcgcgcacaggcgcagatccgcgtgggcgtattccaaggatcgtccgactccggcgtatacgccagggatgacgaaatcacgttgaggcccaatacggccgcaaccgtgccggtcgcgcagaacgacatctccggcgacaacaccaatctgaccgtcgacaagcatgtcgaggtccaaggtctcgacggggtgagcgtgaaagacaatatgatctccttcaccacgcccggcagcgccaccaccgactatatcgcctacacggtcaaagacaaggccggcttgtccgatacggccaccctcacggtaaacgtggatccgagtgccgccatcgagccgcctaccgcctacgactatcgtgtgccgtccgccgccaccatcgataagaagtccgtggatgtggatgtttcccagtggatcgccaatccttccggcacagccaatgagctcaaggtcggcgtgcatccctccgccagcgctcacgctcacgtcaagggcggcgagcattcgaccaccatcaccgtcgacctgacgtcacaggcgcgagccgtgccttacacggtgaccaatacgaaatacaacatcacctccaccgcgttcatccaggtaccggcctatggtgtctttccgcccacgctgcgtcccaaggcaccggaattgaaggtcaactcgcgcgagaccattgaaatcaacatcaatgactatgtccgcgtcggcgccggcaaggaaccgtatatcgaaagcgctgattccgtcagcgccaccaaggcttccaactccgatttctacgtgaacgacaagaccctgaagttcactgcggcaaaagactacgcaggccccgcctccattacctttaccgctgtggatggcaagcagggatcggataagaccaagatcatcaattccgcagtgatcactctccagatcacggtgataggccgcgatgtgccgccgcccacgttctcgtcctccactattgatgtcgaggcgggcgcggaccccaagaccgttgatctgacggcgctcacccatgcaccgtccggcgtgtatgacgacgaaaagcaatacacgtattccggtggaagctcatcatccaggcaaatcaccgcaaacctgtcccgttccggtagcttgcaggtttccgccaccaaggatgccgctcctggcaccaccgcgtccattcccgtgcaaatcgcatacggcgcgggcaccgtgaatgccggtgtgaccgtgcgcgtagtgtcttcgacccgtccgctgacacgcgtcggcaacaagacgttgaagatcaaggccggtgccagcgatgccgtgaacgtgcttaccggcgcgtacaatccgttccccgattcctcgctgaccgtcatcagctgcaaggcggatgacgccgccaaactcaccatcgccggatgcgatgcctccggaaacatcaccatcgccgtcgcatccgatgtaggtgcttccacgaacaccgtgctcgtcaccgtgcaagacggcaccaagtccaaggatcgtgaagtcaccgcatcgattaccgtgtccgtgatcgacaagcccgagccgccactgctctcccccgtagccggggaaccgcaggacagcgcggtcagcctcacatggacgcccggtgccgccaatggcagcccgatcaccaactacaaggtcagttggaccggtgccgtcaccggagagaaggattgcggtaccgtcacctcatgccaggtcactggtctgaagaacggcaaaacctattccttcaccgtcgccgcgcgaaatgacgtcggctggtccaagccgtccaccgccgtcgaagccacaccggacaaggtgccgtccgctcccaccgatgttacggtcacaggtggcaataaaaccgccaaggtgacgtggaaagcgccgagcggtgatttcagcgccgtcgacaactattcagtgaccgtcaccggtgcaggtgctccgcagaccaaggaaaccggcaatacggccaccgagctgtcgtttacgttcaacaacaacgacatttccgatggcaccgccattacggcgaccgtcaaagcccataacaaaatcaattggagtgccgagtccgccgcatcgccgtcagagaagatctggggagacccggatgcgccgaacattgcgttgtcgaacgacgacaccacggtaacggcgaaagtcactctcggcaataaccgcaatgccggctgccggcgaatttccttgggaggagacgtcaaggacaccatcgattgcagtgacagtggcgctacgttcgatatcaatgagaacgatttgaacacccgggaaatcaccgtaacggccaccgtggtgccgcagcgcgatgcttcctccggcacgggcaagagcagctttgtcccgcagtacaaggtccagccgcccactgacgtctacaccaccggatccggcagtacatgcaccgtgcattggaccaagcagggacatgcgcagtcctacagcgtgactgccgatggcatcgattccggtacagctactaaccggaactcactcgacttccgaatgagtccttgggccaaatgcaacaccgcatcggtgcaacaggtgttcaacggcgctaccagcgacgccgtcaccggaggcccgcacaatggcgctccttacacctatgagaagaaggctgtaatcaacaaaccgcaggagctgcgctggtcagacaacgctcacgtcattaacgtcaccggcggttcggttgatgtctatggcaagtcggccactgtacaaatcatcatcaatggccaaccgttcacgtggaactccggccagccattggatgtcaccgacttggccgtggccgccgatggcaactacgcgtggagcgtcaaagtcaccggcgggccgggatactccggtctcgacaacactgcggacggaggcagcgtcgcgggcacacgtccctctgactcctcggaggggaccaagtcgctcaaatccggtaccgatgtcaccactttggccaagaacccctggattcttggtttcggcaataccccaatatcgtcaaccaccattcacaagcagtaggagaacatccatgagcgagaacatcgatgacgcgacgcagttgtctgacacgacccgtctgtccgacagcacgcagctatccgacagcacgcacttgtccgacgccacgcacctggcatccgcaccacacaccggcacgaccccaagcaccgagtcggcgccgcagtccgttgcgctgcctaacctgccgcagcggccgtcacaagcgccgtcagaaaagccgtctcctactactgatgccgcctccattcctgcgggcgatgacagcaccgtgctcaagccgcgcaagggatcgacgccagccatcccgcagcaggccaccgcgcaatcccagccgcaatcacagccgcagcgtcagtcgagcaaagccgcgcaagcagccgcatcggcactgcccgccagcatcaattccggactactgccccagcccacggctcaggtccgggatttccagcagtccttcaatgcgctggtcgaaaatgtctccaaggtggttatcggcaagaccatccctatcaagcaatgcgtcaccgcactgatggtcggtggccatattctgcttgaagacaaccccggcaccggtaagacccagttggcccgaggcttggccaattccatttccaccggtttcaagcgtgttcagttcacgcccgatctgctgccttcggatgtggtgggtgtgactttctacgatcagaagcgcggagaatttgagttccgcgaaggcccgattttcgcctccatcgtgctggccgatgagatcaaccgtgcatcgccgaagacgcagtccgcacttctggaggttatggaagagcagaaagtcaccgttgacggcgtcacacatgatgtgccgcagccgtttatcgtgatcgcaacccagaaccccatcgagcagctcggtacctataagctgcctgaggcgcagatggaccgattccttatcaagacgtcaatcggctacccgggccatgatgtgtccgtcgatatcctcaagcaggtcgatatcaccgaccgtgcgcagaccatttccccggtgctgagcggtgacgatgtcatgcggctgcgtcaggtggccaccgaaatctatgtggatgatgcgattcgtgaatacatcgtcaggctcgtcgaggcgacccgccacaacgagaagatcacggtcggctcctccatgcgtggcgctttggcactgacccgatgcgcccgtatctgggccgcggccgatggccgtgcctacgtggtgccggatgacgtcaaggaccttgcagtggccgtgctcgcacaccgtatcacgctgactccggaagccaccttcgatggcgcgactccggaaagcctgatcgcacaggtgctcgaagacgttccctcccccaccatcggttcctgatagggcccggaaaggtatccgaccatggcatctacatccgccgcattacgccgtcgccggcgcgctgaacgcatgttcaagcgcgcggtaagacgcatcagacggttcttcgcatcctacgtctcgcccttgggctgggcggtaacgggcgcaggcatcgcatgccttattgcgttcccgtttctgggctggtatgagctgctcgtattcggcatcgtggcgatggtgatgatgctcgcggcaatcgtgctttccctcggcaacacacgcttccacgcgtccatcgtcgtatccaatcatcgcgtgaccgtgggagacaccgtatccgttatcgtcggcatcgacaacaccggcagaacgccgacgaccacggcacgcggatatctgccaatcggcgatgcgcatgaacgattcaacatccccatgctggctcccgggcaatccaagcaaaccgatgtggagttccgtaccgtatcgcgcgcaatactgcccatcggcccattgcgcatccgcaagggagacccgttcggtctggtgcgtcacgaaaaggagctggccgaccgcatcaccgtattcatccaccctcgtaccgtgcgtctcgatactctgaatgccggcgtgccccgcgacctggaaggccaaccatccggccagatcgtggatgatgatctcgacttctacggattgcgcgaatacgagccgggcgacgacgtgcgtaacgtccactggctgagctccgcgaaaaccggcacgttgatgattcgccaatatgaggccacgcgccgcaccgacacctcggtgaccatcagcgtgaacccggacgaatacgtcaacggcgaggaattcgagatggcggtgtccatccactcctccatcggcgtcaaatgcctgctgcaggatcgtccattgttctgccacgcgggcaacgcgcacggccagccgcgcaacgccatggagttcctcgacaacgccagtgccatagagcctgatcgtgaggataatccgaatctcgccgagggcacgctgaagcacagtcctgatgcttcgttctattttttcactgttggatcgctgaaagacatcgagcaaatcaagcgcatgaccttggccttgccccgatcggccagctgcgtggtattgcaggccagcgccggcgccaatcgcggcatcagaagattcgccaacttcacattggccaccatcggcgacctcgatgatctcccgctgatcatgggggtgctcgcatgaccttcgaccagtccagtatcaccaataccaataccgctgcgtacgccggatcgagcggcacatacaccggcacttcctccggcacgtacaccgggacctccaccaccaccggctcctgggccgactccacacattcggttatctggatgaccagaggcaatgtgcttcgcggcatgggcctcagtcgccagccgtggggcaaacgaatcgccagcctcgtactcatagcggcgatgatgttgctggcgcaagccaatctcatcgacgtgtacggcggcgtggccacttgggcgattgccgctgtaccggccaccttgctgggcgcgatcatcgctctggcgggcatgttgccggcgttgcgactgtggtggcaaatcgtgtttctggcgtttgcccaattcatcatcggcccggtggtaacgctgagttccactacgtcccattacgtgattcccaccttgaagaccttgagttcaggttgggaaatgacgtttggctcgttcaagtacattatttccgtcgatccgcctctgggcacgcaagacggcgtgctgatggcggtatggaccatcggcctgtggcttacgttcttcaccggcgtgtttgccattaatgccaacgcatggttgtctctggtgggagtgctgccccttgcggcggccgtggccgtatgtgccctgctgggcacagacagcggctggcaacgcgccatctgcggtattgcctttgccttgctgctgattatctgtctgtcttggcgtcttgaactgctggaaggggggcgctggatatccgcgctgatcatcgtcgtgctcgctgccggccttgctttcgagggcacgttgctggtgccacaggaccgtttcgtgctgcgtgaccgctacgatccgccgttaagcccctacgattacaccagcccgctcagcggcatgcgatcctatatcaaggaccacaaaaaagacgtgttgctgaccgttcataatctgccggccggaacaccggtcaaacttgcggtgatggatcgattcgatggcacagtatggaacctgtccgattcttccgaagccacggactcctcgaattatcatcgcgtgggcaccacgatcaaggcggatgagcagggtaaatccttcactgcgaccttcaccgtcgatcaggaactgaccgacacctggctgccgctggcgggagcggccactggcgtgagcttcgccaacgatgccgacaacggcaatgacacgttttactacaacacggataccgattccgccattattcccgccggcacgcgtaaaggcctcacctataccgaatccggcattatcgcccgcaagcccaccgataagcagatcagcagtgcggctgcggcccgcatcacccaaccagaagcccaggatgttcccgattcggccagcaaactggccacgtccattgccggcgggcagtcctcgggcggtgccgcagccacggcgttggctgacacattgaaagactccggatggttctctcatggacttgaaggcgaccatccctccgatgccggccatggcaactaccgcatcaacaagctgctggcaggcacggccatggtgggcgactccgagcaatatgcctccgccatggcactgatggctcgtgatctgggactgccctcccgtgtggtcctgggcttcctgccgaaaaacgaggatggcgaaatcaccgatgcccgcacggagaagacctcgggcaatggcaccaaaatcgaattcaccggcaacgatgtcaccgcttgggtggaaatcaaattgcagggcctgggatgggtggcgttctatccgacgcccaaggagaccaagatgcctgatgaaaaccagaacctgacgccgccgaatccgcagacgctggtccggcaaccaccagtgccgttgaccgatccgctgcgcgatcagacgcaagccaagggccaaagctcattggccggcgccgacgccgatgattcgccgaccaacctgttctgggcgcggttctggcgagtgacccgcaaggtggccctgtacggcagcccattgtggaccctactcatcgcctgcggtctgattctgatgttcaaggccatactgctggcacgagcgcggcggcatggcagtccgaaagcccgtgtggcagcaggttggaatgccatacgcatgcttgccgagcaaagcggcatcacagccaagggcactcgtcgagatcaggccggtgccatcgcccgtcaactcggcacagatgaccaggctttgatccagcttggccgggaagccgactacgccacgttctcggggcaagacattgaatcgggccaagccaccacatattggacaggagtcgaccaattacgcaaggcaatgctcgcttctttgccgcgtttcaggaggatacgtacacgactttccctgaaaagcgtggctatactgtcaaatgggcacgcagcaaagccgcacacgacgcatgtcaagcgcacgcgtaagaaggggaaggcgtcatgaccacaggctccatccgtatcgcgatgaccagtgacgtgggtcttaggcgcaaaaacaaccaagacaccggattcgcgcaacaaggcgtgttcatggtctgtgacggcatgggcggcggcaaaggcggcgagcaggcaagccagttggctgcccagcatttcgcacaattggccgccatgccttcacgcacccgtcaggatatcgacgacaccttggcacgggcccagcacgacattctcgatctgggagaccgccttggcggcgtggccggcacaacctgctccggtttggtactgccccaagatcatgcggattccgccagcgcccgcagcgctgctttgttcagtgacgccgatgatcaggacttctcggaccagacctatgtggtcaatgtcggcgattcccgcacctaccatctcagtccgttggcgcatgccgatgcccccgccacggatatcattcccgtgtgggacgccgcttcgctgacccgcatcacgcgagaccattcccagcgccaagaagccatcgattccgggcagatgttgccggaagaggcggaggcgaccattccacgcaacatcatcacccaatgtctgggtgatccggatggcatcatgcccgacgtatatgtcgccgatctgaccggccgcttcatcatctgttcggatggattgcatggcgaggtgccggacgaacagatcgcggccatcgccgcggcgcattccagtccgcaggaggccgtggacgccttggtggcggccgctcttgatgcgggcggaaccgacaatatcactgtgattgtggccgatatgccattgaccgaacccgaacatcatgcgttcagcgcattcaggctggacgaaggtgaggatatcggcgccattgaagacgcaacactacaaacactacggaccatacgttcggcataaccgagcgaacataaggaggtaatcccatggttgattatgatgctgcggtcgctgccgttcaggatccgaacgcggatccgattctgctggcaaaaatcgcctacgagaatccggaattcggtgccaatgtcgccgtgaatccgcgctgttatcccggcttgaagcgttggatcgccgagttcggtgacgatcgcgcccgcgagaccctggcgcaatacgggttcactgccgaggcattcggcggcccggttcaggatcagaaagccacggcacaggcggcccagcagcccgccgccgaacaggctcagcagcccgcggctcaggcggcattcgaggagcctgtggccaccaatccttacggtttcaccgccgaacaggccctgaccaccaccgaccagatgcaaatcgcccagattgcccagtgcgcgcctgaactacgcgcctgcatcgcacgtaatcccaacacctatccggcactgatcgaatggctgggccagctcggcgacccggcaatcaacgccgctctggcttcccgtcagtgaaaggacggcatcatcatggccaaacttccctaccctccagcacctgaactgggttggtattctgacgatccggtggaaggcaccccggattccgcagttggcacagccgaaccgcagaacgactacgggcagcccagtaccgcggaagcggcaaccaataccgcttttaccgcagagcctgccgccacggccgccgccgctgagcccgctgccaccgctccggcagacaccacaccgcacgccgccgaaaacgacatcgaggattgggacagcaccgtgctctcctcctcgttcacgtccaaggcaccgaagaagacgtacctgctgcataacgatgtcaccggccagaccatcgtgatcgataagagcacgttgctgggccgcaagccttccatggatgtgccgcagggtgccaaggcggtgcgtatcgtagacccgacccgcaccacatcccgcaaccatgccgccatcagcatcgacaccgatggcgcgctgtggatcgaggactacggctcgttgaacggcacctacatcatcaccaatggccaagagacacaagtcaccaagggcacaccgctcaagctcagcgcgcctgccacggtgcgtatcggagaccagttcttccagttcaccgaaaaacaggcttgagtaatcaagcaacgagcggctgcctgctcttgttcaacaggaaaatcacaatggcaaatatacggatggcccggaactgatatagttccgggccatcttattgcgattaacgcaagatctgagtcctagaaggggcatcctttctaggaccttctcacttactcctcgatgtcaggctgaccgccctgatcggagtagaaatcatccgggttgaagtcgtcgccgagcttcagatcgccgaactcgaggttcgagaagttcaggtcagacaggtcggcgtcggagaagctcgcgtcgccgagatcgccatcgccgcccagaccgaagttcgggtagatggtgtcgcggatggccttgtcaggctcgaccacggcgttgcggtagcgcgcgaggcccgtaccggccgggatgagcttaccgatgatgacgttctccttgaggcccttgaggtcgtcgaccttctcggagagggcggcttcggtgagcacgcgggtggtctcctggaaggatgcggcggacagccaggagtcggtggccagcgacgccttggtgatacccataagcgccggacgaccgacggccggacggccaccgttcttgacgatgttgcggttgatctcgcggaagcgggcgttgtccaccagctcacccggcagcaggtcggtgtcgccggagtcgatgatggtcacgcgacgggtcatctggtgcacgatgacctcgatgtgcttgtcgtggatatccacaccctgggagcggtacacggtgtgcacttcctccacgatgttgacctgggcggcgcgcttgccgaggatggtgaggatcttcttgggatccacagaaccttcgaccagctgggtgccgaccttgatgtggtcgccgtcggcaaccttgagcggcacgcgcttggagacctggtaggtgatcggcttgatcacgccgtcttccttcggtgcgccggaatcggcgtccggggtcaggatgatctggcgaccgcgatcgttctccacgatcttgatgctgccggcgaactcggtgatcggggcctcacccttcggggtgcgggcctcgaaaagctcggtgacacggggaagaccctgggtgatatcggaggccgcggccacaccaccggagtggaaggaacgcagcgtcagctgggtaccaggctcaccgatggactgggcggcgacgataccgacggtctcgccgacatcgaccagcttgttggtggccagggaccagccgtagcacttggcgcacacgccgcgcttggactcgcaggtcagcacggaacggcacttgacttcctcgacgccgtgggccacgaggtcgttgagcacgtccatggacagggcgtcgtcgcgcttgtacagcacggtctgtccgtcggccgggtcgatgacgtcggcggcgagcagacgggagtacgggccaccgtcggcggccttgacgagcaccaggttgccgtcgttgtcgcgctcggcgacgcggatgggcagaccggccttggtgccgcagtcctcttcgcgcacgatgacgtcctgggagacgtcgaccagacgacgggtcaggtaaccggattctgcggtacgcagtgcggtatcggccagacccttacgtgcaccgtgctgggagatgaagtactccagcacggacaggccgtcgcggtagttggacttcacaggacgaggaatgatctcacccttcgggttagccacgaggcctcgcatacctgcaatctggttgatctgcatcatgttgcctcgtgcaccagactgcacgatgatggccaggttggaggtcgggtcgaacttctcctcgacttccttggacacttcggcggtgcactcggtccacaggtcgatgagttcctgacggcgagcttcctcggtcaacagacccatctcgtagttggcgttgaccttgtcggccttggcctcgtactcggcgatcttctcgtcgcgctcgggcggctcgttcacgtcggagaacgcgaaggacacgccggaccacggtgcgcgggtgaagccgagatccttcagggcatccagcgtggcggccacctgctgggtggagtaacgcatggcgatgtcatcgacgatcttggacagacggcccttggccacctgctcgttgacgaacgggtagtcggtcggcagggtctcgttgaacaggatgcggccgtaggaggtggcgaacagcacggtgccgtcgtggaagcgttcttccttgacgacctcgtcctcgccttcgcgcgggtcgagcaccttgacttcgccgggctcccagttcttcggcagcacgaagctctcgggcaggcggatgagcaccttggcctgcatgtcgatctcgtggcggtcgagggccatttcggcctcttccagcgaggagaacacgcggccctggcccttgacgccttccagcacggtggacaggtagtacaaaccgaggatcatatcctggctcggcatggtcacggtgtggccgtcggccggcttcaggatgttgtcggaagccatcatcagcgagcgggcctcggcctgggcttcggcggagagcggcaggtggactgccatctggtcaccatcgaagtcggcgttgaaggcggcgcaggccagcggcggcaggtggatggccttgccttccaccaggatcggctcgaatgcctgaatacccagacggtgcagcgtaggtgcacggttgagcagcacggggtgctcggagatgacctcctcgagcacgccccacacttcggcgtcgccgcggtccacaagacgcttggcggacttcatgttctgcgcatagttcaggtccacgaggcgcttgatgacgaacggcttgaacagctcgagggccatcggcttcggcagaccgcactggtgcatgcgcagggacgggccgaccacgatcacggaacggccggagtagtcgactcgcttaccgagcaggttctgacggaaacgaccctgcttacccttgagcatgtcggacagggacttcagcggacggttggaggcaccggtgaccgggcgaccacgacggccgttgtcgaacagggagtcgacggcttcctggagcatgcgcttctcgttgttgagcatgatttcaggggcgccgagctcgatcagtcgcttcagacggttgttacggttgatcacacggcggtacaggtcgttgaggtcggaggtggcgaagcggccaccgtcgagctggaccatcgggcgcaggtccggcgggatgaccgggatcacgtcgagcaccatggcctccggcttgttgccggtggtcaggaaggcgttgacgaccttgaggcgcttcagggccttggtcttacgctgttcggaagcgtccttgatctcctcgcgcagttccttggagatggtctccaggtcgagggactgcaggcgcttcttgatggcttcggcgcccatgcagccgtcgaagtaatcgccgtagcggtcctgcatctcgcgccacaggtccacgtcgtcgaccatgtcgccgggcttgagcttcttgaacttgtcgaagacggcgtccacacgggcgatctggtcgttgtagcgggtgcggatggcagccatatcacgctcggcaccgttacgcaacttggtgcgggccgggcccttggcctcgccggcctcctcaagggcggcgagatcctcttcgaccttcttggcgcgggcttcaatgtcggagtcacggcgctgctcaaggcgcttgatctcggaatcgaactcgtcctgcaggccgggcagatcgttgtgacgctcgtcttcgttcacctcggtgaccatgtaggaggcgaagtaaatcacgcgctccaggtccttcggggtgacgttcagcaggtagccgaggcgggaaggcacacccttgaagaaccagatgtgcgtcaccggggcggcgagctcgatgtggcccatgcgctcacggcgcacgcggctgcgggtcacttcgacgccgcatcgctcgcagacgatgcccttgaagcgcacgcgcttgtacttgccgcaggcgcactcccagtcacgggtcgggccgaagatctgttcgccgaacagaccgtccttctcaggcttcagcgtacggtagttgatggtttcaggcttcttgacctcaccgtggctccaaccacggatgtcatcggcggtggcaaggccgatgcgaatcttgtcaaatgcgttgacgtccagcacttgttaatccgtttctgttcttgagaccttcccaagctccccttgtcaggggagctgtcagccaaggctgactgaggggtagtgcaaaccggaaaggtctctgtacgttatttatttcacgttggcggagctacacgcggcgtattgaccgcatgcagcccgagggatcactggtattcgggctcttcggccttctggtcttccttggcggccgcgtcggggcgggcgccgatgttgaagccgaggtcgtcagcggagctggccggatcgtcatcctcatccttcatgtcgatggccacgccttcggcgttgagcacttcgacgttcagggacagggactgcatttccttcaggagcaccttgaacgactcggggatgcctgccggcggcaggttatcgcccttgacgatggcaccgtagacacgcacgcggccgtcgacgtcatcggacttggtggtcatcatctcgtgcagcgtgtaggcggcgccgtaggcctcaagggcccacacctccatctcgccgaagcgctggccaccgaactgggccttaccaccgagcggctgctgggtgatcatggagtacgggccggtggaacgagcatgaatcttgtcgtcgaccaggtggtgcagcttcagcatgtacatgtagccaacggaaatcggcttggtgtacggctcaccggtacggccatcgaacagggtggccttgccgtcggggccgaccagacggtcgccgtcgcggttcggcagcgtggtggacagcaggcccttcaggacctcaggcttgacaccgtcgaacaccggggtggcgaccggggtgttcggctcggccttctcggcaccggacggaatcagcttcttccactcggcttccagattcggatccaaagagatgtcccaaccggagtgagcaatccagccgaggtgcagttcgagcacctggccaaggttcattcgggaaggcacacccagcgggttcagcatgatgtcgaccggagtaccgtcagccaggaacggcatgtcctcttccggcaggatgcgggagatgcagcccttgttgccgtggcggccggagagcttgtcgcccaccgtgatcttacggtgctgggcgatgtagacgcggatcatctggttgacgccgttgggcagctcgtcgccgtcctcctcggcatcctcacgggtgatctccttgacaccgatgacggtaccggtctcgccgtggggcacgcgcagggaggtgtcacgcacctcgcgggacttctcgccgaagatggcgcgcagcaggcgctcctccggggtcagctcggtctcgcccttcggggtgaccttaccgaccaggatgtcgccggcctcgacctcggcgccaatgcggatgatgccgcgctcgtcgaggttggccacggcgtcctcgccgacgttcggcaggtcgcgggtgatctcttcggcgcccagcttggtttcgcgggcgtcgatctcgtactcctcgatgtggatggaggagagggtgtcgtcctgcacgaggcgctgggagatgatcacagcatcctcgtagttgtagccgttccacggcatgaaggcgatgagcaggttcttgcccagggccaggtcgccgttctggatggcggggccgtcagccataaccgagccggcttccacacgctcgccgtcgtggacgatcgggcgctggttgtagcaggtggtctggttggagcgctggaacttggccagcttgtaggagctggtggtgccgtcgtcgttcatcacgcggatcaggtcggcggacacgtaggtaaccacaccgtccttctcggacttgatgacgtcgccggagtcgttggcggcgcgccattcggagccggtgcccaccagcgggcgctcggattcgatcagcggcacggcctgacgctgcatgttggtacccatcagtgcacggtggccctcatcatgctccaggaacggaatcagggaggcgccgagggagaccatctggcgcggggagacgtccatgtagtccacggagctcaccggcacatcgaccgcctcttcttcgccgactcgggcaagggcggacttctgcacgaagttgccgttctcgtcgagctcctggttggcctgggcaatgacgtggtcaagatcgcggtcagcggtcatgtactcgacctcgtcggtcacgtggccgttgacgaccttgcggtacggggtctcgatgaagccgaacgggttgacgcggccgaaggttgccagggagccgatcagaccgatgttcgggccttcaggagactcgatcgggcacatacggccgaagtgggacgggtgcacgtcgcgcacctccatggaggcgcggtcgcgggacagaccgccggggcccagtgcggaaagacgacgcttgttcgtcacaccggacagcgggttgttctgatccatgaactgggagagctgggaagtgccgaagaactccttgatggtggcgttcaccggacggatgttgatcagggactgcggggtgatggcctcggcgtcctgagtggtcatacgctcgcgcaccacgcgctccatacggctcagaccggtacgcagctggttctgaatcagctcgccgacctggcggatacgacggttgccgaagtgatcgatatcgtcgacgtccacgcgcaggtcaacgtcttcgccgttgcgcttgcccgggaaggtcgccgcaccgtcgtgcagggccaccaggtacttgattgtggcgatgatgtcttcctggtggagggaacgatcgttgaaatcggcctcgacacccagcttgcggttgatcttgtagcggccaacacgggccagatcgtagcgcttggtgttgaagtagaaggagtccagcagattcttgccggcctcgggggtcggggtgtcggccggacgaatcttgcggtagaggtcaacgagggcctcgtcctgggtctcgagggtttccttctccagtgcgtcgagcaccagcgggtagtccttgaatgcctgggcgatctcggacttggtcatgccgatggccatgaggaacacgatggcggactgcttgcgcttgcggtccacgcgcacctgcggctggtctttcttatcgatctcgaactcgagccatgcaccacggctcgggatgatcttcgcgccgaagacttccttatcggaggtgcgatcctgctggcggtcgaagtagacgcccggggaacgcacgagctgggagacgatgactcgctcggtgccgccgatgatgaaggtaccgtgcggggtctgcagcgggaaatcgcccatgaacacggtctgggacttgatctcgccggtgtcgccgttctcgaactcggcattcacgtacagcggtgcggagtaggtgtaatccttctccttgcattcctgcacggtgtgacgcggctcttcgaagtacggatcggagaaggtcaggctcatggtctgagcgaagttctcgatcggagagatctcgttgaagacctcatcgaggccggaggtgtgggccacggtgttagtgccgttcttttcgtcctcctcgacgcgcgccttccagcgttcgttgccgatcagccaatcgaagctgtcggtctgcacgcccagcaggtagggcacatcgatgggttccttgatggaaccgaagttcacgcgatccgacgccttgtgcaggtcaatatcatgctggtcggcgcgtgcgatgatggtggtggtgttcgtcgtagactcagtagccaatggacgttccttatcgctcgctaatatgtggtaattcccctgggagcgccggcatggccaccatatgcctatgcggacgcttcattgtcgacggcatgcccgcaatatgacacacctcatgcaaagtcaaaagaatagcgctaaggcaagacttttactgcaccgcaaacgtcaccggatcgctcttcaccttcggatgatccttcaaactcagctgcgccacgtacgttcccgcattgactttggcccaacctgactcatccgtgcatttggcgagcgtggcgttcgcattggtattccacgtgaccttctgaacgtccttatcgcccttagccatcagcagcagacgtgaatccgccgggcacacatcggacttgtaaatcgtttcctgaccggaagtaatggtgagcacacggccggaatcggacccgtccactaaacagttgcctgacccctcgtgcacgatggtcgcggtgaaatcaagcgatcctcctaccggcacggattgggaggccgcggaaagctgcaatgtcacatcactggccgagcaatccttgacgttgctgactttcttcggcgccggcgtggcgtcgcgggaaatcgcatacacctcgtcatggtggatcatcgagttcacggcaccgataccccggccaaggctatacacgcagaatacaatcagcgcgattatcagcagcagcaccgtaccggccacgatacgccgacgacgatagatggcctgctgctttttgctgatcctgcgcttgcgcggcttgccggaacggttgttttgggagggcccgccggatggcccattggccccggtgccggctccgcgtgccgttctcgcgcctgatgtgttcctctgcactgccataactcttccagtctacggtcaccacgcccatacacgcttggggagcccaccatttttcacaatgtcagctgggtagtcgcaggccgccgtccagaatctctatcaggccgtcatcgtcaaggctggcgatgcaggcggcaagctgaatctggtccttccaaagcttgtcggcatcttccctgggcaacgtggctccagcgggaagctcgcgcagcgcggcgagcaccagaccgcgcacctgtcgatccgtgccttggaatcgttggcgtgggcgggtgcggcgctcccccagtccggggcggccggccttgagaaatgcacagtcgtccgcaatcgggcaggtgtcgcacagcggcgacttggccgtgcagatcaccgcgcccagttccatcaccgactggttccacgtgaccgatgggcgctcgccacgatgcagtcgagagcgtttgccgccacggatagtgctgttcacgacatgttcggcgctaccggcattatcggcgacgtcagcatcgcacccgagaatctcgtctttgggcagcatgcggttcgccagcgcgcgttcggccgggctggtcgctcccccgcgcgattcgacgcccaggaacacgcggctcagcacgcggcgaatgttggtatcgatcacggcaattcgttcgccgaacgcaaagctcatcaccgcggaggcggtgtaatcgccgatgccgggcaatgcagtgagttcgtcatacgtgcgcggcagtttgtcggcgtaatcttcagccaccacgcgggcgcattcctgtaaccgcaatgcgcggcgtggatagccgagccgcccccatgcggtgatcacctcggccttgggggcctcggcgagggcgcgggcgtcgggccaacgtgccatccagtcggtccagtacggcaccacacgactcatctgcgtctgctggctcatgacttcggataccagcacgccccacggcgtggcccggccgaagcgccatggcaaatcgcgcgcattggcctcccaccatgcgcccaatcgcaaagaaattgctgtgtcgttcatcgttcttattcttagcagctatgacgaacgaagcagaacagaattcgcagaacgcacagaatcccgaaacaaaagtcgagaagatgttcgagtacgggtaccgtaaatcgaattacggaccggacgaactcgtaaccgacgcgcatggcaaccccatctccgtggtggacgcgatgctctcggctgaaaaggccgccaccaccgaaaccgtaacaccgcatctgtgctactactcaccgcgcattcccggcaacaccggctcggccatccgcctgtgcgcggtgaccggcaccatcctgcatttggtggagccgttgggtttcaacctgcgcgacaccaagctgcgccgagcaggcctcgactaccacgacatggcccacgtggtgctgcacccgaatttcgacaacctggtggagtccatgcccaattcgcgcatcatcgcgttcaccgcacatgccaccaagctgtacaccgaagtggaatacaagccgaccgacatcctgctgttcggccccgaacccggcgacatccccgacccgatggacatcatggagggcccgcatgtggccgaacaggtgcgactgcccatgcgcccgtccttgcgttccctgaacctcaccaactgcgcgtccatcgccatctacgaagcctggcgccaactgaatttcaagggcggagcgtgaggaggaagcgcagtgcgcttccgagtagctccgccaagtgaaggccgataggcctgaacgaggaaaagtgacagtccggccgcaagccggtcaataattgcaatcggagcgtgatgcataagcgcccagtgggcttatgcatagccccgccgaacgagacccgatagggtcgaacacggcaatttctcccatccgctggtttctcaccggcagagccaacggaaccttggtgcagcaatcagcaacgcttgtacaccttgctcctgtgcgcgacatcaatcacaagaatcagcagaacctcatcctctatatcgcacacgatacgatagtccccgacacggtaacgccacagccctgccagattaccggcaagagccttgccggtgcttctcggatcttccaactgtgaaatttccctaagctttgcgatgattctcttggcaacattacgatccagcttcttcatcgaacgctggacgcccttgtcaatctcaatcctccaagccaaggctttcctccagctcgtcgagcgtcacggtttcgagtctgccggcacgccaatcctcgacctttttcataatgccgtattcatactcaaacctatcgatcgattcggtaagggcttcgttcatgtaaaacgtcttcgtacgaccagtcgctttcgccagacaatcgtaacgagccgccaattcgacaggcatccttaatgctgcagtaaccgtggccatagtgcacctcccaaacgtttacgtgttatacatgttaacacttttgtgattctcacaaagtgcctcgaagactgttgctctcctaacttggggaaataagcaaaaagagcagatgctgaaacgcattcgcaaggctccgaaggagcgcggcgcaaggacgcgcttgccgctgcggttgaacattactggcgtcgcaagaagatcaccgaaaaactctgatggcaagtactttgcgacctatccaatgaacagattgacataccagttgccgagcagcgaacggatgccggccatcgtggcctctgagcgactaatttggagaagtatgaaaaccatcgagtcatggtgcacaagactattaagattctgattatatgtacgtgttcatggacggtggataaggggctgcggacggtgtgggagatgcctatcaggctttgctttcatcacttcaaaactgcgtagaaaacatctgcagcttcttatccttcagttgctgatagttgtagatatatcatgtacagaatattgcatcatatgcttttaagcccctaacattgcaatttggcatctcatcgatgttcatgctgtctgagagttgctatgcatgcatgcatgctgtcgttagtatgaactgtttcctatgctctttgtcttgcagtattctccattcaccagtgacagaaggaatcggtccatttaccgttgtaccgtaagaacttctaattgatttcagacgaaatttgcgaataggtaacagagaaatttctatatccgtaaagggtatagcagtattttctgcgtatgagattgccttgtatactgcttcttttgcagaaaagaatagtctatcccaagcaacagtaggattgctattttttaacctactgatagttttaatttcattatcaaacaaagaaaatgtataatttctattggtaaaaaataattttcttcgatatcgattcctatagatcgataataataggtatgagctatagctgctcccacgcacccttcgcaatgagatagactgccgattatcccttccggccaaacaggttttccatatatgtcggaaagaatctcacttcttgtaatgttgtactcgctaaatgcatatcgagcgcaagttcgggcgtctagagactgctggtagaaacgttgggtatagccattctttccttcgacagcttcaaactcatgtgatttaggaagatttttcacatacgtataaatggtagtaatatttcctgtatgaattatgctatagggattatctgtgtaagatgagatcatttttgaacatttaccgtaatttacgatgagaggtttcagggccaaagaagataacaattatcattgcggctatagctaaaccactaatgcttacatatatcagtccttcttgtttctctgctaggagaaaagctataaacagtggcataaaaacatttcctgattttgccgcagcgtttactatgccgacgcagcggaaacggattcgtgttggaaataattctggaacataaacagccgtaacagcagcagtgagtatatacaaaaacaataccaaaaagaaccccagtattatcgctgaaattgttgttgcttgctttgcataagctattcctagaatcgctgtcatcagaaaagccaatacaatcatcttttttcgacctattttatcaagtaaaagcagggccattaagcagccaaaaggtgccccaaacatcattaagctacttgttaaaagtgaactcgataagctaattccttttgaaactaagattgttggtacccaagttgtgaaagtgtaggagcatacgtttgctgcaaccgctgctacaacacctacagtaagcataacgaataaattatcctgttgatcgggattctgcaacgcagtcctttttaacttgtcgttatttccataatttgttgctatggatgcactgctcaactgttccacgataagagctgcttccctataccgtcctttgctgattagccacctgggtgattcaggaatgtccttacgaaaaaaccaaagcacaatagccaatatgcccacggcaaagaaaactacgcgccaagaagtgtttgggattatcaaagctgataaaagaatcgatgtaggcaacccgcaattagcgacaagtgagactagtccacaccaccttccccgtcttgctacaggtgcaaattcgttaatgaaagcaaaccctgtcactatttctgagccaagaccgattcccgcaaggaacctgcagactatcagcatgtccatgttaggagaaaaagcaccgagtacagtaaatccaccgaaaagcagtaaattaatttgatatgctacttttcttcctttgcagtctcctattaggccagcaattagagaaccgatgagtagtcctaaaaagttcgctgaaagaaacatgctggtttcttgagatgtcaaccattttgatgcagtcagactacctgctactgcacttcccatatagacgtcaatactggcttccaacatccctagcgatactagtatcactattttacggaagagtctagattcagcagaattatcaattctacataataattcgtcatatatagaacctgctgcagaatcagtcacaattgtccctctgtagaaagttaattttactcattatattgattatttataagataattagaacgttgaataatctcagattcattattgccggaaataaggaatttcctgtcagaatcaacagagttatgagcgataccttttttcttgcccacagattccaaaaccgcccaatccgggatttctttttcctttggccagttcaatccggcggtttccagcagtatgccatactgagatgatcgcgtaatattcgcatccgcatcgacaagaccaagttccaataggaagttggccttgctttggtctatgccataggcggctgccagctcctgcttgatgagaccgcctcctctgcgtgccgccatttccccgaatacgaaatcaccggtttcattcttatagaattcgatatgcatcacattcggaattgtctgatcgctgaaagatgcaattaattgctttgtcagtcggagcagctcggagtagtcggcatcgttctcatccaacatcacggaaccggtgttttgtttctcgaaatccagtggcgggacaagataccgtgatggtgagatcagaatcgaaccggaattgatatagactacatccacatggtagacggaaccggaacaatattcctctaagtaatactggtttgaatgcacgtttcgtatgaattccggcttggtagctaaagcgggcaggtcatctttcgaatgcaatatcgtaatgcctgcagaccctgcgccccatcgaggtttgagaacaaccgtctcccaacgatcgaacgccgaaataatatctccaaagccttggcaggtggtatagggaataatctttaatccggcatcaagggccgattgtttcatcgtgactttatctcgacagcttaacgccagttcatgctgtaaaccgggaattccaaataaacttctcgcctctgcaaccctcagtacgtcttcctctgagctggaaactatcctatctggtttaaatttcctgacaatatcaaagaattttgcggtagcgctatcagaggaataatcggaaacctcgatttccttgatgacggagctcggccaactatggtgtgcggctcgatcgttcgaggtgaagaccataacttctaaacaatcgaaacgttcttggccctcttcgatccattttggataatttgagaaagatttgggttgttgcattagtagtactttcatattattccctttctagtgcatttgctaaaatatgagatactaaaaggatatgctccttaaaaaaatctagaaattgttctatcgtctccttgctaaaatatgcattgttatacgagattctaactttggcctcatcattaaaatattgtgtcctcacttcaattggataaccatatgaatacggatacgtgcttcctcggactaagcttgttgaaagtggagatgcttcgttcttatgggaagagcgcgttacgttcagaaagaatgtggggcaagcttctggatatacatgaggagagtttgaacggaatgagttccaagcagtctcttgctgcaacatttcttcatactctgtattaagggcaagcagctcttcatcgactgaattaaatctgcagtgtttgtggaaaaatggaactgagctgctaatccaacctgtcattgaaggaagaacaggacagtcagcttgttcgcgcccatttcgagttacgtcgacaacaatgttgtcgaggttgaggcattctgaagctgcattagtcaacgccgctaaggatagcttatctaataatccatattgtccatcatctctttcttgcaacaaacgaatagagtgatctctaatatatattggtggtaagatttcaggattacttccgttgctttcgcgataccaagaagcagagagactgtcgtgtcttttaatatcaggaagttgctctatcttttttcttcctttgtctgagttataaaaatcctccaagaacccagcatactgcaggaatccgggaatctcttctaccggttcagatatgccgattcctgctctttttgtttctgctaactcttttaatgcagactcgtattcatgaatagtcaatgcatcgcatgcccagtgatggataactagcactaataaatgagtatcgcgcttagtgaaataatggagcacggcaatggggccgttcttgatgtttaaatttgaagctgacgtttcaagagtctcatcgatctttgactggatatcatcagttgggctaagcttaatagttttaaccataataggctcatcaatcttgacgagatgcggatgtcgttctcgacctttgaaagataacccatatgaaatttcagggaacttttttaccagcatttcagcgcaaacttgcaaatcaatcattgtattcgcttgaacgctagctgcgacactttccacaaagctatgtgaagcagttatattgtggctcagaaatcgtctttgagatggaagaactctgaactccttccgaccaagtatgcaggttttaggtgcgataaatacgttatctgtttcaataatgatttttttcagctgatttacagtagggttttgataaacatctcgtacatttaggaattgtcccaggcgacgcatcctcgaaacaaactgtacaactttaagactattcattccatgggcaaaaagattgtcatcgtcaccaatctcttcatccaataaattagatagaaactgagtcattgtaggtttttccaattctcgcaactgtgcaagtttattattcctattacttatgttcactttttccaaataattgttcttaagcaaaattctattgatctttccattactgttaattggcagttcgtccagtagtaaaatatttgagggaattgcatagtttggcagcacaagctttaagcgatttctgagagcgtcgatactatcaatcggagattggagagcgtttttaggcaagaaagctacaagtcgggtttcggattctgacttaatcgcgctcacacaggattcatgaccacccagaaaagcgtttatatggttttcaacttcttctgtctcaattctgtagccatggatttttatctgattgtcagctcgcccgatgaaagacatctctccagcagatgtcagcgatacgaggtcgcctgttctataaccttgaaagccagtagagctatcagtaaaaaaattactttttgttaattcgatattatttatataaccaaatccgacgctaggacccacaacatacagctcaccagtgcgctcattctttttctttgtttgcacccagactttggttccggggagtggtttgcctaatgtgatttcttcacctagttttagcttttttgaaagacaatagatagtggtctcggtagggccgtaaatattccatatttgattggctgtgcttaagtttttgagtagtagatttgacacattttcgccacctaatatcagagtggcgttcgtttgtggtatccaacctcccattgtcatcatcgtaaacatagttggtgttccggtgaaacaattaatctgccattttttactaatctgctcaaaataatccggatttttgggtattgatttgtcggcgatgcaaacagtgacgccagctacaagaggtagtagcagctcgaaaatagagaaatcgaatgcaggagatgctacggctaataattttgtgctattggacacattaaaacgttcaatactatttttaagcacgtaatccaatgaagatgcggcaataacaacgcctttgggagttcctgttgaccctgaaataaaaaaaaagatatccaccgcccgaaggcacagggtcttttttagggcggtttccatcattgagctgtggaactattcgaagagtagagttttcggttagtttcgcacttgcactgatatgcgcttggttgcagactacttgtttacgctttccgggccattcttcttctaatgggagatagaatgatccggacattaaaattcccagtagaacgaccactcgttctttacatctaccgacatctacatttatcaccgagccacaaagatgctgctcttctatttgtgttgatatacgtttggcttgttcaactaattgcgagtatgtaaaagttccatttccatccttaacagcctcactattgggatgtttagggcatttgttaatatcttctcgagtatgaataatctttgtggatgcatgtgacttctcctttaacgacgaatgattctttgtccacgttttctaatttgattagtgacgactgcaggcattattcccactaacgccagtgcacaccaataccaagccgtcaatcctgcaggacgtagtgccggaacgatccaaccgccaaggaatgagcctgccgattcaccaatggctgcaattatcagccgatagttcagaatgtccaccaaaggcttatctggctgtgcctctaccagagcaatattgattaatggcgcatagatgcattctgcaatggagaacacaaccaaggaaatgatgcatatccaccagtacgacgagactccgcaggcgaatagtgcgaaggaaattccataaatccccaggcttttgactatgaatgaggtggcattatgttctttggtcatattgcgcgagatgatcttacttaccggcatttgcagtgctatgaccgatatggcatcaatggaatagaacaatcctcttatgactggactatcggataacgagtggaattccaatgccattccggcaaaaagctgaccattcatgatactgcccacgaacaccgccaggatggcaagaaccgtaccgggacttttcagcgagtctgtaatggttttcacgatggaggaagtgttttcctcgccgcttttctcattgcgtatgaagacatgatgagtcagcgctattggagctagtaaagcagaaaaagcatagagtccgacgatgattgcaataaagagcgtttgtccgaaagccttatatatgtaattcgaacccagaggtccaatcgcggatccaagattggctgccatggtcactaaagcaaacaaagaagcctgaattttttatcctttaccgtagcgatgatatgccctcgtagggcaaaattaaccaatgaaagaccgagtcccagcaaagccaaatccgcaaaaaggaagccgataaaaccacccattgccggttgtagcagcaaaagtgaaaaaaccatgaatccgaaaccggtctcagtgagggataccgttgagaaacgctcaatcaagctacctataaaaacagtactgcctctagaaaaaagagataaaattccgagcgccagtccaacatatagcgatgacgccgcagaaacttggccggtgagaataaccgaaagaagggagaagagaccgctgtacgcagcagtattcaaaaagtaattcactgatatggagtctcttttaatatcgttcagcttctccatttgaatggaccttcttttatgctttacaaataatgtctccccatgctagttgtcataggggacattgttcattgctgcgtccacgttttggcgtacctgagggcaccaagcctcggacaacgcaaacaatgcaacgttccacagtccgaattcagcaacgaagcggaaaagaacgactactcgtccatctctgtctcgtctggctggatgggtcgctgcacggacgatccgccggagagcatttccaagtaaaccggaatcggacgagcacatgctgctaagtaagcagctacaacgtgctatacagctcatcgactgattcggcgatgagttcgggatatttagctcgtgtggctttgctcagcggttttttggtgaataccgccaaatgggtggcggcaaatccacgaaccaatccgacacggtcgcgtaaggactcgatggtctcggtctcgtcaagattgttgcgccatttgcattcgccaagcaatatggtttttgatgaggcgtcggctgcaatcacgtcgatgtcggtctgttcgtgttttgccgggttggttcccaccatttcccgaaggaggtggcgaggaacggaagtttccagcggcgttggcataggccagccattgggcgcaaatcgcttcgaattgctgaccgacataggtggcgaacgcttcgccgagagccagtctacgcgctgcgatactgcccgcattctgttccacggcacccatgttggggcctacgaagcggaaccagtatgcgaagaaggggtctttgatgatgtacatgccgcggcgcgagcgctccggtttttcactgaacggcactcgctttccgacaaggccgaggttattgagtgtttgcaggtacaggttaacattgccgtgctcgactccggaatgctctgcgattaccttgggcgtcgattcgccgtttgcaatggcctgcatcaccgaaaaatagattgcaggctcgcgcaactcctcgcgcaacagcatcatcggttcctcgtacagtgtgccgagtttgtcgaagcagaggttgatgacgttggactggtagccggccgatttgtcaagttggctcagataatatggcatgccgccaaaggtagcgtaatagtctacctgctcaatcggcggggtgttcggcaagaatttcgcgacttccagatagttgagtggctgcagccggatttgcgcggtgcatctgccgaataagggacttttggagccaagcaccttgctttccatgaatccttcgttgctgccggaaacaatcagcatcacattggttcgtttgagatcatggtcgatggcgatctggaggaccgagggaagggagttgttggcgagtgctgcataaggaaactcgtcgaataccaataccatcggtgtactggattcccgttctcgtttggctatgtagtcaaaggcttgctgccatgtggcgaagggcggcgtttctgaaggctgcccgtaaaattcggcgatggtcggagcgaaagctccgccgaagattgcagcaaggttgtagctcagaccggtgccggagtagcgcacaggggtcgggaacagctcaggcaggtaggcgccgcacggtccgaacaggccacccatgatgacaaagccgacgcacaggaagatcatcacacgcggcacactgtgcaccagcagcaccggagtgaagaagctgaacgccatagctcaacgaccaagtactaagcacgtagaacaacgtgtaggtgatgcccatggcgagcgtaccaagcacgacttccttccagtacggaagcagtgaacgcagcggatgcttgacaacgcggtgttcatccccgaccttccggaaaaaggcaacaaaaagcccgaaggcagaaaccttcaggcttagagagagaagagaagaaggaattcaattatcggaaaccttgcggttcggggcttttgcagctgagacatagttaacctctctaaccttcaggaaccaccatgtttttctgcgagtttcctgtgaatccgcactcaccgacacacgcgagcagccgtgtatccgaaacccacatactccccacaatccgcatgcccaaaatccgcactcccccgccaagctcgcatctcacatccatatgcaaacacaacggtccctctgcggagggaccgaagcaatgtactaatgcgcagaatgctctagttcttgaaagagtgaatcggtgccggaatacggccgcctcgggtcacgaaagcttcgcagctggtctggttgaccggcatgatgggcgcgtagcccataaggccgccgaagttcgccatttcgccgacgcccttgcccgccacggggatcacgcgcacggcggtggtcttctggttgaccataccgatggcggcctcgtcggcaattatgccggaaatggtggcggcggaggtgtcgccagggatggcgatcatgtcgaggcccaccgagcatacgcaggtcatggcttcgagcttctcgatggtcaggcaaccggaagaagccgcgtcgatcatgttcttgtcttcggagaccgggatgaacgcgccggacaagccgcccacgtaggaggacgccatgatgccgcccttcttgacctggtcgttgagcatggcgagcgccgctgtggtgccgggagcgccgacctgctcgaggccgatcttctccagcacttcacccacggagtcgcccacggccggggtcggggcgagcgacaggtcgatgatgccgaacgggatgccgaggcggcgggatgcttcctgggccacaagctggccgacgcgcgtgatcttgaacgcggtgcgcttgatggtctcgcacaggaattcgaagtccttgcccttggccgcatcgagcgcgcgggagaccacgccggggccggagacgccgacgttgatgaccgcgtcgccttcggtgacgccgtggaagccgccggccatgaacgggttgtcgtcaggcacgttgcagaaggccacgaacttgacgcagccgtaggagtcgttgtcggcggtgcgctcggcaacgtccttgatgatgtggccgagcagttcgaccgcgttcatgtcgatgccggtcttggtggagccgacgttcacggacgagcagacgatgtcggtctcggaaagggcttgcggcagggagcggatgagcaactcctcggccggggtcatggacttggagacgagtgcggagtagccgccgatcaggtcgacgccgacttccttggccgccttgtcaagcgcgtgggcgatcttgacgaaatcctcgctcgtcttgcaggagctggcaccgaccagtgagatcggggtgacggtgatgcgcttgttgacgatcgggatgccgtagtcgcgttcgatggccttgccggtggaaacgaggtccttggcataggtggtgatcttgcggtagatgttgtcgcaggtcttgtcgacatcgtccgaggcgcagtcgagcaacgagatgcccatggtgatggtgcggacgtcgagcttctcctgctcgatcatctgattggtctcgtggacctccatgatgttcagcatggtttgttccttacaggatatttaaagactagtttggcggtcaccctcatcagagggataaggatggctccgtcagtggaaagcccaccgggctttccacctcctcgcgtgaggcggcctgctgagcgggccgcctcaaatacggtgcatcttggtgaagatttcctcacgctggcagcggatgcgcacgccgatgtcgtcgccgaggtcctcaaggttgccgaccatcgcgccgaagtccttgtccgcgttggcgtagtcgacaatcatcatcatgttgaagtaaccgtcgatgatggtctgcgagatgtcgagcacgttgacgttgtgctgggacaggtaggtgcagactcgcgcgatgatgccgacggtgtcctgaccgacgacggtgatgattgccttgttcatggctctccctggtcgtatacaaaaagcgggtgactacccaagtatagggaagacacccgccatttagcattgtgatttattatcatgcctcgcgtgaagcggatttcgccgcgtacgcggcaagcgcgcgcggtgcgtggaagccttgattttcgaattcgtcggcgatcttctgagcgacttcctgagaacggcccttatcaaccagagcgatgatggagccgccgaagccgccgccggtcatacgcgcaccgtaggcgccgttcttgcgggccacgtccacggcgatgtccagctcggggacggtgacctcgtagtcggcggccagcgaatcgtgggaagcgttgaacagacggcccgcagccttgatgtcgccctgagcgaaggcacgcacgaaggaacgcacgcgctcgatttcggtgacgacgtggcgcacgcgcttcttcatggtctcgtcaggcagggcgtcaagcgtttccttgagggcctggaactggtcatcggccttggagatgccgtcggcggtaacgcgcaggttggccacaccgagaatcttggcggcttcctcgcaggtggcgcgacgctgagcgtactggccatcgttgagctggtgcggagcctgggtatcgaccacaagcagctcgaggttgtacttgtcgaggtcgaactcctgctgggagacgttctccagcggggtcaactccgggcggcagtcaagcagcagcgcatggccggcggtgcaacgcatggaggcgctctggtcaagaccgccggtggaggcaccggccatctcgttctcggacttgatggcggcgttgatgagggtcacacggccggcgtcggaatcgccgtagccaaggccgtacacgtcgtccagagccagagcggtggagcaggtcatggcggcggaggagctcaggccggagcccagcggcacgcaggagacgaaggcggcgtcaaagcccttgaccttgtcgaaaccagcctgacgcagcgcccaggccacaccggtcgggtaggcggaccagccgtccacgccacgggccttgaggccatcgagatcagcttcggcgaccttgtcgggagccacgtcggagacgacgcgaaccttggtgtcttcgcgcggcttcagggcgatgaaagtgcggtgcggcagagcgatcggcaggcacaggccggcgttgtaatcggtgtgctcaccgatcaggttcacacggcccggagcagcccacacgccctcgggcgcagcgccgtaggtatcgacgaacagcttggtggcttgcgagacgccttcctcatgggtcagcggctcaatgaattcaacagcagtcattgatgttttctttctatcagtcggcgatgtcgatggagccgagctcgtggaagcgcttggcgatgagttccggcgtggtgtcggagatccaggcggccatgccggattcggagccggcgaggtacttgatcttgttggcggcgcggcggaaggagaagaactgcaggttcaggcggtagttctcgcggcgggcgtcgtggatcggggcctggtgccaggcggcgatgtatggcaggtccatgcccttgccgtcgcccttgtcgaagaaggcgttgccgcgcttcaggaggtgcgagtacatggaggcaaggtcccagcgctcttcgtcgttgagctggtcgagggtgagcacgtcgcgcaccggggccacgtggacttcaaggggccaacgggcggcggccggcacgtaggcgacccagctgtggttgcgcatcacgatgcgttcgccggcttcgagctcggcgttcatgatgtccttaagcaggttgccaccggtcttctcgtggtaggcctcggtgtgctggagttccttctccatcttcggggcgatgaacgggtagcagtagacctggccgtgcgggtgggcgagggagacgccgatttcctggccgtggttctcgaacgggaagatctgctcgatgccttccatcttggagatttcggcggtacggaaggcccaagcctcaaccacggtgcgcaggcgggagaccggcaaatcggccggcaggccgtcctcgttcgggtcgaagcagatgacttcgcagcggccggcggcgagcttcttctcccacagcgggttgccgtcaacgtaggtcacgtcctcggagacaccgggcacgcgcaccatcgaggggaagcggttctcgaacaccacgacgttgtagtcggtgtccggcacttcgccgtcctggtacgggtcaccgggcttgcgggcggccagcgggttgcccttggcggtagcgccggggccggcggtgatcgggcggttcatacgggcggtggccatcgggatccagtcgccggtcagcgggtcgcggcgcatctgcggggcggcgtacggcacttcgttgccgtcggcgtccaggtgcggggcgaaacggtagtccagcgggcgcgggtccttgagctcgcgggtcttggcaccggagacgaactcggggtcgtcgtccaggtagaagaagccacgaccgtcggcaagcgtcgtcggcgtgatgcggatgtgctccttcgcatactccccgggggtgtagttggcgaaatcagccatgggtttgctcactttcctcaatggtctcgctctggtgggccagcacgagctcctttactaaatccttggttttggcggcggagtcggggtcgagcccgtcgtcagtaatgaccgtgtccacttggtcgaagcgcgcaaacagcgacagcgacgtgcagctccacttggtgtgatcggtcaaaactatggtgcgatcggcgatgtccatcatcgccatatcggttgcggcttccagcgaattcggcatcaggaagccacggggaatcgacaccgagtgggtgccgaggaatacggtgttgacacgcagcgaagcgacgaccttgtccgcgatcgggccgacaagcgagttcgatcgggtgatcacgccgccggtgacgatcacctccacatccttggattcgagggcctggaccagctcggccacgggaatcgaattggtgaggatggtgatgccgctggactgctgcgattcgagcagatgctgggcgaagacataggccgtggtgccgccgccgatggcgattacatcgccgggagccacatatttgatggcttcctgggcgatggcgtccttcaggccgatatccatctgagacttgacagagaacaggggttcgctgagcaaggtactggtagtcaccgcgccgccatggacgcgcttcaacagtcccttgtcggcaagttcggcgatatcgcggcggatggtcatcgccgacacacccagttccttcgatagcgccgtaatgcgcactgccccgcgtgtgcgcaacctgctcaagatgaggtgctgacgttgtgacgaaatcatgcgaacattatcgcacgcaaaagctcacaaaccaaaccagcttgagcgttttggggacaatttctcgaaaattccgagcaattcaggtgtcatttccacaaaaccgcgcaaaatcgcacattgcgcgaaccgatattctcacagcggccactagcgcgatagctcacgaccgacgactctcccgcgcgcgttgctcagcggagagtcacgcctgatacctggtgcgtcccggttcatgtatcttctgccgagccgacgcctgcgtgcgcctcgacacgcagtagcccccttccccaattcgcctaggtcggaatcacctagccgcaccggcccaagcgtgagacaataggcggtatgacttacgtttctgaaagcttctggcacgacgccgtcaacaaagccaccaccgatctgttcaccttcggctacaagcacatcatcaaaccgaacttcgtgttcaaccaccgccccgatgaggcacacgatcagatgatcgagttctgccacgtcgtcaagaacgtcccgccgctgctgctcgccgaacagctgatgctcgactacaccgaccccattctggaaacgaatgtgatgggcgtcgatttcaccaacccgttcggcctgtccgccggcctcgacaagaactgcgagatgcccgtggtgctggaccatgccggcttcggcttcgaaaccgtaggctccaccacctcgcgtccctgcccgggcaacgccaagccgtggttccaccgtctgcctgaatacgattcgatgatggtgcacgtcggcctcgccaacatcggttcggacaaggtcatcgagcgcgccgagaaggcttggactcaggcccgccagatgcagctgtccgtgtcgatcgcccgcaccaacgacgaccagtgcggcgatttggacgaaggcattgaggattactgcatttcaatgcgccgcgccgccggccgcaccgcgatggtggaggtcaacgtctcctgcccgaacacgcacgtcggcgaaccgttcaccgcgactccggaagcgctcgaccgtctgtttacggcgctcgacaagatcgaccgcccgcagcccacgctggtcaagatgccgttgaacaagccgtggggcgagtacaaggaactgctcgatgtgctggccgagcacaatgtgcaggggctgtccatcgccaatctgcagaaggaccgcaccggcctcgagattccgcgcgattgggagggcggcctgtccggcggcccgtgcaccaacgccagcaccgagctgattcgcaaggtgtataaagagtatggcgaccggttcgctatcgccggcatcggtggcgtctttacccccgagcaagcctatgcgaagattcgttccggctccagcttggtcatgttcatcagttcgctgatgtaccgaggcccgcagcagattaccgtgttgaagcgcggtctggcccagctgctgcgccgcgacggattcgagcacgtctccgacgccgtcggcgtagacgtggagtgaactcacatattgccctattacccatggggcggtaaaaccctcatggggcggtgattgtcccatggggcggttagccaaatttcacattccgcagaataccgccgttttgggttaccgccccatgagggttttaccgccccatgggaaagttaccgccccatgaggatttagtacgcaccggccacgtattgcggggcgtaggggacctctgtggacggtatgcccagcttgttggccgcacgcaacggccagtacggatcgcgcaatgcggcgcggccaatttccacggcatcggcttcgccacgggccaaaatcttggccgcctgcttcggcttggtgataagacccaccgcggtcaccggaatatcggccttggacttgacctgctcggcgaacggcacctgatagttcggcttgaccggaatcgacactcccgacatgatgccgccagtggacacgtccatcacatcgacgccatgctccttcagcaccttggatagtgcaatggtctgatccaaatcccaaccgccagcggcccaatccgtggccgaaatgcgcaccagaaccggcacgccctcggggacggccccgcgcacggcatccacaacctcgaccaggaaacgagagcgaccggtcaaatcgccaccatattcgtcatcacgctcattgctcagcgggtcaaggaactgagaaatcagatagccatgcgcagcatgaatctgaatagcctggaagccggcggccaccgcacggcccgccgccgcggcgaacgcgccgaccagaccatgaatctcatccacggacagcgcgcgcggcgtacgcaacccaccgaacgcgatttcagacggtgccatggtaggccagccgcccgcctcctccggcacgctctgaccgtcgtaaccaacggcaaagcaaccagtcgaagccttacgccccgcatggttgagctggatggcaggcaccgcacccgcctcgcgaataccgtccacgatccagcgccaagcatcaatctgcccgtcttcccacaggcccagatcgcacggcgtgatacgcccctcaggagccacggcggtggattcgacaatcaccatgccgaatccgccgaacgcgcgagacacgtaatgctggtagtggaacggcgtgggcctaccatcgcgggcgaacgacgaatacgtgcacatcggcggcaaccaaatacgattacgcacggtcacctcgcgcagcgtcattggcgcaaacagccccggacggtccttgctgactttcttatctgccttgctcgcagcttccctttcctcataatcctcataatcatcgaacgattcgctcgtcttgcccgcgccggcccgcttcttggaccgtgcatcggattttgacttcttcttaccgtgcttacggttcttcgatgcatcctcgtgcttggtcttcggctgcttggactgatcgccgtccgaagacgaagccagcgtcaccgctttgagatccggcacgtcgaatccacgaaaatcaaaattctcatgcgtcagatcgtcgttgctcatcgttcccctttccgatgcacgttcatggcaaatattcgatgaacgcgatggcgttgtcattaagtattgtaaaacgggcgtcacctgaaacaggtaacgcccgcaaactacgtaatttgggtatcgcagtcggccatgttacgcagactcagccggcatgcaatcaccaaatgtcaaacgccaatcaccaatcactggccatcattcgactgctctgaattggtgccctgggtttgggtgttgttttgcccagtgttctgcgactgagactgattgttgctgctctgcgattggctgttgccattcgtagtggtctgcggcacgctgaacgttcgtccgccaatgcccagatacttgccagtcgtggtgtacttcgagacgggctggccgtaatcgttgtcaatcggtattttcttcttggaaatgtagctattgaagaagttggtaacggccggagccgcgattgtcgaaccatcccaatagctgttgtaccggccgttgatggcaatgttggaaatacggttggtgtacgggttctgtgcatcgccgaccacagcgaacgccgcaatctgattaggaatgaacgatccaccggacaccgcaagatcctcactggtaccggtcttaccaaacgacttacgcccgtcagccaatctgaatgaccaaccggcaccatccggccgcaccgtaccttggttcagggtataagcgagtgtttggatgatgtccttatccaccgcctgatggcagttcgcggatggaaccttgagatcgttgccgtccttatcggtcaccttgctgatggcaatcgggttgcattgcacaccattcgaggcgtatacggcgaagatgctcgccatggtcagcggggacacattcaccgagccgatcatcatggatggtgtatacacctgggttttgtcgatggtctcacccgtggcggcgtcatggtatcccagttcagtcgcggtgtccgccaccttgcacagtttgaggatggcacccatggaagcctgagtagtgttatgcgaacggaccagaccgaggaatgggctttctgggttcactgtacctgcgcccatggcgttcgacacgttccacgaatcggcaccgcccgaatagttactgcaggcgaagtccgtagtggggtatgacgtcgaggtctggaggttgtcgttgatggaatggcccgcttccatccacgcaatcaggttgatcggcttccaggacgaaccgatggtccaaccagaaccaccgccatccgccaaatcgacggcatagttctggctcgtcttggtgggatcgttcgcggctgccggagtggcgtcatagtaacgattcaggccaaagctcagcacttcgccggttcccggtttgactgcggccatggctatctccatgccgctgggatcgtccggtggaatggtattacgcgcggtctccatcatcgtggaattcgcttccacatccagcgtggtgacgattttcaggccaccctcctgcagcagcttgttacgctcggcacgagtcttgccgaattcttcggagttctggatgcgatgcaccacaaaatcgcagaagtacgcgtaatcgccggtgtcctgacagccgacattcacgtcctgtgctttcagcgtgtccttcaacggcgtgttcacagcttcggtgtactgcttctgggtgatgtatccttcctgcagcatcagcttgagcacgatattgcgttggttttcgctttccttctggttctcttcgaccagcggatcatacaggcttgggttcttggtgatagccgcgatggtggcggactgcaccacgttcaaatcggcggcggacacgctgaagtagcgctgggccgcggtttccacgccatacaggttgttgccgaactgggcgatgttcaaatagccctgcagaatctcggccttggaatacttcttttccatctgcacggaaatcagcatctcgcgaatcttacgggcgatggtgtcttcagtggcatggtactgggcgatcgaatcgtcatcctcgatcgcctgcatcagcagcacgttcttgacgtactgctgggtcagcgacgaaccaccctgctgggagcctttgacgaggtaggtctgcacgaacgcacgcatcacgccttgcacgtcgacgccggcgtgagtccagaatcgacggtcttcgcgcgccaccactgcctgctgcatggttttggaaatcttcttcagcggcacgacgatacggttttggttgtagaacgtcgcgataacggtggaaccgtctcgcgcgtacatcgtcgacttctggggcagactagtcacgtcgaagtccacgttttctaccttgagcgacggaatcaccgctttggcggctttattggcaccgatcacacccggtacaaacaacacgctggccgccacgccgccgcagacggcaagcatgatataggccaagaggagaacaagcacacgttggagagtgagggacttctttttgggcatgggccccattctaaatggggtgccctaccaaccgggcttacggtcagctcccgtgaacatatcatcacaagaatcgcactagcgtaacattggctggaagtcagccgaacggtcagcgccgcgagcgtcgaatcagcataccgggctggaagatgatgatcgatcggccgtcacgtgcgatccatccgcggttggaaaagtccatcaacgccttgttcacggtctcacgactggagcccaccagttgggccagctcttcctgagtcaggtcatgcggcactttgaggccctgttccaccggctcgccgaaacgtgagcccaagttgagcaatgtcttggccagacgcgccggcacatccatgaataccaagtcggagatgcgttcgttgttgccgcgctggcggttggccatgacctgcaacatgtcgatggccacacgcggatgctcatcaagccatgcgaacagggcatcatgctccagccagaccacgcgcgtgccatggctcatggacaccgcggacgcagtgcgcgggccaccatgagggtcgaataccggaatctcgccaagcacttcgcccggcgcgtggatggacagcagctgcacgcggtcatcggaagaagtgcgaatcagcttgacgcgcccctgctccagtagatacatgcgctgatcggtatcgccttcggagaagatatagtcgcccttatcgaaggtcgcacgcttcaaatgcggcagcagctcctcggcttcggctggcgatacctgcttgaacaatgccgtatgcagcaggatgttctcctcgtcagcaaaagcgtttggcgtttccaagctcatcgcaccatccttattgtcctacgaccgtcgtcggccatccgtcatattgtaacgcgccccacaggtttcgtcagaagcatgccatcattcgtcacttcatgcgtggcgcgatccgatagccgtacgacatgctgacgaatgtgttaccgcgaaaaacggcactgtcgcggttaccgcgctcgcccatgacaaaaccacgcacggccaccggcaaaatcgtatacggccatcggtgaaatcacgccgcaaaccagtcaataaggtgctcgacgatgtgttcgcggctgagacccgtctggcttttcatcgggtccacgcgtttgaccgctgatttcaccgctttgtctgacatcttctcgcgactggtgttgagcacacggctcatcttggccgcatcgatgtcatatgccatggtcacatggtgcagcaccgcgccgcctgagcctacggggaagcgccgctgcgccgctcccccgatcttgccgtactgcgaggcgatatcattgaggcccgcgaaccgcacatccaagccaagttcgcgcagcgcttcgaccagccaccagtcacagagccggtaggattcttcgatgcttacgccctgaacgaaatcgagcggcgcatacagagaataggtaatggtgttgcccggttcgataaacatcgctccgccgcccgtgcaacggcgcaccacgtcgaagccgagctgcttggcaatgtccagattcacctcgtcctgggccgattggaaacggccgatgaccacagccgggcccgcccactcccataatcggatggtcggctgtcgtgttcctgctgcgacttcacgcgcccaggtcttgtcaatggccatttgctcgtccggagtacgcggatggccgtggatcacggtgagttgaggcttgagggcgttccagcgctcccggtattcagagcttttgtcgggctgcttggtttgtgtattgatggatgctgggatgttcggcgcatcggggctgcccacccccacccgctgcgctggagcccccgccagcgggggcaagttgctgcttacggctcggctgtatgcggttttgatggcaatttcatctgtgccgataatttggcaactaggatgggcgtccaatacggaccgcaatgaatcatcgctaattagagctcgttccaggtcatgcaacaaagcatgagattcggcatccgaaactgattcaataaagaaatcaccgctgatatggcatgactgtgcggtgccgtcatcatcgacggatacggtcacggcgactagtttgctgccaacggttttgcattccccatgtcgcatttgcatgcaactcagtatagagagttttctggctcccctcagcgaggggagccaagtttgaggtcacatgcgggccagaatgtccttgccgacctggtcggtggagcgcacggtggagccgagctcctcgatgtccgcttcgacggcggtatggatcttcttggccgcatcatcaaagccgagatgctcgagcagcatggcggcggagaggatggcggcggtcgggttggccttgttctgaccggcgatgtccggagcggaaccgtgaatcggctcgaacatggacgggaactcgtcggaggcgttgatgcagccggaggcggagtagcccacgccgcccaccacggagccggcctcatcggtcagaatgtcgccaaagaggttgtcggtgagaatcacatcgaaacggctcgggtcggagaccaggaagatggtggccgcatcaatgtgctggtagtcgtgggtgacctcagggtattcctcgccgaccttgtcgacgatgcgctgccacatatcaccggcgttgacgagcacgttcttcttgtgcaccagggtgacgtgcttcttgcgcttcatagcgagcttgaaggcgtaacgcaccacacgctccacaccgtatgcggtgttgatggacacctcggtggccacctcctgcggggtgttgcggcgcaccgcgccgccggcaccgcagtacagaccttcggtgccttcacgtaccaccacgaagtcgatgtcgccggggttggcgagcggcgaggtgacgcccttgtacagcttggaggggcgcaggttcacgtactggtcgaggtcgaagcggagcttgagcagcaggccgcgttccagaatgccggccttgatgcgcggatcgcccacggcaccgagcagaatcgcgtcgttggccttgatgcgctcctcttcgtcctcgggcaggatcgcaccatcgcgcagatagcgctcggcacccaagtcgaagttctcgtactcgaagtcagctacgccttcagcggccttttccaaagccttctgagcccacggagtgacttccttgccaataccgtcgccgggaataacggcgattttatatgtctttgccatagttcaaggagcctactcgcgctatcacctgccggcccgaacccgctcagctagtggacatggcctaatgagcgagccccatcacatccatgcaccaagcgttctcataggaaacctcttcccattgcttgtaacgcccggatagaccgccgtgaccggcctcgacctcaatcttggccaccgcgtccacgccggcggactgcaaacgggccagccatttgagcggctcgacgtacagcacgcgggtgtcgttcatcgaggtggtaatgaagattctcgggaattgcgcggcggcgaccgcgccggtggcagccccatcagcactgccgtcaccggcagcctcgtcgttgccgccctcgagcacggcgaccggcacattctcgtatggcgtgtacgacttcatatactgatacacctcagggtcatgcaacgggtctccccattcgtcccattcggtgacggtcaacggcaagtccgggtcaagaatggaggtcaacgcgtccacgaacggcacatccgcctcaacaccggcgtagcattcgggcgccatattggcaatcgcgcccatcagcagaccgccagcggatccgccgttggccacggtgcgccaagcatcagccaaatgcgccttctgcagcgcgcgtgtggcgtccacgaagtcctcaaaggaatgcttcttgttcagtctgcgcccctgctcataccaggcgcgtcccatttcgccgccgccacgaatatgcggcacggcgtacagcacaccgcgatccaacatgctcagacgagagaccgagaaccccggatcggaggaaatctcgtatgcaccatatccggtaatgaacatcggcgaatcctgcgccgggcaatcgcggtgccagacgagggaaacaggaatgcgttcgccgtcgcgcgcggtaatccacacacggcgttccatgtaatcgcgtggattgaagttgcccaacacggtggctcgcttcagcagcgcatcttcaccggtggcgggatcgatttcgtgcaactcgcccgggcgagtgtagctggcgaacgagtagcgcatgcgcggcgcctcatacgaggggttgccgccgacgccgatggtgtacaagcgccgggtctcaccgggcaggtggtcgtcgctagcaccatcggaagatgacgtgtgatccgtgggggcctcatcttcggtccacaagatttcgccatgatcgccggtgaagttttcgcgatcgtcggcaaccatgtcccagtcgtcctccagggcaggcggcagcaattccgtaaaccgccacggccgtccggccaggaagtcggcggcagccgcgctcttggtcatgtatgccacgtgcggctggccgtcggcacggtagctcagggacacaaagttgcgatgcaacgcaatgccttcgatgcccagaccgtgggcaccctgcaatatcgccggattgacggcgttgaagtatgcctcggtaatcggcttatccggctcaccatgttcacagccgtacggcgacccggcggcaatgcacacgccttcgccgagtcggtacggcggctcatggccacgcatgtcaatgacgtcgatttcgaaattcggattggcggcgttgtgatagaccacggcgagtggcacatccgcaccgttctcccccgcgccttcaaaacaggcaaagctcacatcatattcaatatcgttctgacgcggaatgaaagcttggaattcgccttcaggcgtggccaccggcagcatcagcacttcggtggtggttttggaaccggtgccgatcacgatattgcgctcatcaaaactgatgccaacgcccacccagaaccgttcatcggtttctcggtacacgcacacatccgattcgaccgccgtgccaacacgatgccgccacacagcgagcggccgccaggaatcgtccaattccacccagaacacccattggccgtccggcgtgaagcatgcgctgccaatgccggtgaactgttcgggcagttcgctgaccggctccccggtctccagcccggcaaggtcgcgaatgcggaaatcatatcgttcgtctcccgcaacatccacgccgtacagcatccaacggccgtccttgctcagatccaagccgccgagccggaagaagtcatgtccctcggattccttgttcgcatcaaaaacgacctgttcaccgggcatggagccgggcgcgccttgcggatccacgaccggcgggtcccagtcatcggcatcgcgcacggggatgcggcattgcacgccatactgtttgccctgctgcgtgcgggtgaagtaccagtaatcattgacgcgcgtgggaaccgacatatcagtctcttccacatgcgatttcagctcttcaaacaacgtatgccggaaatccgccagatgcgccatgcgacgctcgcagtactggttttcggcagctacgtagctgcgcacatcatcggagtctttgtctcgcatccactcgtaatcgtcttcgaaaacgtcaccgtggaattcgcggcgcttcggctcgcgcttggcgtaaggcggcatcgcggccgcggcgtttgtgctctcgtcagtcataccacgcgattataggcgaggcaccgcaccgggacgcattcagtgttcatcacgccgcgcctatcgcaacaccgtcttcagatacggcagcatggtcttcagaatgttcgagcctgtggtgccggtgaatactggcacatcggttaccggagtcggctgggtcgaggtgagccccgtcaccgacgccaatccggttgattcgcgcgggctcaactcacgaatgacgatcgccagtacacgtccgggatatctgcgggcgatggtggcgtacgtggtcgggtctttctgcccgtcatcgcccaccagaatgaacttcatgtctgggaagtcggccataagttgttcggcaaactcaagtttgtgctgggggccggtgggtacgaaggtcttgggcctcgggtcgaggtcgcgcagcagcagcgggccttcgggaaaaccatggtcagtgatgaagttgcgaatcgaactctccacattccagggcgatgtcgaaagatagaagaacggtgcgccggggaacaggtcggcgatgcgggtgaacagcacgctcatgcccggcacggaggctttcttcttggggtcgaggaacagcaggttgtacgcggccttccatggcaccggggcctgcgtgatcatgatggtgtcgtccacatcggagatgatgccgactttggcactggcggggatggtgtacaggttggcgctcacgggtttgcggttggccacgctgtaggagacgcgatggatgccgggcaccagacgatgctcggccacgaggtcgagatatccggcggaatcggagatggcgtattcgctgccgagatcgcgcgtgcggtccaccttgtcatagacctcggagacgccgatctgcacggtgttgagcggcatgtcatcaatgctggcctgcacgtgggtgcgcggcgcgggtatggcaagcatgccgcggatgccgcggatcagttcgccggattgcgcgtgcctgggggcgtataccgtgcggcagatcagacgcgagtaatcgccggtgccataacccacatagggttccactcgcggataccagtcccattggcgcaccacctgagtggagatgcgtgaccatacgccgaacacgcgggtgacggcacgacgtatgaatcgggtgatcggcggcttgacttcgatgcgctcacgcttggagggggtgtcgaacgtcgtggcagccttgcgtgcgggaatcggcacggtgggcatgtcatcggaatgttcagcgttgctggcattgtcggcaccattggcggatgccttgacgtcagagactggcgcggtggcggacagcgctgcactgcgagcagcagcatcccaaggcagtcgcttgcctgccgcctcaaaatcctcgcgtgggcttctcatagacaccaatataggccatacgcctcattttcttggctcccctcagagaggggagctcaaaaggaactaccgcacgaccttcgcgtattcgtcggcgctcagcagctccggctcatcgtcgtcaagctcgaccttcagcagccagccttcgccgtacggatcgccgttgaccacggacgggtcgtccgccacgtcacggttcacatacttgaccgtacccgccacggggctgatcaacggctggacggccttggaggattcaagctccacgatctcgtcgccggcctccacacgggcgccaggctcaggcagatccacgaacacaagttcgccaagctggtcggcggcgtattcggtaatgccgatgattgcggggtcgaccgaacggtccacccatgcatgttcctcggagtattcgaggtggtcgggaatgtcgagattcagcggctgttcgttttcgttgtcatcactcatagtcataagcctaacctatcttcgcggtccgtcacagctcgcgaccgagccattcctcaatcatgtagcgggcgatggtggcgcggcccggcgccgccatacggccggcgatgagctcggccgtgtattcgtcgcgtgtgacccatcgcgcggtcatggtctcctcgccgtccacacgcacgtcggtggtgatcgcatgtgccttgaacgccatcatcagcgaagccgggaacggccacggctgcgaacccaggtaccgcacctcgccaagcttgatgccggtctcttccatggcctcgcggcggcaggcgtgttcaaggttctcccccgcctccacaaatccggcggacaccgaatacagcctcgaatccttccatgccgcgttgtgttgcagcagcagacggtcgtgcccgtccacgatggcggtaatgaccgccggctccacgcgtgggaacagcacacggttgccgtccgcctcgttggtgcatcgctgcgcccatccggcgagcgccggccggaccgccgcgccacaggtgggacagaaccgctggcggctgtgccagatgcttaaggtgatggcactggtggcttgcccggcctcgcgcgcgttggagtgaggggcaaatccgcgcaggtccacccagtcgaaccgggtcacggcctgttgcagcagcgtgggcttcggggccaagggctgtacgggcgcgccgaccgaatcatcgaaggcatcgtccgcaccttgcccggccgaatccggtacaccgagcggcccggcgattttggctgcggctacgccgccattacccttggcgtttcccggctgccgtattccggcggcagcacctccgctgatgccgttcttgcccagcgcgccgtccacagtgccggaatcctgggtgccgagcacgccgccgacggcaccgccaacaccggcaatcccgccaacaccgggaacgccggcttccggcacgcgcgtgatatccacggcgaccacggattcgccgcgcgccccgacataggagccaaggaacatggcgaccgcttcggggtagcgtgccagttcggcggacacataggcgcccggcaacgtggcgagccgcattttcacgttctcatagtccacaagctcgccttggccgcgcggtacggcgacaagtccgccgcgcgtaagcacgactttggtggtcggctcggccagcagctcgtcgatcaggccgggttcgcttcgccggtccacctgatagtcgatgtcgccttgtgcgagcggcaggaacggcagcgcatgggtcagtgccagaggcgagaaatgaatgtcagcggtcatcgaggtctcctatgcgttcttctgcgcgctctgcacgcgcttgacgagcgagagcagtgctcgcgccacggtatccggatgttcgacggcactgaaatggccgcagtccggaatatcgatgaattcagcgccggtgattcgttcggcgagcggccgcatcacactcggattgctggaggggtccagttcgccggataccaccaggctcggtgcgctgatcgtttccggcaccgcccccagttcaggccgtccgtaggtcatgcgctgacgccaggccagaccagccgggttctgttcgttgatccagccggtcatggtcgcgatgaattcaggagtcttcttgacggtggaatcgccatcggccggctgcgcgaagtgcatcaccggttcgaccgagttcgtctgttcggcggcgtccgccatcttcagtcggttctctccgcccacgccgtcggacgcggccatcgtgtcgcacaaggccagtccggccaccgtttcggggtacaggcgctggatgtccatcgccacgtagccgcccatcgacagcccgacccaaatcgcctgctcatagccggcggccttgatcaggtccacgtaggctccggccaggcgatccaacgcctcgctgtacgcgccgttcgccatgcgggggcccgaatcggcgtcgctcggcaccggggatgcgccggagccggccatgtccggagcccagatcgggaagtccggcacgtcgttcaggtcggcgaagtcggcgagcgccttcgcgcacacgtcccacatgcggtggtccaccgggtaggcgttcatcagcaccaccggcacgccttcgccatcgcgatagatatgattggccaattcgattgccatgaattactccttcacattcacgtcccaccagcgggaagcaaaacaactgtcagattccggcccaggccaacgcctgccgcacgatgcgcccgtggccgttgaccatctgcgccacgaacgtgtccattacgtcgctcttgggatccacccattccacatccagcgtctcatcctgcggcttgcagtcgccggcgataggcaccacgtagcacagtgcgatggcgtgctggcgcggatcgtagtattcgcttagtcccggcgtggggaagaattcggccacggtgaacggctggagcccgatcggcagcagcggcaaggcgatatcgcccaaatccttggccacattgcgggcgatggcctcgcgcaacgtctcgtggtacagcacacggccggtgatcagcgtgcgttcgatcgacccgtcatcggatacgcgcagcagcgagcccacctgggagatgcggcccatctcatcggtgcgtacgggcacgatctccacgtatgcgatgggcatctgatggcgcgcccggttgatgtcggccggtcccagccagcccggcgggttgccgtggccggaaccgcctccgtggatgaagtcctcgggcgtgatgttgtcgaattcgccgcggccacggccggcatcataatcgccctcgtcgggcacttcatcattcatgactggcatggtctcattatcgcgcgcattgatgaacatgggcacaattcaccgaaaaattgtctgtgaattctcagcaaagcgcctcatcgcctccatgcgcccgcaatccattcagcttggggcacaaacttttgccgaaatgttgggtggtgctgggaaactggtacacagcatcaagcactgtgtttgaggaaggaacttcaatggccgccaccgccatcacttcagctgagtttgagaagaccattactgacaacgaaatcgtgttcgttgacttctgggccacttggtgcggtccgtgccgagcattcggcccgattttcgaagccgcgtccaacgagccggagaatgcgaacatcgctttcgtcaaggtggacatcgacgccaatcaggatctggctcaggctgccggcattcaagctgtgcctacgctgatgattgccaagcagggcgaggtcatcttccagcaggccggcgcgctgcaggcctccgatctggacgacctcatcgcccaggccaaggcgctggatctggccgccgccaaagcacagcaggcagcgcaggagcagcagtaagccttatcacactgcggcaacggaagcgcggaaaagcccatatatagcgcttccttgcactgctaactactacatatgacacccgtggcggatcgaacacccaccacggttttttattcatccattcaacgtcctatgatagagagcagtgtgtacccaaccaaggagcgcaatgtcgaagcacgctgagcggacctcattcgtcaaaaccctgtctcggggccagtgggcgaagatcgcggcagccgtggccgcagtgggtctcattgccactgcaggcgttatatctcgcgacttctatcagtcgagcaccgctacaccttccatcaccccaacctcattctccgccactgatggtgcggcttcccgttcggcatcccgcggcgcgctcaagagcaccacctacgtgaccgtcaaggtcaatggcaagtctcgcgtggtcctcggcgaaaaagccaacatgaccaccgtcaaggatgtgctggaaaccggcgatatcgtcctcgatccggaagacagcgtgactccgagcctggattccaaggtcagcgagtccacagtcatttccatcaaccgcgccaacaccacggtggagaccaccgacaccgaaatcgccttcaatgaagtgcgcaaggagacctcgagcctgcccaagggccaggagaaggtcgagaccgaaggcgagaagggcgtgatggagaccacgtctctggtaacccgctccggcgatcaggtcgtttcctccaatgtgttcacctcctgggtcaagaaggctccggtcgataaggtgattctggtgggcacctccaccgtgtcttcgcccagcgccgccagcctcggcaccaccacgccggccggcgagattcagtcctgggcgcatgactacctgatttccaacggctactccgaggccgacttcaccgccgccaacttcatcatcagccacgaatccggctggagccccaccgccacgaacccgtcttcaggtgcttatggcctgccgcaggcgctgccgggcagcaagatggcttccgcaggtgcagactggcagaccaactaccagacccagttcaagtggtttgtgaattattgcaacggccgctatggctcgatttccggcgcgtacgcgtattggcaggcgcacaagagctactaagccagccaaatcaacacgtacacaacaggttccgcgccgcaagaaggctgagtgaaacccggcccaaacgccgagcgaactcatgcgcatgatgccggttcccaatcatcggggatcggcatcggcatttctgcgccttatcagccgaatcctcgcattatgcaacgccctagaggtcacttttaccgtgtcatacgaagtgccctccacaactgattatgcgaatccgtgacggcatagcggcacaaagcacgcatatattgagctggtttgcaacagcaaatggtggaaatgcgcactactgttattcgcggttcctttgacaattaggctagagcacaatcacttacggcttcggctcatcttccggtttcgtcccctgaccagccgccggatcgcctgtcccctcatcgtctggttgtttttgctgttgctgttgctgctgcaacaactgttgctgccttaatcgtgcataataatcattcagagctttctgccgcgctgcttcttgctgagcttcaacagctgcgctgtagtttgccatggacgtgttgactgcatccatggacgcagtcagcgtgttgacggcatcctgcatggcctttacgtcagtgccttgctgggacagcacggtattggcgttggcgatgtcgctttccagtgtcacgcgcgttgaattatcgtcgacggcatacaggctgttgtccagcaaagtctgagcctcggctatcttgctctgcaacgcctgctgagcgttagcctgatccttggcgttcttgctgtccgtcacggcctttgccgcggcagtaatcgcagtggcgttcttcttggcggtcttggtctggctagtggccgtcttggcatattgcttgaggtccgatgtagaagctgaagtcttgcactccaccgcttccacgttctttaccgcggcgattgccttcttcagcgtatctatggtcgcgccgtcagccacttgatcagctgtaatgctttgagcgctcttggcgtcggccaacgccttggccagcgccttctgagcggtggaattctggtccacggcctcagtacatgctgtcaacgcatcctgatgcagctgatggctttcccgacgctgctcgctggaacgccagtaccatacaccaccaatgatcgctgcaatcaccaccagcgcaacaatcaccgaaatgataatgcccttggtcctcttcttgccgcccttgccaccgcgaggagtctctgccacacggtcttcttccggctcctccaccggttcagggttctgttcgatggcactgaagtcgatgttcaaatcgtctatggcactatcacgttgcggcttggcttcaggaaccggcgcaaaaagcggcagcgtcgcattgtcatcccgctgaggcgactgagcactttccgcagtatcaggtgccgcaaaagtcatcggggcagtagccacagcatcggaaggggaagaggcatcgccagcagtattcgccgcactcgcagtaggccattccaatacttcgtcaaagctggggaagacggactgaacgccacccgcaacagtccccgtaccattgtcaccctgcgcaataccgccgtcgttctcgtcaaacgagatgggcggtatatcccagaaggtatcgacgatgtcaccgcgagccggcgacgtagaggaaccagattccgcgttcggttcagggcgttcgtctgttcccatgctcttctcattcctttgcgtcattgaagtcattccaaactgtcagtttatccagccctatgccaggggtgccagctggtattcaagaatgtcacaattctttactattcgatatacggccagcaccataaatccaacaactcagtcttataacagtaaaccgtgcggcacagaagtaccgcacggttcatattgcaagacgatcggcaaacgccaaactattacttgcgggctttcttctcgcccttgctcttggcacccttatgagagctgcgcttgttgccgtcctcgtaatagtagtagtagtaatagttcttcttcttcggatcagcgaagttgaagatgaagccgagaatcggcacttcagcggcctgcagagccgtagcggtgttctccagctccttcttctccactacgcccttaccagtcacgagcaccagaccgccagccatacgtccgaacacggtggcgtcgttggccacggacagcggagcagtatcgatgatcacgtaatcgtactgggtgagggcctgctcgaccatttccttcatgagatcggagttcagcaagatgctggcgttagccgggcgcttgccggcaggcatgatgtgcaggttcggcttccaatacttctgaatgacatcggccggggacgcctggcgagacagcacgtgagacaggcccacgtggccttcgatgccgagcttgtgggccacggacgggtggcgcagatcggcgtcgataagcagcacgctcttgccttcctcggcgagagccacggcaacgttggaggaaaccgtggttttaccttcggacggatcagtagaggtgatgaccagcagtcggccatgaccctgcgtggcagtggtggtaaggaacgacaggttcgtacggatgcggcggaattcctcggcctcgctaccggccggctgagcgactacgaccgggcggctgtcgttaagaatcgtggcctgtggcacagtacccagcgaagaagcgtgggtcagctcacgcacatcatcggtggagtccaccttggtgttgaggatgtccttcagcagggcaacgccaatgcctacgatgatgccgagaatcaggcccatagccagatacagcggaatgttcggggaactctgcccggtaggagtctgagccttctgcactaccgtgagcttgatgggagagccgctggaggaggagttgttgtacaggtcagaggaaatctgatcggagagattcttcgccacgctgttggcgatgtcggccgcttgctgcggatcgtcgacttccgccgagatgtccaccatgaacgtgttcgtggggttcgtagcggtcaccacgccggcaagatcggtcgtggtcatatccaggccgagatccttaatgacgggctggagcacggcttcggtcttcaccagttccggatacgtcttgatctgggtgttcaaataattggcaccagagctcatatcgttggtagtctgcgtctcgccggactgaccggcatacgtggcgaacacttcagccgtagccgtgtacttcggcggcatgatgaacgtgacagctgcaaccgcagcaaacaccaccacaaacgagatgatcgcagacgcgagatgcttgcgaacaatctgcagcaaatcagcgatggtcaatgttcttccttacctcttcgggaaattttcacagatggtctataatttagcatctaccggggaacttctcgagcttttgtatccttgtgaacaatgaccaaaacccttgatacgactgcagaataactgtacacaatcgcaatcacaatgtattgtaattcgaattatcattcattacaatcaaaattgtcaatactatttatgcagtgtgaaggagtatattatggcatccttgcttcaaggattcgaagaagttcagctagttaagcccgttggcaaaacggtaatgaccgttaccgattccgttgtacgttttaataaggccaccgcagaagtgctgaattttccagcacaagttaagatccttattaacgataaaaccagacagattgccgtcacgccgactaccgctaaggcgaataatgccgtgaaattcagcaagggtgagggcaagcagactacgtctgtaagtatcaagaatgctgtgcttgttgaagcaatttccaagtacttcacgcttgtcgaagctccagaaggcgaggtctctttcgcctccgtcaacggcactgcttacccggaagacaagaccgtgatttttgatgtcgcaaacgccactgccggcaccatgaagcgccgcggccgcaagaaggctgagtgatttctgcttaattcgagattatacgaatactgtaaaagcctggatttcgaattaatgataattcaggcttttaatttccaaaaaaccagcatggcttgggttgaacaatacatgcaccagccccacggagaggatctaaacggctgattggcccatagattattcattttttgtaagcgactgccaattacttggtgggagtttaaaagtacttcatgaaagtgaacggttgaccgaacccccatcacctcacccacacatgcaactggtacagttctcacggaggatatgggagggaaccaagtatgtccacaccgaacaatacgcagctcggcaacaagtcagttcaagaaaaacgcagaaactccagtcattgccccgcgctacagcgtggggcaatgaccgagacgctgactcgtatcaccatcaccccatcagacatgttgatgtttgccgcagtggccatgctgccatttgatggcacaaaaattggcattccactcccctattgggcgccaatctccccctggttgttcaccctgtacacaatcatcaactggcgatacttgcgcgataccgcacgccgcttcctgccgttcttcctctttcccctgctactagtgctcacatccgtatacggctgtggcagtcatatggaatacacgacagcgcaaccgcaaagtcattcatctccatattgttagggctggcgtgcttggcttcgctcgacatcgcgatccgcattaaacgtgtacctgtacgaacattgttaactacgctattcaccgcatatgtagtggcattcctcattgggatactgcaatatatcgctttagaacgacatctgaactggcagccagtacgagcatatttttggggtgctctgtatagaaactatgcgagcgttcgtcctcaattcatgttcgcagaacctagctatatcggcatgcatttgttcggcgtactcctgccagttttctggctgacccgcgaccgcaagattggcatattgataccgatatttgccgctggagcaattgcgatgggctccggcacccgaatcatactggatacagtggtagccacatttatctggctgatagcgacaatcaacttccactcacgtaaggtaacagctgggttcgtcggtgctttaggacttcttggagcaggtggattgagcgcaattatcatcaatccgcgtctaaactctttagccaccaatggattacttgctggtggcggatcgatgagtgcaagaatcttccatatgctcgctcccatgtggtcatggaaacatgatctacctcacttcatgtttggatggggcgcaggcaatatctctaatgcagtgcgtactggttacgccggcgcccgccaatggtatgacgcccatagcggtgcgcccaataccgaaatcgacggtttagcgaatcccccagcggatactttcacaatgagcatctatgccagcttcattaccgaatttggtctattttgctttttggccttcttgctcttggtattagcacacgtagcggtccatcatggatggaaccgacggaacatatgctggttcattcttctcgcatacctatatattcagtttgaatcatacgcattctatgcaattccactgttcatatgggctgtctgcacaataatgaatcgaggaaaaaacaacatcaattccctttagattgcgagaatcacaattcgctactctctatcatgccgataaagagtgcgcatacgcccgttgtctaattgaaagtgcagcacccgttagattggagattccgcctataagcggtatatgaaacctttcacgaccaaacaaatctggctgatggttggtatcggactcggatccttcctgttatacaccgccgcatctgcaacgttgtctctgcttgggcacagcatgggaatctacatcactgggtcatggaagctgcccgtcatcatggtgggcttcggcatgttcctgctgttcgaccgcgccaccttccacagccgtgccatcaaccggatagcgtaatccgcgttcgcagtgtacctgattaccgattacgccgcctccgagaaactgctctgagtccggttgttcaacctgcagaacctgtaccagcagccattggcgatcctgcagattctgggcatcctgctggcgatctacgcgacctgcacactgctcgacttcatccgccaagcactattcgccgtcaccatcggcaagcggcgcggacactggtttgacctgctgtgggacaaggcatccacccaatcaatcctttcgcctgaacacgcaagccaatctcaccgcttccacggaaaataaacaattctgaaatgaaaatcgcacacgtaaggcacaggttgcaccttcttatgccaagtgaaaccagaaaatgtatagatttgtggacacgctcataaaaccatcacttttagcagaaaattgcaaaaatggacatttctagttataatctcagtatcaaaagagtaaaacacatttacgaggcgacccaatgctgattgattttagcttttcgaatttcaggagtttccgcgacgagcaatctttctctatgactcgcgacgaaaggttcacggaatccaacgactcacggcagtctccaatcacagccatatacggcgccaatgcatcaggaaaatccaatttcctgaaggcgatgtgcgccatgcgcagcatggtgacaaacagctacagccaaggtgatgcgaacagcgatattcttagggaaccattcctactgagagagaacccattcgaggaaccatcgatgttcttcctggagttcacagccgagaaccatctgaaataccagtactggttccgctataacaataagcacatattagaggaagagcttaccttctttaaggacatgggaggacgtctctccactcactcctcactgttgttctcccgcaccggaaacgacgaggtgaaattcggagccactttcaaaggacctagaacgcaagtgcgaaagacagtgggactccgccccaacgctctcctgctttcggcagccgccgcagccggcatcgaatgtgtccaacctgtattctcgtttttccagaatgatatggcgtattgcgtggcaaacgctttcgaacaggaacagcccatattgcttgaccaattcaagaacaagacacctttttcgaagcatctgacatctctgatcaagtacgcagattttggcatccgcgatgtgaaaagcgttccggcgaacatcccctcggatatctggcatcagttcaaagagcagatgaagactcagatcggagctgatgagggaaagctagaggaagcattcaacatcaaaaacgcgacacagttgcaattcactcataccggcgaagattcgtcctctgccggctttggcttggataacgagtccaggggcaccgtcgccgcgctgtcgttcttctcgcttgcccttcgtcagctatcaaggcccacggtcacacttatcgacgaaattgacacaagcctgcacccagccttggtagcagagctggtggcgctgtacaccgatccggcaacgaatccccacggctcccagctcattttcacgacccatgacgtgtcattgatcaatcagtcgggttcgtcgaaccgcctactacaacccgatcagatatggcttgtagagaaagataaagacggcgcctcggaactcttcccggtaacggaacttggtattcgaaaggaagagaacatcggcaagaactacctcaatggtgtatatggcgccacaccgaaccccagtttccataccgtattcgcacagatcatgaatggagacgatgactgatggcgaagaagcgaggcgttcccgcgcatggtcgcgagtctgcacgtttccacagggcacgcaagaagcgttatcttgtcgtagctggcggagctgttaccgaaagacagtatttcaagcagctcgagtccatatatgacgttgtcatcgactaccaacagaagaacgaaagtcctgaacagctcgcggattttgcatgcaagttgaagaaagaggatgaacgggatatctccacagattgctatgaaaaaatctgggtggtagtcgatgttgacgactttcacgaccacagcaaggccgcaaaaacttgcaaggacaatgggatcgagctcatcatttccaatccctgcttcgaggtctggctgctcgaccatatgaaggcttgtccaccaagctacacactgacgcccgatgtcgagtcagctgcggcaaaagccggcatcggtggaggg

SEQ ID NO: 935 - DNA, 3216 bp, Unknown
  gut microbiota DNA sequence
cgtctcaagaatgaagacgtaacagtgagaaaggtggccgacaatcgctttacaattggcctggcgtcggctatcactatgttcgggcatacggttcgcgtttatgatttggaacgaaccatttgcgatttgttccgctcccgcagcacagtggatccgcaagatttgcaatccgccttccagaattacatgagatccgcgcacactgacttggtcaaactcatgaactacgctcgcgaatttcggctcgtgaacgtgatgcgcccttacctcgaagcggtgatgccggcatggttcaccggcgaattcatcttgtaggcagattcagcatcttgtaggtagctggccttggcgagaggtcattgcaatggcggtattccgatcatcgccattggaatcatctgcctacaagagcacgaaacaccctacaagatgagacgggccagttgggtcagtcccattcatcctgccggttcgcaggccgcaattgtcagtcacaactggtgcatcttcctcatccatgcgaatgatacgaatcgcctttcatcccaatgatttcgctctcatggccgatacccgcatgccgtcatgttccgtaccttggaatcagaagtcgagagtcatggtccgaaaccgaacggagcgggccgaagcagggagcattgaagatgggatttcttaagaacttttccgaaccgtttgcgttcgcgctggcattgtggccgtttgtgtccatgctgctgacggtgccggtgctggcgctgctgtatcaccgcgacaatcgcatccgactgtcgtcggccatagtggcgtatggcacggtgctgtatctgctcggcctgctgtgcttcacactgtatccgatgccggccgatgcggcggcctattgcgccgcgcaccatctgacaccgcagatcaacccactgcagttcatcggtgacatccgtaccgatggtctcaccgccgtactgcaaatcgcgtttaatatcgtgttcttcctgccgttgggcttcatcatgggccgtatctggcgttggccgctgccggttaccgcagtactgtcgttcgccacgtcgctgtttctggagacgatgcagctgaccggcctcatgggcgtgttcccgtgcgcctaccgtctgttcgacgtggacgatctcctgtggaacacgaccggcgcgctgatcgggttcgcgctggccatgttctcgctgcgcctgattccggcgcgggtcgccgatacgacgccgaccaccacacccggcttcatgaggcggctgatcacgttcatcatcgacatgacgctgatcgggttcgccgtgatgccgacgcatctgttcgtcatgatcgtccaatcgaacctgccctcgggctccaacggctcatggcagtcgatggaaccgttcgactggaccggctcgatcctcttcctggcggcgctcatcctcttcgagggcgtggtgccatggttgcgcggcggctgtacgctcggcggcagcttcacgcacatgacgatagagacccggccgcgcgaagggtggcttcgcgtggcgttctatgtggcgcgcatggcgacgctgatcgccgtggtgtggtggcatagtggcggattcaatctgctggtgttcatcggcctcggcatcttctggctggtcaagcgtcagatgccgtacgacctgatataaaccggcgctccgctgcttggcgttacaggaaaacctccgaccactggtcgggattcggaatgctgcgcagcgggccggccaacgatacggccaatcccgctacggaacagaccacggctacggccatcaccgccgtgaaaccgagatctggctgttgcaacagccagccgaccatcgccgggcatgctgcgcccagtatgccgaccgtggtttcaaatacggcagaagcccgcccctgcatgttgtcgggtgtcttgccgtagagaaagcccagcaggccagcgttcaacgcggggaacggcaggccggccagaatctggcagatcagaatggccgcgtagctgtgcaggaatagcagtggcatctggctgaccacgaacaacgtcagcgcgcccgcaatcagtttccctgtgggaaccatatcgactagcttgttggccaacagcgagccgaccaaagtactcacgcccattgccgtgccgagcagtccgatcatgaccgcgttggcgccacgggcggccaacatgatctgcgcgccggtgatactggctacgcaggcgatgttcacaattgcaccgagtatgatcgcggataggaaattccttttggtcagggcccatcgccagccttcgaccaagtgcgtgggaaatggcacaacagaagtgccgtgggcccaaacggcgaccacggcttagcgcgacgagtcaacgcgcattagctgtctgcgaacgacaccaacaccttgtgcataacaatgcccctttgcaaaaaacaaactccaattattgtaccagttcgagcatagaaccaggcgcgtcactgggcacaacataatcggccatcaatggtttctcggcttcgaggggctgatttcgtccggtggggacatctacttggctttcgaggggctgctcaaacgccaaaccgcgagtataaacggctttgcggcaacgccattacgccattgtggagccttgtctactcgggcatcagccccttgaaacggagatagatctccggcaagtgccaaatcagcccctcgaaatcgagttaggcgttgttttcgcgtttgcgctgccgttcgagtgcgtaataagccgcgtagcagcaggcgacgaacgggatcatgcaatacagggtcgaacgctgcgtatcatcgagcaccacgagcaccagcgcgccgatgcacatcacgatggccagccacggcagcaccgggaaaccgggcgcacgatagccgagctcatcggcgctgtgcccatcccgcgcccattcgcgccggaaacggatatggcacacgcatacggagaaccacaccaccagcgtcgccaaacctgacacggcgaccaacaccagatacacggtcgaggcggcgatcacggaagacagcaacgccagcagtgagcccgccatgctgaacagcacggcccacaccggcacaccacggaaattcgtcctagcaaaacgttcgggaatcagccgctccttggccagcgaccacaccatgcgcgaacacacgtacaggccggagttc

SEQ ID NO: 936 - DNA, 495 bp, Unknown
  gut microbiota DNA sequence
aggcgggttctagtgatcgttgcaacacctgacctaccgcaaggagggtcaggtgaccagaagccaccgaaacgaagaccgtggcggggaacaccgttggacgttcaacggcgtcgaatatccgacgaggaagctgatgtgcgaggcgagacgcgccgagtacgtgcgcctgctggacgaggaaggcatgaacttcacccaggccgcgcacgcggtcggcgtctcgaaacgcaccggcaaggcgtggcgcaacggcaggacgcgcgccacgggaaggaacgagaaacccctggtggactggtatcgttccaccatggacaaacccaagaccctccatccgcgctacctgagccaggaggagcgcatccagatcgcggaccgtctgcgtctgggcgattcgatccgcgccatcgcccgcctgctgggccgcgaccccggcacggtcagccgcgaggtcgagcgcaacaggaatcccgagtccggcggttacgagcc

SEQ ID NO: 937 - DNA, 377 bp, Unknown
  gut microbiota DNA sequence
accggaaatacagctcgtaccggggcgagacgggcgcgagggtggagaacctgctgaaccgcgacttcacggccgagcggccgtgggtgaagctgggcacggacgtcaccgagttcagggtcgccgacggcaaggcgtatccggctcccgtatgcgacatgggatccaaggagatcgtggcctgggacgtcagccggcatcccgacatggcccagcagcggcgcctgctcgccatgctcgaggagaagctgcccgaagacgccaacccgatcccgcactccgattaagccgggtttgttgttaagccggggaacggttcggggtcttggtggctggccgtgtcccatgtggtttcccggcttaacgttccgggttat

SEQ ID NO: 938 - DNA, 7120 bp, Unknown
  gut microbiota DNA sequence
atctggcgcatgaagcccatgtccaacaatcgggtgagaagctcagtggcgtagcgctgctcctccggcgtggcaggacgcagctgtactgcggcggcaccgccattcacgccaacacctcctcccgacacgttggcctgcaccggctgcgcaccgttgccactgtcgtcgccaggcagaggcagaggcatgacagccagctcgttgatcacctgattgagcatcggcccgccggccttggtaaggttgtgcatccacagcccctgcggggtatcgtcggatggcagtccgccggcggccgcgatcgcctggaacagggtgcggaacaccgaagtcatgaaatggtcgatggtcagctgcccgaacatggtgcggtcgatggcgcgcggcacctgaatcagcacggccatgaactgctgttcggcgatgaatacggcgtcgtcgatcttgaaatatgcctgttcggcggcgtcacggcgctccaaggccttgcgcgtggccggattggcgtacgggttggtgccgggttccacacgcagctcgtcacgctcgaatcgacgtttgggcgcgtaggcgtcctcatcgcgtacatgcatctgccggcgtgcgttcatcacctcgcggcgcatcacctcaaggtccacaccgatacggcccgcggacttgcgcacgtaagcgtcccacagggagcggtcgcgaatctgcgccaccagcggggccacggctttcatcgcacccacttggccgggcgtgtaggtcaggtcgaaccggctgatggcggcgtcgatcacgaagtcatacaacggtttggcgcgggcgatcagcgaacgcactgcttcgttgcctcgctcgatgcgcaggtcgcacgggtcgagattgtcgtcggccacggccacgaaggtttgggagaggaaggccgaatcaaggccgaaggcatgcagcgcggctttctggccggcggcgtcaccatcgaacgtgaacacgatgcgcgagctcaacggctggtccttgaccttcaacggcccgaccagctggaccgcgcccagcgaatcgtcggcgatcaggcggcgcacaatcttggcgtgctcggcgccgaacgccgtaccgcacgtggcgatggcggtgtcaatgccggccaagtgcatggccatcacgtccgtatagccttcgacgatcaccacctgtcgcttcttgacgatggcggatttcgccaaatcgatgccgtaaagcacctgggttttgcggtagagctgcgtatccggcgtgttgatgtatttggcggcgatctggtcgtcctcatacagcttgcgcgcgccgaagccgagcgtgcggccggtcgaatcgcggataggccacgtcacgcggccgcggaaatagtcatagatgccgcgctggccttggcgggccaagcccgcgtcgaggatttccttctgcgtaaaccccttggaggccaagtggcgcacaagattatcccaaccttggggcgcgtagccgcaaccgaaacgttcgcagtcggcttgggagaagttgcggcctccgagcagcttgcgggcgggcagtgcttccttggtcaggatctgggagacgaagaagcgttgggcttcctcgcaggcttccagcagtcgggtgcgcttggagccggtgttctcgcggttcgggccgttgccgctgttctcgtagtgcagctcgatatggtacttgtcggcgagcagttccacggcttcacggaagtcgatgttttcggattgttcgacgtatttgaatacgtcgccacccaagccgcagccgaagcagtgccacacgccgagtgaggggcgcacgttgaagctgccggttttctcgtcgtggaacgggcacaggcccacgaaggtgccggtgccggagggcttaagcgttacggtcgcagatacaatgtcatacaggtccgcggcggcgcgcaccttctcgacatcttctttcttaatcattccgaccataagtctctagagtaccgcctcacctgagacacggtaaatttttaccgtcggttatcatttcttccgcgaaactcccttcagtcgcctacagcgacagctcccctcacccgaggggagctggctcgcgcagcgagactgagggaagcacccgtccaacacgccctcagcacaagatggagtgcagggccagagcggagttgtcggtcaggcttgcgacctgatcgatggcgacgcgcaggcgctcgtcgtcgttggtggattcattccaatcggccaggaactggctttccaaagcgtcggatgggagcggcgaatcagccataagcacatcgaccaaatccgatacgatcttgagctcctcctgatggaatggctcgcgctcgcgaggcgccatgacgaagtacacggcgatgcccttcagcgccacgatctcgtaattcgtgttctcgggaatcacgatgttcgcggaataccgggtcaacggcccgggcccgtacgtgtcgcgcgtggcggtttccaccgaccagcagaagcggccgatcaaatcggacgtaatgttcttaagctgtgccaacgattcgcgcgaaccattgaaatgtgcagggaacaaatactctcggcgcaatcgcatgaacgcggccagcagcttgtcggcatcccacttcgccccataccatgcgcgcgtctgctcgatgatgtggtccagcatcttcggatcggcgagcacaatcggatcgaacgcgccggtggcgatggaatcctcgacgtcatgcacggagtaggcgatatcatccgaaaggtccatgatctggcattccatgggcttggtggcctgaggcgcgccgatcttgagccatcggaataccggctcgtcatccgggtagacgcagaatttcttcgaccgctccccctttgggtgttggtcggcttcggccaaggtccacgggtatttgacggccgcgtccaaggccgcacgggtcaggttcacgccggccgaacgcccgtccgggtgaaagatcttgggttcgagccgggtcaggatacgcatggtctgtgcgttgccttcgaagccgccgatattgctggcgatgtcggcgagcgcacgctccccattgtgcccgaacggcgggtggccaaggtcgtgggccagacaggcgcagtcgaccacgtccggatcacagccgagcaatgcgccgatttggcgaccgatctgggcgacttccagcgtatgcgtcagtcgagtgcgagcgaaatcgtcggtaccggcaatcagaatctggcttttcgcgcccaaacgccgcaaagcggacgaatgaatcagtcgcgcgcgatcgcgctcgaacgcggtgcgtgacttggatttgggcgcctcgggtgcccatcgctcctcgtcgaaggcgctgtagccctcgtcgctcagcacctgttccccatccaaagtcgtttccatatgccaagcataggcacacatatcggccgcagtaatcccgacttcccgaatatgtgccactgacgtcaactcaacggcacatattcgggagattggggccgatttcccgaatatgtgacgctcagcacatgtcagtggcacatattcggaagaagggatcacggggtgccaccgtatggcggtaatgcaccttatagcagcgtggcggggtcgagtttggcgaggtcggcggcgggcagcacttcggcggcatgctcgtaaagacgcgggatgcggttgcgcaggcaggtgaagatctcgtagctgatggtgtcggcggcgcgggcccaatcgtcggcggtaggctcaacgtaatcctcgccgcggcccgggccgaacagttcgaccgtgtcgccctcgtgaacgccgagttcggcggcggatccgtgcaggtccacgatgaactggtccatgcacacgcggccgcacacgcggtagatcttcgggccttcggtggtcatgatgcgcaccgggccgcccggcttctccacgtgcttggcaccttccatatcgaaaccggaagcggagcggtggatgccatcggcgtagcccagcggcacaatagcggtcgaggtgttgtccggggtcaggtaggtgcggccgtaggagatgccgtggccggcctccacatccttgaccgtgccgagctgcgcctgcaggcgcatggccggggtcagatgccagtcgcgcggggtgcccatcgcgggatcgggctcgtagccgtacaggccgatgccggggcgggtgagttcgaagtgaatctccgggcggtccaaagtggccgctgtgttggccaggtgacggatctccggcggaatgccggcctgttccatgcggcgcgtgaagtccttgaatgtttcgatctggcggtcggtggaggacacgaattcggacacatcgggcgaatcggccacggcgagatggctccactgacccacaatatgcaacacgccctctttggcgagcggcacgagtttggcgagcgcggcgtcgaatccggccggtgtgaaaccgttgcgaccaaagccggaatcgaccttgacgtgtacgcgggcgggcttgccgagcttgcgtgcggcggcggccaccgcgtcgatgccgggcagggagccgaccgatacgtcgatgtcggcggcgatcagctcgtcgaacgggacttcggtgccgttgtatacccaagtcaaaatatggcagcggtcggggccgatgccgagcttgcgcagcagcaacgcttcgtgcgactgcgcggtgccgagccatgtggcgccgccggcgagcgcggccagggcggcgggcagcagtccgtggccgtaggcgtcggccttgaccacacccatcaccgccgtgccggaagcgggaccgccgaccacggagaccaggtgggccatgttgtcgcgcatggttttgaggtccacgatggcctgtgcggggtattggcggcgggcggccgcatagttggccttgccctgctcggacgagaatgcgatttcaggtgctgcgttcatgctcataggcacctattgttgcgcgagaatgtgacgtgtagtcgcaatcgtctgttttcgcccggcagtcgtacactaatgaccgatatgcggtttctcggaagccgcctttgattcccggcgttgaggcgtgccgggatcccggaaatccgtccggttcagccccataatcctagatttcatgagagaagaacatggatctgtttcgtaagaaaagcgtggatcagcttgtcgccgaatccactcccctcaagcgcacgatgcgcaccttcgatctgacgatgctcggcatcggcgcgatcatcggcaccggtatcttcgtgctcaccggcaagggcgcgctgaccgccggcccggccctgtccgtatcgttcctgctggccgccgtctgctgcggttttgccggtctgtgctacgccgagttcgccgccatggccccggtgtccggctcggcctactcctatgcctatctggcgttcggcgagctcatcgccttcgtgatcggctgggatctgattctggagtacgccctgcaggcggccacagtgtccgccggctggtcgggctacttcaacaaactgctggaaggcttcggcctgcacctgccggtcgagctgaccgccgcctacggcaccaacccggacgtcaccacctacttcaacctgcccggtttcgtcatcgtgctcatcatcacgtgggtgctctccatcggcatcaaccagaccaagcgcaccaatgacgtgatggtgctcatcaagctcgccatcatcgtgctgttcatcgtgtgcgccgtgtggtatgtcaagccgtccaactggcagccgttctccccgtacggcatctacactttccagcccggctccacccagccgtacggcatcgtgccggccgcttccatcgtgttcttcagcttcatcggcttcgatgccgtgtcctcttccgctgaggagaccatcaacccgaacaagacgctgccgcgcggcattctgctgtccctggccgtttccaccgtgctctacgtcatcatgaccctgatcatgaccggcgtggtgccctacaaggagttcgccaagtacatcgacgccccggtggccggcgtgattctggagaccggcatgaactggctcgcggtgatcgtgaacctgggcgccctcatcggcatgaccacggtgatgctcgtgcagctgtacggccaatcccgtatctgctacgccatgagccgtgacggcctgttcccgaagttcttcggccacgtgcacgagaagtaccgtaccccgttcaagggcacctggttcttcggtctgctgaccgcgttcgccggcggcttcatcaacatcaacgtgctgttcgagctggtgaacatcggtacgctgtccgcgttcatcatcgtgtcggccggtattctatggatgcgcaagacccagccgaatgcgccccgcggcttccgcgcgccgggcgtgccggtcaccccgattctggccatcgtattctgcttcgtgctcatcgccggtctcaactgggagacctgggtgcgtttcgccgtctggttcggtctgggcctgatcgtgtacttcggctacagccgcaagcgctccaagctcggccttgagcagaaggccggggctgacgccaaggtcgctgcgactgaggactgaggtctatcggctgaccgatagccgatggctgctttcgtgaaaaccgtacgctgagttactttcagcgtacggtttttgcgatatgaggccatgccggagaccaccctggaccgtatggtccgcaagagcgtcaaggagaccttgaacgcgatgcccgctaccagaggtgcatggtgcacttcgaacgcaacgtcctcgccagggtcaacccccgcaaccgcgagatcagacggcgcacgcgcgtggtcggcagcttccccgacggacgcagcgcgttgatgctcgtccgcacgcgtgcgttatatcacgtcgaacgagtggtcgacgcgccgctacctcgacatgtcaagactcggtgagaccgtaggggaagcgaaccgatcatcgccacagggacgggcgaagaccaaagtgcgcaagatataggacactaccccagcgcaagctctcccaaggcatcaccgccggtgccgtgaaataacacccccccccccc

SEQ ID NO: 939 - DNA, 521 bp, Unknown
  gut microbiota DNA sequence
aaagagtccaatgacggccgtcacacggcgtaggcggcccagcgaccgtgggtgtgctggacttcgatgggcataccgaagagattggagagacgctcgtcggtcagaccgtcttccagtgaaccggtatagacgatggtgcccgcaccgggattgcccattacatcgaggcccgcttcagtggcatcctcggcgggaatcggcttgcgacccataatggcgatgtgatcgaagcctgccggaatctcctccaggcggtgagtaaccaagaccacggcgcgatcagaactttcctcgccgatacggctcagtgtgcgcatcacctgctcgcggccgcccaggtcaaggccggtggtcggctcatccatgatgagcagctcgggatctcccatcagcgcacgggcgatcaatacgcgggtgcgttcgccttcggacagtcgccacatctccttgccttccagataggagacgcgaaaatcacgcagcagctggcgggcgcgggcatattcctcgtccgtata

SEQ ID NO: 940 - DNA, 1359 bp, Unknown
  gut microbiota DNA sequence
tccgtactacgatctgaggggaacaacaggggggagggttaagggtcaaaatgtgtgtctggctcggcgtgtcgcgggggttagatttggcctttttgaatgccgattgagtgggtgtagtcggtgtcgatagcgttgtcgtagagggctgggcgtcctgtttcgtggtcggcttggttctcggtttgggtcagggtggatactttggcgagttggccctggccccagtcggactgcctggcgattcgtactggatcgtcaggcagttccgtttttaagtagagccaccaatccagcatgcggcgttgtcgttcgcctgatctgccgcggtgggttctggcgagcagtttgagctgggcgttgatgccgccttctaagctgttggtggtggatttgatccgctcgggcgcaaggactcctgctggcgggttgaggtagacaaacagcatctcggaccgccaaagatggttgaggctgttgtaggccttgcgcacgttgtggtgggtccacacgcgggtccatgcacctgttttggggtctttgatcatggttttctcgttcatccattcccggtagatcgttgaaaactcgtgcagttgcacaccccacgcggcggcttcatccagtgtggtgatccgggtcagtttcagcgcaagtcggtagatggtgcgcccggcatcggtgcgtgggttggtggtggtgtagcggcggaccacgcgttgggcgtggacgaggcagcgttgaattttcgtagtcggccagcactttttgattgcgctgtatgcgccttggccgccgtcgatgacggcgatgagtggggcttcgatgcgttcaagcagcagttggtagtcgcgggtggtttcgtgtttgcaccagtgccaggcgatcacgtggtcgatggtcgccgcgacgatcaggcagccaccggcggtgtaggtgccatcgagaaatacctggtcgtagatccgcttgtggtggccggcggtggggtcaggcacatcaacgagccagcaccacttgaagcgccgcttcatggtggcgcggctaacaccgtttcgtttggctaggtcgtcgagtgatattgcggtggtgcaatgctcgatgaactgggtgaacactgccgcgttggtgatgtcgtttcgacgtttgacgctggaggcgccgcattgtttgcagcgccatctggtggtgcctttgctggtggtgccgttgcgtttcatttcaccgccgcagtggcagcgtggttggttcttcgacattgcgacaccacaccacgccgcgcatagcacatcacggctgccacaccgaggatttcccgtcgggggctagatatatgcttccggagcatatactttccgg

SEQ ID NO: 941 - DNA, 199 bp, Unknown
  gut microbiota DNA sequence
tcgatccgcgccatcgcccgcctgctgggccgcgaccccggcacggtcagccgcgaggtcgagcgcaacaggaatcccgagtccggcggttacgagccttaccgcgcccagcagaaggccgcggaccggctcaaacgccccaaaccgcgcaaggcggccgagggcacgcgactgtgggacgagatcgccgccgggttgc

SEQ ID NO: 942 - DNA, 522 bp, Unknown
  gut microbiota DNA sequence
aaaatgagtctgcgagtcagtggtgcgtggcgaggctaacccgtggtgggggagccgtagcgaaggcgagtctcaaaaggcgttttgagtcgcgcgccctggacccgaagcgggatgatctagccctgggcaggttgaagcgcgggtaagaccgcgtggaggaccgaacccacctgggttgaaaaccggggggatgacctggggctaggggtgaaaggccaatcaaattccgtgatagctggttctctccgaaatgcatttaggtgcagcgtcggttgattgcatcgcgggggtagagctactggatgcttgcgggcccgtgtcgggtaccaatagcagccaaactccgaataccgtggatgtgtattccggcagtgagtcggcgggggataagctccgtcgtcgagagggagacagcccagatcgtcgtctaaggtcccgaagcgtgtgctaagtgggaaaggatgtggagtcgcatagacagccaggaggttggctcagaagcagccatccttgaaagag

SEQ ID NO: 943 - DNA, 410 bp, Unknown
  gut microbiota DNA sequence
ctcgccaagaagcagttcaagaaactgccggtggtggatggtgatggcagactcgtcggtgtgatccgccgtaagtccgtgatggaacatgccttcgatgcgctgttcccaaaggatgatcggtgattaggcgccatcatcgctgaatagaatgaatggaatatgaggcttcccttctcgcgggggaagcctcattgctttgtccgcggagtcttacggcacctgcgcaagggcaacgtcacgtcttcatgatatactattgaatagtgtgttcctctcgttgcatggtgacgctaacgcatggcgtcacgatactgaagcctgccatctaacggcgggtacggctcgttgctggagtcgtgcacgcatacgcgcgtcggcgtgcgtatgccgtgatgtgacctttgtag

SEQ ID NO: 944 - DNA, 1395 bp, Unknown
  gut microbiota DNA sequence
ctcctgctgctcggcgtatccggcgaacagatcatcggtcacctgcactacgtgcgcccgtccgcgaagcccagcagccccaccagcctcggcggctggcgcgaaaccctcgactacgccgataccgccacgctcgccatcatcgacggcgtcaccagctgcctcgcctacgcaggcctcgacagcaacagcggcgacgacatcgcagcctggtacaacaccatgccccgactcatctcggcatgcgggccagcggtcgtactcatcgaccacgtcgtcaaaagcaaggacaaccggggccgctacgccggcggcagcatgcagaaactcgccctcatcgacggcatcagctactcggtggacatgaccaaaccagtcggcaagggcgtgcgcggcaccatcgtcatcaaatcaggcaaggaccgcatcagcgagatcgaggagcattgcgccgtcagctggagcagcaacggcagccacctgcgcgaagccgcccgcatcgaaatcaacagcacggatccgaaactcatgcgcgtcaccatcgcacgacccaacatgatgcccagcgaagaccggcagacgaaacgcgacgacttccgacccaccggactgatggaacgcatcagccgcatgctggaggactcactcgaagaaccgaaccagtccgaactgttcaaggcactgaaggaagacggttccggagcgcgtaccgccgtcatgagcaaagccgtgagtctgctcctgcaggagggtttcgtctcgaaccgctctggacgcaacaatcgttcgatattcaaatccgtccgaccgtaccggcagatagacgacccgaaatccgacgcctatgtggaccgtatgagcagggaggaggcgagtgaattggatgacgaaaaccacctcgaaatctagtttttcccgtttttcccagtttttccgagtttttcccggaaaaactgaaccatcgagtctagtttttccccacactccccggacacactacgtgtgtgtccgggtgtgggaaaaactacggctcgcccctccggaaagaccaaaaacacctctcaacgacactagattttcccaaaccaaaggagcccaaaatgtcactcacattcagagagcaaatcgaagagaccgcatgggaactcggcaacggcgaaggtacagtgcccgagttgcgtcagcggttcgacgacaatcccgacactccgaacttcgacccggccaaggcattggagatgctgcacatcctccaaatcgtcaactacaagcaagtccctcagcatcgaggcagaccagcccgcagccatttcctaaaacaatccgaatactcggtgctcgattttgacattccgaagccaatccccaaggacgagcgggaacgacagacgcgaa

SEQ ID NO: 945 - DNA, 463 bp, Unknown
  gut microbiota DNA sequence
ccaatgtactctcgaagatcttgggtgtcatcccgttcctcgggctgggcgatttggtggactggttgctgtccggcacgctcgggctgaatgccttggttccggttggctactacaacccggttatctcgaatagttcggtgaacgggttcaaagagaacgtggtgatcggcaacaaggacaacccgcaggccggtggcttcgtcggtgcgcagattggcgcaatcgtcgagaactcctcggtgacgagcacgaacggtttcaccgtgcaggcaacgcaatacgccggtggcttcgccggagtaagccgcaacggcaacgtgggtggtctgctcaattcgcttggtattgatttgctgtctgcgctgcgtccgcagagcctcatcgagaacagcaacctgaccgtcgacggcgatggcaaggtcactgtatctgccacggactatgccggtggatttagcgg

SEQ ID NO: 946 - DNA, 8949 bp, Unknown
  gut microbiota DNA sequence
attccggttggctactacaacccggttatctcgaatagttcggtgaacgggttcaaagagaacgtggtgatcggcaacaaggacaacccgcaggccggcggctttgtcggtgcacagattggtgcaatcattgagaactcttcggtgacgagcacgaatggtttcaccgtgcgggcaacgcaatatgccggtggttttgccggagtaagccgcaatggcaatgtaggtggtctgctcaactcgcttggtattgatttgctgtctgcactgcgtccgcagagcctcatcgagaacagcaacctgaccgtcgacggcgatggcaaggtcactgtatctgccacggactatgccggtggatttagcggcgcgatggccaatgcctacgcggtcaataatacgatttcagccacggctgccgtgtctactgacaaatcccacgccggaggattcaccggatttgcctccgtgggatggggcctagaactcggcacggatgatgccacgaacgcatcgctgctgaaacaactcaccaaggctgtggccaagctgctgagcggcagcggtagtggtgcgggagaactgctgtccatcgttggcgtgaatccctccgtgattctcggcacgcagatgaagggctccttcaccgttaaggctggtggcgattacgcgggcggtctcgtgggagaaggatcgggcacggtgatcggcgactcctcgcaggatcatctgcagaacctcacgttctggaaatacaacaatccccgtgggctccctcagcagcgctccactgccatcaacggtcttgaatcagtcagcgccggcggctcctacgcgggcggcatcgccggcaatctgcaaccgaccacagtggctgggttgctcaacagtgtggtgaaaattggcgatatcgccacgctcaagaagttcgaccagtttgccccgttcaccgtggagaacgtgactgttgctgccccggcatccggcttgacagtgacggctggctcatactatgcgggcggtgccatcggatgcgccaccggtggtgacgtgaccaacaccaacctcactaatctggccacggtcacggccaagggagaagccggcggtttcatcggcttctccggaccgggcgacgccgttggcgccggcggccttaatgtgcttgggcttatcaagctatccggtctgctatcggttgcccaatattcttcggttgcagtcactgcatcgaatgtgaacggcatcgccaacggattcacggtcaaggcgaccggcaagaacgagaacaacgagaccaccgattacgctgcgggcggcttctacggccaggccaacagcaccaagacccgcgaaagccatgtgacgaacctcaagtcggtcacggccgataccagcacatccgatggcatagcgggtggcttcgtgggcttctccaccaccggcggcctcgccgacgcacttagcaacgccgatgattccagcgtattggacaacctcatcaagggcggactgctgtccgtgaacgacctgctcggtgccatgccgtatctgattccaagctatacggataccactgtgtcgtatgtcaacggtggttacgtcgaaggtgatatcgcgggaggctacgccggcaatttccaaagcggcaaagtcaatcagttcgataagaaagatctcgagaacgacccaacactggcagacgtgcagtcccgcgtccaagccaaccccgtggctgttgtcaacctcgaccatgtgaccggcggcgcatacgcgggcggtttcggcggcaaggtcgtttccggcgcactcgcttcggctggtaacggcggtctgagtttgctcggcaaattcggtacggtggatctcgccaacctgctgcaggtggtgcagggctatgtgccgttcatctcctacgcaggtgtgcattccgatgccaccaccgtggagaccaccagcggcaacaagatttccgacccggatgatcccggcttcaccgtctccgccacccgacttgaccaatccgatacgcaatccggttccgccggcggctacatcggctacggttccggtgtgcaggtgtcccattccagtgtcactcaactgcgccacaccgatgtcaaggcaccgaagaatctggaaaccaccggatcaatcgacgacacctatctgagcaaagacagctcgtatgcagtcactgccgcgcggtatgccggtggctatatcggcaaaatggatatcggctcggcagcagccgtgggcggcggcctgagcctgctcggccagaacgtcaatctcaacgacgtgctggatgtgctcaacattgtcgtttcgaccatcgagcactccgacgtgaccggcggcatcggcggatactccgtgctggccagcaccgcagaccataggaacgccaacaacaagcccgatccactgggcatggccggcggcttcgccggagacatcgaaggcggccatatccaggactccagctcgcacgagttcgtgtacatcatcggccaggtatcggccggcggctacgtgggcaccatgcagccgggagccgtggcgaacgtactcggcgacggcagcgtgctcaagaagctcgtcaacctcgacaacctgctctcgctcgtgcaggacttcgtgccgacgattcgcaacagctcaaccgatgccgcagtgtgcggcggcgcggtgcgcgcacaggcggcatcggatacaaccacacgccgcggcatggccggcggctatgcaggtcgtaaccgcggcggccatatctggggcaacaacaccgcagcatggaagcaggagaacaccgacggcaaatacaacgggccgcaacgcgtagcctatgccgcgcgcatccgcagcgtatacggtgccgaaatcgccggcggctacaccggcttcatggaagcggccgataccgctgaaggcggttcgctctccttgctcggcggtctcatcaaggccggcaacctcgccggcgtgctgtccgtggtctacccgaccgaggagcacacgaaggtcaccggtccgctgcgcaatatgagttacgaccagtggaagacgtgggttgacaacatcggcaagtacggtgcgtatggcaaggaattcaccgaggtagctacgggcgatggtgcggtctctgttaccgaccaggattccctggacaagttcctcgaatcctacatcttcggattcaacgtcgtcgccggtcgtgcggagtatcggaccggcgcgaacctgcatgattccggcgtcgccggcggacacgtcggcctgatgcgcaccggtacgatcaccgatggccagtcgatggatgtcaagaccgtctccgccatgcgcgcggcaggcggctacgcgggcacgatggaatccggctcggcatcctcgttcggctccatccaactattcggagacaaaggcatcaaacttgatctgggccagatgctcgacgtggcacaggtattcgtgcctgtcatcaaatcctcgagcgtggccggctaccgcaagggtatgaaaatcacggccgccggcgaagacatcacgcacggcaccggcaatgccggtggttacgtgggtctcgcggttggcggccagatctggggcgatcttgatcagaacggccagaagcttgctgatggtgtcaccgctgccggtgccaacgtctccaacctgcgcaaggtggaaggacgcaacaatgtcggcggattcatcggcgtggccactgccggtgcggtcgcagatgtggataccaatgcatccgagggattcctacaaggaatcctcgactcgctggtatcgaacccggcaagtctggtcagcgtattgcaggccacggttacgacgattcgcggtgcgcatgtgagctcggatgacccggcatggggatacacggtcgacggcgcatatgagagcaaggacgataagggtaataccacaaccaagtatgccctgaacgccggcggtttcgccggctcgctgcaggccgcgatcctcggtgacaaggactccgccaagggcaccggcagtgaagcggatccgaacaatgacccagccgcacttacagtcaccgggttgcgcgccgttgaaagtggacaatacgcgggcggcttcttcggccttgccgatgtgtccagcgtcgcctccgttggtggcggcgaagctggcaaggaccagaacaccaaccttctgctcaaactgctcaaggtcggcaacgtgggtgtgctcgaagcgttccgcaccttcatctacgacggtcaggtcaacggcgtgagcgacggcatccagattgtcgcccacgactccaccacaaagggcatgcttgactcgaagcgttacaccggtgcggccggcggcttcggcggtggactgatcaacggctccgtcaagcagtccgcggtcaccaacctcaacagtgtgaccggcgtgaactacgtgggcggcttcatcgggcatcttggcaaatccggcacggtcgccgccgacaacgcacaactcggcacgagtgcgctcaacctgctcggtgccacggccggcgtacttgacatctggggctcgcatgtcggtgattcgcatgtcaccggcatcccggacggctacaccgtcaccgccacacaccatggcgacgattacggcaaagccaccgacaaggccactggacgcgaggtcgcgggcggattcgtcggctacgcggacctggcccgagtaaagggctgcacgtctgacaatctcaagaaggtcaccagcggcgagatcgccggcggattcgtcggcgaaaccagccgcgcctatctggtcgatacgcaggtcaactcggtactcgtggaactgctcctgcaagtggtgaacgcgctggtcaagctcctatacctcgacaaggtggaacaggtcggcgttattgacttgggcaagtggttcccggctatcttcggcaaggtattcgacctcaaggtgctctcggaaggcaatgtgctgtacgtgaacctgttcgggctgaaggtgagcgtcgccctgtccaaggccgacgccgaaaaccagcagcagaccgacgtggcgatcgtcaccatcggcgacagcgtcatcaaactgccctgcagcaagaacggcatcgacatggatgggtcaggcagcaacctgaccgtccaactcatcaagggcaaccgcacccgcgtggaacagtccaccgtgacgggcatcgccagcggctatgacgtgttcggtggcggagcgactcaggacaccgacggcgtgaaggatctttccacaggctacgcgggcggcttcgccggactgaacgacgagggcgtgctggcggacgaccacatggtctacgccgacacgatccgcggcaccagcggactggtcgacccgttctcgaacaccaaactcaagtccgtatgggacttcaacaccatgagcgacatcctcggaccggtcgatgacggcaacggcggcaaggcatacaacacctaccgcatctaccgcaaggcggccgcgaacgccggtgaggcccgcacctccgcacaggacggcaacaagatcttctcgcggaagaacacggcagacgatgcgctgcacaccagactcgatcgctgggaagtgaagctgttcgacgtggtcaacacatacgacagcggcgctgtgcacagtggtgcatccggcgacactggtgccacatgggtcggcatcaaggacgccgtgactgtggctgatggcagcagcacaaagctcgatgcctaccagtccccggccaaggccgtgctcatgctcgacgcgcccgtatccgacaacaacggcggactcacccccgaaccggacgacggccaggacccatgcggcaaggacggttgccggagcgttgacttgaccgtgcagaaggtgtggaaggattacggccgagtcactcgtccggatgccatcgcgttgaagatcaccgcgacctacaccaatgatgcgggggagaaggtcacgccggaaaccatccagtgcttcgacggcgattgcaacgccgtaccgaagaccaacggctggaccgaggtattggattcctccgacggttcgctctggagcagcacatggcgcaagaagatcacgggtctgccggtggccttcaccgatgatgccggaacgctgcgctactacacgtacaccgttaccgaaacctggatgatgttcggcaagggggatgtcgtccagtgtgcaacctctgccggagctgacgccacggaaggttgcaagacgcctgccgacgccggctactcggtctccgtctcctacgcggcggatccgaacaacaccactggcgacgttaacaaggaatacgtggccacagtgaccaatgccgtgccattgccggaaaccggcgggcagggaacccaatggttcatgctgttcggcctgctgctgctcggacttggtaccgcatggtatttcaaggcaaacgcgggcggcgcacccggcccatccggctcatcccgaaaacgaggacgccacgcggtctcgtgatgtcaagatttccgtaactccggttgcgggcaccccaatatcaaccaaccttacttttcggcacgcaacagtccgagaggcaacaacaaggagaaaggagccagtgatgaactcactgaccaagaagcttgcggcgggcgttatcgccgcagcgacgatgttcagcatcgccggcctcggcgctaccaccgccaatgcggcaaacgcatctgacggcagcatcgaggtgagcagctccaatgccgaattcaagggcaagaccgtcactgcctaccagatgttcacctatgacaaggaagccgtggaaaacggcactgctaccaacagtggctatgcactgattagcagctgggatgatttcttcctgcatactgtgcaggttgaaggcgcaactgcggagaacgtttctcaaaaggcttacgattacgttgccagtctgaaggacgctaacgtcgttaacttcgccaagaaggcttccgattgggtcaagtctcaggagaactttggtgcctctctgaagcacgaggcaattgctgctgcgaacggcaacacctataccgctactatcaacaacctgtcttacggctactatgtggtaagcccggctgccggttccaccgacaccaccactaagcgcggtacggacgccatgttgctgaacgtgaagaacagcacccccgtgaaacagaacctgaagagcacctacccgactatccagaagaccgttcagaacggtaatgaggattccacgcacaacagcgctcagatcggcgataccgtgaacttcaagctcgcctccaccgtgccggatatggccgagtacaccaactacaccttcaagttcaccgataccctgtccaagggtctcacgttgaacaacactgctgcaactggcaacacctttaccgccgttgtgaagattgacggcactgtagtagacactggtgattacactgccatgttcactaaggacacaatttcgggcacgacttctcttgaagtcaacatgaccgatttcaagaccaagcaccagcatgatgccggcaagaccatcaccgtcgagtactccgccactttgaacactgatgcggccgttgcgggtaatggtaacgacaacactgcgaagatcatctacagcaatgatccatccagcaacagtactggtggaaccggcgaagacaagacctacacctacaccttcaacttcgctatcaacaaggtggatgcagacaacactgatatgaagcttgcaggcgctcagttcgagcttcaggatgctcagggcaacaagattgctcttgcatcggtgaatcctgatgaaaactccttccgtccgaaaggagccaacgataccgctgctgcggatacagcggtcaagaccaacagccagggtgttctgaagttcaccggtctgaaggaaggcacctacaaggttgtggaaactaaggcgcctgcccactataacaagctgaccgctccgatcacggtggaaatcaaggctaactacaacgctgacggcacgctgctcaactggggtgttatcaagtccggcgaaacctacgacgcagaccatcctgccacctccataaccgtagaaaacaagaagggcatcgagctgccctccaccggtggtatgggtacggctttgttcacggtgttcggcgtgctgatcgtggctctgggcgccggctggtacgtgaagtccaaccgcaagtcctctaagcacgcagcctgagccgacttgccaagaggagcataacaacatagggaggcaagaccatcgcctccccggacaaggagaagtatgaagaggaagctgcgcggccttgtgccgctgctggtgatcgcgatagggctgctcgtgctgttctatccgaccatcagcaacttcctcgtcatgcggaacgcttcgcgcgcggtcaccaactatgatgccgcaacacaatccatctctgataagcagtatcagcagatgctggccgccgcgcacgcctataacgaacagttagccgccaataatgccggtgccacggatgcgcttgccgcagccgtcaacaccgaagcagtcagcaaggaatacaataacctcctcaatctgagcggcgacggcatgatgggatacatcaccatgccccgtctgcacgagaccctgcccatctaccacggtaccgccgagaaagtgctgcagataggcatcggtcacttggaacagacctcactgccagttggcggcgcgtccactcatgcggcgctgtctggccaccggggcttgcccacggcaaaactgttcacggacttgaaccttatgaaaaaaggcgacaagttctacatcacaatacttaaagacacgtatgcgtatcaggtcgataagatcactaccgttctgccgaccgataccaaacaactggcaattgagcccggcaaggatttggtcacgctcat

SEQ ID NO: 947 - DNA, 2661 bp, Unknown
  gut microbiota DNA sequence
gatccaattcatgggtggccttgcggatgcgtttggcgacctcgaagcccagatcggcgatgcgctccgaacggatgacgtacaggtcgtcggttagctcgttgccgttctcgtcgtgcaggtcgtagtcggcgatggcgctttccacgatctgggcgatgcccaggctggacagttccgcgctcatgagaccaccaccgtcggcttgcccgacatcgcgtaatcggccaccgcgtccgacgtcagcagcttctccaactggctgagcggccttggcttcaactggtaagctccgggatacttggtggcaggataggctttttcgaacgtgccggcgttgatgcggcgcgcgcccggcttgacctgcactttcagattgccggcctggtaggtgccggccggatgcgagtcgaggatacgggccttcagctcgtcgacctcctcctggcggatggcgatctcggcctgcaattcgacgatgcgcgccgcctgagcttcgaataggccttggcgcaacccctcgtcgggattcttggtttcgacttccttgaaatcggggggcaatacttcattcgcagtcatttgatttgcctttcacgatgatctgggcgtgggtgggataccacgccgtctgatgtttggtctgattcgtatgccggttgcagcaggtgaccgcctcgtccaggccggtgggcctgccgagcggaccgcatgtcctgcaacgcggcatatagagacgccggtcaggcatggcactgggtcccatggaaacgtgggttgcgtggaatgcgacgcctatgcttcggcggtcgggccgccagcctttcaagctcacgctgcttgacttcggcctccacaagttcggccatcgcctgacgcgggttgcgcagcagccggttgatcgccgcaccggccttcacgacctcctgcgccagctcgctggtcttgttcaggattcgcagcttgtcgccggcaatcgtctcgtcgccgaacttcttcgacaccttgccgatgtaggtcgcggccgcatccgtgattttcgaggagaccggcacgaggtcggcgatgtccgcggacaggtcctcgtcatcgatcaacgtctcctgtatcatcttcggctgcttcatgattgtctcctttcctccggctcccattccgggagcggtttgatactgatatagaggtgcggctcgtactcatgcccgcaacacgtgtacgggtcgccgctcttgcgcttccggtagcggcccttcgacccgtagacccataggtcgggcatccgtttgctggcgtggctttcgacgacctgcgcgtcatccacgtaggcgacgccgttcaacgagtccaaaaccagcttcaaaaggttgtcgagatccggcctgcccctatgggacatccagaattcggcctccaacctgaccgggcactggtatggtttcgcctgcgggtatttcaaccggaattcggcgaacaggcgttcctccgccctgacggtgcgtttcggggtcatcgcgtgcccgttgtagacgcggggacgccccttcggcaccgggtcgcccggcagacagagcgtgaactcacttggctgttccatcgccaccccacttcaacaggattcccacgaacatgagcggcaatacgaccgccaatgcgagcgagccggttatcatccactgcggcgtgccgaccgggctggggatgcgactgtgcgtgccggcgaaaccgaccagccacccctcagcgaacgtgagagccagcaacacggccgatttctgcccgtccgttaacctcggccggggtcggcgcatacgcttctttttgcgcaatgcttcgatgctcattccgcaacctccttgcgcttgcgttggatgtcacgcagcagggtcagcgactggctgaggatcatcgacgcatcgaacgccaactggttctcacccagctcgaacagcgcgtgttcgagagagccggccgcgtcatgcacgtcactggccacatcgacggcgtgctgccactgatcgaccggatggaacaatcttttctccacggtgtccttgtctggatcgcacgccggacaatcgcacttgccggtttccggctggcgcgtctcctcgtccaactccttctccaactcagcctctcctccctcaagcagctgctccatgagctccttgaatgacattcccttcgggatctcgacgccgatggcgtggattccggtaatcttgtgtcctgacatcacttgttttcctttcaatgtgattggtgatgttggtgccggcgtgaaccttggacagtgcgacgccggcacctcttttctcccggtttcgaatccgggaaacccttattcgccatggaccagctccttgcgggtgatggcgcacctgttgttccggtagtcgatgacctcgcgtggatcccacaccagccgacggccgatacgcttcggggccggcgggtatttcccgccccaccggtcgtagcaagaccagatgtaaagagtgctcttcgaaagattcaggaattccgccaccttgccaatgggccaaccgtcctgtgcttctatctgcttggacatgattcaccacgcttcttggcgagcaggccgcgccagtccacggtcgacgcccactcgaatacccgcaggtagtccgcaaaaaaaaa

SEQ ID NO: 948 - DNA, 3614 bp, Unknown
  gut microbiota DNA sequence
tagaacgaaccggtcaccccgtcgaacgtggaatacgtcaggtcgaaccacaagtcgaacataggaaccttcgctttgaacaccgtcaggaacaggtcggcctcatcgttcggatcacataccaattccatggggaaggaatgtctgtaagagtccgacacgatagggtgggtgagagatagacgaagatttttctcggggagagcgccggccatcacgcacccgctttctgactgagctcatcccatgcccggtcaaacaaggggcgatcttcttccgtgtaggcgtagacctgaatgatgtgaccgttcggcagtgtcagatcagcgcgttgtgggtctcgaccgtttcgctctcgatatgcggccttgagcttcttgccgaatgtgccactcttcgatcgcagctgcttggcgctcagattcttctcccgtagatagtcctgtgtgtacaggggacgggtcttcgggtcgagctcaggtagttcccccaattcccgtgcgatcacgatgcgcgtcttcgcttcgaggaaatccgggtggacgatgccctgcgaagccttcaacagttcgacttgcatcatgcgctcatggtgagccgcctcaagcaggtgttgcggacgctgcacctcgtatctgccgctgcgcattacggtcggcactagttcgtggttcacccaacgctggaaccggatgaccatgttgcgcgtggcctcgtccttgactgcgccggggcggcgattgttcaaggcgtggatcaggccgggcagcgtgatgacgctcatttcttgttctcctccaagggtgggcacaatgtgcttacccttttcatcggagtcaagattgcgcaacatgtccttcgcgctctcgtatgcgagtttcttcgcgatggggctggcgacgaacaccggctcgtcggtgttgcagtccagtgcggtgacctccgtatcttcgaaacgaagggtctgcaatgcgttgctcatttgagaccaccgtcctctgcttccacggtttctacctgttcaatgctttcgacgttgttgaatggaacgattgtcgtaaggggtccatcggaggaagacccgtctttgctgagccattggacttcgtagaacgcgaatccgacgccggggaggacatccacgtcagccgcgaacaactgacggtgccccttgaacccggtcttgagcaaggttgccacgcagggaaagtcgtcgctccaccatgaggggaggtcgagggtttcgatttccttgttgtcggttagaatggtgttgttcatttgaaccttctttcatttgatctcggcatccgtggcggcggatgccttttcttttgcctgggtggattcgatggcctcggcgagaacctgagccggattcgtgttaagagcgaaggcggttttgatgaactcgcttagggacatgtcgtccgacttgaggtgtttgcctacggtcatccggttgaggccgaccttggaggcgatatgcgtcttcggcacctcatcgagcaaggcttttactcggaggctcttcacggccgaagcagctgcgttgttggctgatgcaatcatggtttgtatattggcacctgccaacaaataaagtcaaacgcttcggcgtgttgtcatgtgacaacagttcttatgcggcgtttctagctgctgtcaggtgataacatttgcacatggcaacaaagattgaatgggatattttcgactacgcggcaagagacgtattgtctggtttgctggatgaattgggcgcttcgtaccgcgaaatggaaaaccttacccaaggtgaagtaacttatagccgtattcgggatataaaaatgggcaataaagcaccagtccgactgtctgagttcatcaggcttagcgcaataagtcactgtcttccagtacaagcactcaatatggtgcttgaccgtgtcagcgaactcgaaaacgaagaatatatgtccatgacacaggaggagcgcgattccattaatgaaatattcgaaatgctgaaggcgcagcagtcttcagatatctctactgattccgtcgatccgtccactcttaatcttgccgcgaagtacggtgatatcgagcgtgagcaggaagcatacgaggaaatgccatgatcgacgtggagaccatcgccagtaaatgggccaacgtgtacgagctggcgttgccggcagatcttgagggcggctacgatgcggccaacaatcgcatactcatcagcgaccggctcacaccaatccaacgccggtgcgtgctcgcacatgagattagtcatgcccgtcatcacgacgtaggatgcaaatgcgactccgcaaccgagcggagagccgacatggaggccgcacgcatgctcgtcaaccagctcgaatatcagtccgccgagattatcttcgacggcgacgaatgtgccatagcacgagaactcaacgtcatgccctggataatccgggcatacaaaaactggctgcacgacagcgtggctgcataaagaaggaagagaaccatgggattcaggattcgcaagagcataagtctcggcaaggggttgcggttgaacctcggcaaaagcggagtaacaagcgtgaccatgggcaagcgtggcgcgccgcacgtgaccgtaggcaaaggcggcacacggttcggcaccccgataatccccggcaccggcatcagctacgagactaggctcgacaagccgtcaaagaaggcgagaagaaagaacacgacgatgggcagccaaaaggaaccggcatacaccccgtcaacgttcccaaccccaacgcagcagctgcccaccacgtcggaacagccgatggagatactggcaccgaccgaagtgctgcagcagccgccagccacaccgacaacgcctccccgagacggagggaatggcggaagaaacggacgacacggttcacacggcgcgaagaaaccatggtacaagcgctggtggggaataactatcatcgttctgctgaccatcggcgtcatcggctacatattcacaccgtccaaggccatccccgacgtcgtgggccagacagttttcgaagccaagattgccctcgaaaaggaaggcttcaaaaccatcactgtcacgcccgacaccaaaggtaaagacaggaaatggaaagtcgaggaacagacgcccgaagcagggcaaaaggagaagacctccacatctatcacgctcacagtgaagcgagacacttctgacctgccgaacatagccaaaaaaggcatgatgctggacaaggccatcaccgctctgaccgatgaagggtatgacgcctcggactacaagatcgaaagcgacagcggcaaatcggtcattctctattcgaactgggagattctgtcagcgaacaacggcgtgattcgagtacacaacaaggccgccgacgaagaggcggccagaaaggcggagggagaaaagaagaaagcggaggaagaagcagctcagaaggccgaggaagagaagaaagccgccgaggaacaagccaagcaacaagcggagcaggaagctcagcaacaggccgccgccgaggaagccgcacgtcaggctcaacagcaggccgaacagcagcaagcacagcagc

SEQ ID NO: 949 - DNA, 1897 bp, Unknown
  gut microbiota DNA sequence
tgtcagccgcaggttgactgagggagagaccagaaaaccaagagggcgtcagcaagaagctgacgccctctcaacatttcaacattcccaaagaaaactagtacgatccagtccccttaaacactgccaccacagtcttcaacagaatcacgatgtcccccgtaatagaccagtcctgaatatacgacacatccgcatactccgactgttcctgagtcaaatcgctgcgtccggaaatctgccacggtccagtaataccaggcttaaccagcagtctcgtggaatacagcatgtcatatcgcgcgacttcttcaggcagcggcgggcgaggcccaaccaagctcatatcgcccttgaacacgttaaagaactgcgggaactcatccagcgatgttttacgaataaagtgaccgatcttagtcacgcgtggatcgtccttgagcttgaagataaaacgatcctcaatgccgcgttccttagccagtttcgccttgatctcgtcggcatcagtgcgcatggaacggaacttgtacatggtaaacggcttgccgtaaatgccgatgcgcgtctgcgaatagaacacagggccgccgtcttcccgcttgaccttgtatgccacccatagcatgatgggcgagctcaagataatggcgataccggaaagcacgatatcgcacacacgcttgaggatgcgggtaacggttgagtactgcgtcagtcgtgcagtgactactggcatcgtcggatcgttgcggaaatgcaggtcagcgccgctcaaatcagccacagaggtagtgagggccaattcaatgcccatggattccacggccagggacaatgtacgcatggtctcagaatcacgggtaagtacatcagcgaccaatacggtacgtgccttcatacgcttcgcggtttgcggcaaatgcgagttgagtggcaacaccttcagtcgtgcctcagcatcgttggcaggagtgaagggcaccgacaccaaatgctgcgccgaatccgggtcatcctcgttcttgactgaagccactgggcacaccgcaattggcgcgtagccgaggccacggcactggcgcaattgttcgaccgtccggtggataccttccggagacccaataaccacagttgggtagttgaattcgccattcatgcggttgcggtgcagcgcgcggcgcataatccaacgctcgataataaccaataccagtgaaaccagcggaatgaacacattcaacgaccggggaagattgaggtggaacaggtaccccaacgtgcacagcataatgaaatcgatgaacgcagcgttcaacagcttggcgtacagggcatagccctcacccatggtgtgccgttcataggagcgtgcggaatacagactgatgagccacgatacgcaggtcaacagcaggaagctaaaaacgccgtattcgccgggaccaatgctctgcacataggtataagcgaaaggtcggagcaggaacacgatgtacgtggccacaatggtcatcagcagatcaagcacgaccaaggtcgtgttatagagatatcgccacttcggcacagaatggcccatcaatggacgtatgttcgtggtgtcgttatgtgtggagctgccgtccggtgtagaggagaagtaggtgccgtcaaagaatgtcggcgcaatgtcacattcggcaacgggggagaacgaagccgaggaccggctcccgctcacccgtactttgggcattgccatggtcgcggtgcttgttgcctgcgactctgctgctgtgcctctgtccttcggcatgatactgaattcttcctccatcgttccccaaaaaccgcaaggaacattcattcctttctcttactctcgcccaccctagcacgaatgccgccccccccc

SEQ ID NO: 950 - DNA, 2200 bp, Unknown
  gut microbiota DNA sequence
ggtgtatcggactagaatggtgcgctagtggtttgtacgcaggcccgcaaggtagcgttgtaagtatgaagaaggactgagcccatgcacattatgttcgtctgcaccggcaatatttgtcgttctcctatgggtgagctattgctcactcgctacctctctggcaccacggtgcaggtttccagcgcgggtacgcatggtttgcccatgcaccagattgaccccaacagcgccctgctcatggagagcgtgggcatcgaaccgagtgggttccgttctcgacgcctgacacagccgatggccaagtcagctgatctgatcctgtgctttgaaaaggatcagcgtaaagacattgtcacgttggctcccactgctgtgaaatacacgttcctattgggtgacttcgcaaacatgtgcgagtactgcgcgcgcaacgggctggtcaagggcttgaccattcaggaacgcttgcagtcagtgatcaactccgcgtccattattcggcccatgctccctgagcctgaggatattgaagatccgcacggcaaggaatacgcaaagttccgtaccgcagcagagcagacgaacaaagcgctgcgcaccatcctgaccagcatgcgcaagcactaccgcgttgaggaagctccggtgcgccctcaaatcacgcggcagtatgcttacacggtctgacatcaagctgacgtaagacgtaagtattcacgtcattctcacgccggtttcatctcccgatacgatttgtccgttacagtggcatgctgttgggtgatgacagtgggagtaatgagtgactgattctaatattgccggcatcgccgaggcggatttcgggaaagccggcgtctcgtttgataatgatcgaccgatattggtcgattcctcagattttttgttctatgcggcgctcgccatgctgccgattgacggcacagtagcaggcccatacatgccgttttggacgccgctttctccgtggttgtttatggcatatgcggtagcgaactggcgtttgctgccgcaggtttggcaccgtttccgcgcattcttcctgtttccggtgctgttaatcgcgctgtctgcagtggattggtgtctggtagcattccatcggcttccggcgctggtgtcgctggccggcgtggctggggctctcgcctgcctgtgtgcgttggacatggcattacgtatcaagcgcttgtcttggcggcgcatgttggatctgctgattctcgtatattggttcgccttcgcagtcggcgtggtgcagcggttgtcaatcatgtttgattggacttccgtaaagaacttcttcattcatctgatgagccgccagtacatcagcagcacttcgcattggggcggtggccgcccgcagtttctgttcgcagaaccgagctatataggtatgcacctgttcggtgtgctgctgccgctgatctggctggtgcgtggtcgtgaccacaagcgtgcaaaccaactgcgcgtccttatcatggtattcgctgcaggctcggtgctcatgggtgcaggcgtgcgcatcattcttgactcgattatcgcgttggtgtttgtgattatcgagatgaacagttggcacacgtggcgcggccggcttgtggcgttcggggaactggtggtcacggtcggtctcggcgcatgcagcgtggcagtgaaccatcggttgagctccatagccgagcttggctttgacggtgacggttcgttctatgcccgtttatggcagtcactgggaccaggtgcgggtgcattgaagcatccaaagcagttgttgctcggctatggcgcaggcaatctatccgatgccacccatcagggtgccgatgccgcagtgcggtctctggaacgtctgggcctgaacgcttcggcaccgaagggctggtacgcacaagtgacaccagcaaacatgttcacgatgagtgcctacaccagctttttcgtggagttcggcctgattgcctcagtaattctggtggtactagtgctgtggtggattagccataaccatgcttggaacaagaccactgtctgctggctgctgttgaccatatacctgtatgtgcagttcgaaggatatgccttttatgcccttccactactcctatgggcagtggctgccgtgccaaggcttaaatcaaaatgagaattctgatgactcatatat

SEQ ID NO: 951 - DNA, 4843 bp, Unknown
  gut microbiota DNA sequence
ccgacagtgctggaatacgcctcgttgagttccttatcgctcaggtcggagctgttgatgctcaccgcatagttggcgtttccgaacatggcggtcagctgccgtgtcagggagtcattcatggcattgccgaacaggaaggtgctggcgatgaacgccgtgccgatcatgatggcgatgcctgcgggtatgagcatgcgcttggtttttcgcatgagtttcaaagtgatggaccacatggtggattctgttcccttcttcgaatgcttctacagtgcgtttagtgggaatgtctcgcggaagccgcattcattgtggcggcttcgcgttccttcatcaacagttcactcatctggtctgctgtcggcttgttcacgtccgccacgatctggccgtcggcgaacacgagcgcacggtcggcgtaagacgcggcgaccgcatcatgcgtgaccatgacgatggtctgtccgagttcgttgaccgaacgcttcaggaagccgagcacttcggcgctggagacggagtcgaggttgccggtcggctcgtcggcgaacaccagcttcggcttggtaatcagcgcgcgggcgatggccacgcgctgctgctggccaccggacagctcgttcggacgatggttgagccgttgcttgagtcccaaggtttctacgagcagatcgaaccaggcacggtcgggcttatcaccggccaaagtcagcggcatgaggatgttctgctctgcggtgaacatgggcaacaggttgaagctttggaagatgaagccgatcttgtggcgacgtagcaaggtgagctgcttgtcgtccatgcgggtcaggtcggcgccgccgaacaagatatggccggaagtggcggagtcgagaccggcgagcgtgtgcatcagcgtggatttgccggaaccggatgggcccatgatggcggtgaatttgccgcgttcgaaactcacgttcacgccgcgcagggcgtgaaccatattgctgccggtgccgtagttcttgaccaagtcgacggcctgaatagcgatgccgcgcgatgcggacgggttctgcacgttcataatgcctctccatatttggccgggccttatgcccggatgatgattccaacttatgaagaaataacggcgcgccccatcgtgcgccagactgaattgggcggtcggccacgcgccggccctcatccttgaggattatgtcgtctcaggtctcacactattcatgcctctgcgcaaacagcgtgaggcatacagacgcaagaaagcccgcactgcatgacatcagtgcgagctttctattccttgggtcaagcgatcaggcggaaggcaccccatgcggctcgatgattcgtgatgcaccccattagcatcgcgccccttctcatcgggccgtcaaccttcctgtcgacctcacttggccaagccggaagcgcgaagggcttcgaagccgcccttcaggtcatcgaggatgtcctcgatgttctcggtgccgatggacaggcggatggtgccttggtggatgccctgatcctcgagctcctccactgtctcctgggagtgcgtggtggaggccgggtgaatcacgaggctcttggcgtcggccacgttggccaacaggctgaacaggtgcaggttgtcgatgaacacgcgtgccgcgtccttgccgcccttgatgtcgaaggtgaagatggagccgccgccattcgggaagtacttcttgtacagctcgttgtccttgcggccttcgatggacgggtgggagatggactcgacttccggaacggtcttcaggtaatcgatgaccttcagcgcgttctggacgtggcgttcgacgcgcagggacagggtttcggtgccctgcagcagcaggaaggccgcgaacggggacagggtggcgccggtgtcgcgcagcaggatggcgcgcacgcgggtcacgaaggcggcgccgccgagggcctcatagaagttcaggccatggtaggacggatccggctcggtcagggtcgggaacttgcccggcacttcggcccagttgaacttgccgccttccacgatcacgccgccgagggtggtgccgtggccgccgatgaacttggtggcggattccacaacgacgtcggcgccgtgctccagcgggcggaacaggtacggggaggcgaaggtgttgtccacgatcaccggcaggtggtgcttgtgggcgatggcggtgatggcctcgaagtcgggcaggtcggcgttcgggttgccgaaggtctcgaagtagacgagcttggtgttctcctggatggcgtcctcgaactcctgcgggttctcggcggagacgaaggtggtggtgatgccgtcgcgcggcagggtgtggcgcagcaggttgaaggtgccgccgtacacgttcttggctgcgacgatgtggtcgccggactgggtgatgttgcgcaccgcgtattccacggcggccgcgccggacgcgacggccaggcccgcggtgccgccttcgagggccgcgatgcggtcttcgaacacgccctgggtggagttggtcagacggccgtagatgttgcccgggtccgccagtccgaagcgggcctcggcgtggtcgaagttgtggaagacgtaggaggtggtctggtagatcggcaccgcgcgggagtcggtggccgggtcggcctgctcctggccgacgtgcagctgcagggtttcaaaacggtacttcttgttgttctcggccatggtattctccttggttgtgctaggtcgcgaggatttttccttgccacccgcctgccgtgttcgggcggttggcgaggtgttggttatgaagttacgacgcttgggccgcgcggcgcaagctgaacgttatcggacttgcctataagggtttataaagccttggaatcattgacgtgagcgactgtcagaagtcacgaaaaagtcgttgaaattatcgcgacacgccgggccgcacgcatgcgctttcaaggtcgactgcggtcacggtgatatcgctgccatgcctttcgcgcatggctcaagtgtccgtgatgattgcttgttccacccgtcaccaagacggtttgcccgctcggtgatgacgtctgtttcatttttctgccgcccggttacatggtttacatgacgaacgactacagtcaaacatcgccaatgaattattccgccaacatggtgaagggattcgaacagacatgaccgatgtaactctgtatgaccgtgatccgaactatattccgcgcgtggccgccgtgcacgacatgtgcggctacggcaagtgctcgctgaccgccgcgattccgattctctcggccgccggctgcgatgtgtgcccggtgccgaccgccctgttctcggcgcacacacgctatgcagtgttcacgttccatgacaccacggatattctctccggttacttggatgcctggcagaaggaagacgtggagctggatggcgtgtattcaggcttcctcggctcccccgatcaggtggcgatcattcagcgtctctaccgcgaatatccgaacgcgctgcgtctggttgacccggtgatgggagacgccggcgaaatgtaccccacgtacacaccggagctgtgcgaggcaatgggcgcgctggccgatggtgccgacgtgttgatgccgaacctcaccgaagcgagcattctcaccaagcgtgactatcctggccaggatattgatgaggccacggttaacgagctgcttggtgctctgctggagttgggtgccaagaacgtggtgctgaagggcattgaccatggcgatggcaaaatcgtcaactatgtggccagcgcttccaccggtgttgccggcaagatcgagctggctcatgagaagttgccatacatgattcatggcacgggtgacgccttcgcctctgccctgtgcggcgcggtgatggccggccgcggcctggccgagtcggccgaaatcgccggtgagttcgtgcgtcacgccatggtcagcacccgtaaccagccgcatttcgaggatcgtggcgtcagtttcgaactgaaccttggcgaactcaccgatttggtgaagtgaccgcaccttggctcccctctccgctcactgggtctgacgtattcagcgaacaatccgatgggttgttttttcgtcacagggaagtcgactggtgagccttggtaaaccttctgaactaatggtggataaccgagttttcatccacacgttatccacaacacgccaaaccgcgtcatagtatccacatttgccggttgcgcttgtgctcttacataagtaacccgcacagtggaatcatgaacgctttaccacctactcagccgacgacgaagtccggcatcgacgccggtcttgcctttcaccagcccatgctggcttcacctgatccgcaggcaatgctgccttcggaacggattgcggccacgatgggcgaccgcaatctgacgcccaaacagttcggcgcgctcggcgagcagtatgccgccgcgtggctggaggaacacggttggacgaccttgagccgcaattggcatacccgttacggcgaattggacatcgtgatgctcaatcccgagtacacggtggtgttcgtcgaagtgaaatcacgccggtccatgcattacggatatccgcaagaggccattacgccggcgaaacagcacaatctcaggaaagccgcctgcgattggctacttgaccggcgtaatcgggtgccgcattcggcggtccgtttcgatgtcgtcaccatcgtgcttcgggtgggcaggccgctcgtgcatcacattgaaaatgccttctgaagccccccccccaaaaaaaa

SEQ ID NO: 952 - DNA, 36783 bp, Unknown
  gut microbiota DNA sequence
aggccttcatcgtccaagtgcaggctttcatcagccctggcttgccatacttcagcatcatcggattgccggatgcatcgttgtccgaagcccgcgagcgcgtgaaatcagcgtgtcaagccactggattcggttggccgcaaacccgtgtgaccgtgaacatgagccctgcggccatgcccaaacgcggttcgtcgcatgatctggccatcgcggccagcgtcctatgtgcggcgggtgccatagggcatgattgcctagaagataccattgtgctcggcgaagtgaatcttgacggctcggtgctgccgattcatgggctgctcccgatcatgctgcatgccgaggaacgtggcgtgcgcaaaatgattgttccccatcgcaatcttgacgaggcttcgatggtggatggactggatgtagtgggcgtgaggcatgtgggtgagctcatcgaactgatgggcggcgatgccacctatacgattcccgatacaccggttaccgacgagaccaccacggatcaatcgcccacaagtcatcccaacgattgtggcgatatgaacgaggttctgggtcaggagcatgccaaatgggcactgcaagtggcggcggcaggcgggcataatctcatcatgaccggcccgccaggcagcggcaaaaccatgttggcctcacgtatgcccggcatcatgtgcccgttgaacgaggcggaacagctggaggtggcatcgattcgatcgctgtgcggcatactgcctcagtacggcatcaccgacatgccgccgttcgaggcaccgcaccacaccgccagcacggcggccttggtgggtggtggcagcggcatcgccgttcccggcgcaatcacacgcgcgcatcgaggcattctgtttctggacgaggcaccggaattcagcgcacgcgccctgcagacgttgcgcgaaccattggaatccgggtatgtggcgctttcccgttcaaaaggcagcacctactacccggcctcattccaactcatcatggcggccaacccctgtccgtgcggatactattacggcaccggcgaacgttgcgcttgccgggaaaaagaccgtatacgttatttctcgcgattgtccggaccgatactggatcgtgtggatattcagatggcggtgccaccagtctcgcgcattgccgcgcaaagcgagccaatcggcgagtccagtgccgggatacaagctcgtgtgattcgtgcccgtcaagtggccaaagaccggttcagacagtatggatgggtgtgcaacgcgcaagcttcgggcaaatggctgcacgccaatacatcgctgaaagcgatggaattggtcaatcgggccctgtccaatcatcaactcacattgcgcggggctgatcgcgccatgcgtctgtcttggacgctcgccgatctggccggccgcgtatcccccactgaacaggacgtccatcagggcatcgaaatgagaacgaggatgacatgagtaacgctactgatatccggcaatctggcggcaccgcaggaagtgtggatcacaccgatacgagtctcgccgtttcgcgcactattcccgtacctcccacggatacgttgtatcgtgccgcgctcacgttctgtcttgatggcgcggatgtgatgatgtacgccacgctcaaaggcgcggaaaacgccgaatccctctggcatgcgttggcgcaatcccatccaagccagccatctgaaatctgcggcccggcgctgtcacgtattgaccgcatgttcgtggacggcctcactcgatggggccgcaaggcgtcggcgaacgcgatgcgctccttccgcaatgcactggcctgctggcataaccgcatgatggacctgccctcgcaagacatcatccaactggccgactggttcactatggatggcacgcaatggattatcggccctggccatccatgttggccctcgcagttggccgacctgtccattcgctccgattgggcgccaccgctgtgtttgtggatcaaaggcgatccacgcgcattgaccagttgcgccaaaccggtcggcatcgtcggttcacgggacgtgaccgaatatggccggtatgtggcacacaccgtagccgaacaggcagccgttgccgggcatctggtcgtgtccggaggcgcgatgggcacggatgcggcggcacattggggagcgttgaatgcgctgcacggcagaatgcccgccaatgtgggcaaaaccgttgccgtattcgccggcgggctcaaccatatcggaccgatgcgtaaccgcacgctgttcgaacgcatcgaggcgcagggtggtgcactgatcagtgaactgtgccccgggacgattcccgaagcccgtcgttttctgcttcgcaaccgcattatcgcggccatgtcttccacattgattgtgacgcaagcccggttgcgttccggagcgctcaacaccgcgggatgggcatgcgaattgctgcgcgaagtgtatgcggttcccggtgacatcaatcagccttgcaacgccgggtgcaataagatgatcggcgaccaccgagcgatgattctgtgtgccgccacatccaccgaggatatatgccatgaacggcataagcccgttatggcagcatgcccaggcatatcgaaatccacaggtcaggactcgtccgaaaacgaggaggccatggaagtgccggcaacgactccgttatcgccagcatcctcggaatcatcggcgtcacaggagtcgtcacaagattcaggtcattcgaaacgttcgaagaccaagcatactcagcctacgcgcactcaatccaaggatgggccggcgagcgcaactgccgattccggtaacgacaaaagcaagggtgaagagcttccctcgtcgcatcagatgccggatcttcgtgtcaagccgaagcccgatcccgagaaggaagcccaacaacgtatcattatcgccaagctgccggaaatggaacgcacattagtggcattgattcgtgaatgccgtaaacgacatctcatcgtcaccccggacgcactattgcgtgtggcgcgagagacggtacccgacgagattcccaatatcggcaccatacttgagctactcggcgcattggagctgaagggagtgatcgagcgggatgccggcatactcaagctgagcagccgtgtcggctaatcggcttccatgacacggctcgaaggctgttcggcgggtgtgcgagaatcgaacccatgagtccgaaacgtttggaagatatgtatgatgcggtgatcgtcggcgccggagcggccggcctgtcggcggcgttgggactgctgcgctcccccgagatcaccgagctcaaggaacaaggcgtggacccgaagatcctcgtggtctccaaactgcagccgctgcgttcgcacaccggttcagccgagggcggcatcgccgcgagcctgggcaatgtggagtccgatgactggcactggcattactacgacaccatcaagggcggcgactggctggtggaccaggatgcggccaaactgctcgccgaatacgcgccgcagaccgtgatcaacctggagcgtcagggcgtggccttctcccgtaccgaggacgggcatatcgcccagcgccggttcggcggccacacgcgcgagttcggcggcgccccggtcaagcgcgccgcctatgcggccgaccgcatcggccaccagattctgcacgccttgtggcagcagtgcgtggccgccggcgtcgagttcgccgaggaatggtatgtgaccgacctggtgctcgccgacgacggcaagcaggcggccggcatcgtggcctttgacacgcattcgggcaagattcaggccatccacgcgcgcaacgtgctgcttgccaccggtggcgcgggccgactgttccacaccacgtcaaattcctgggatctgaccggcgacggcatggccttgaccttggccgccggtctgcagctggaggacatcgaatttgtgcagttccaccccaccgggctcgcgcacaccggcatcctgctgtccgaggcggcccgcgccgagggcggcattctgaggaacgccgacggtgagccgtttatggaacgctacgctccggagcataaggatctggccgcacgagacgtggtctcccgctccatcatggcggagatcgacgccggtcgcggcgtcgccgacccgaaggacccggatggtccgaaggactgcgtctggctggatatgaccggcatcgaccccgaacgtatgaaggaagtgctgccgcaggtggtcgaaaccatcgagcagtacgcgaacctcgatccggccaaggacctagtacccatcaagcccactgcacactacacgatgggcggcatccccatcaccaccgacggcgaggtgtaccgttgggccgacggtgccgtgcaggtagtcgatggactgttcgccgctggcgaatgctcttgtgtctccgtacatggtgcgaatcgtctgggcggcaattctctgctcgacgcctgcctgttcggcacacgcgctggtcagacgatggccgcacgcatcgccgagaacccggttgactcccccatggccgatgattcggccgatgacatgctgaccgatgccgccgatcaggctgccgattctcgcaaagcggagcttgacgaactgctcgccgggccaatagatgattcagacgatggagtgcccaccgccaatccttatcagctcatggcccaactcggatcagtgatggagcaggctctggccgtacgttgcaccgctcagaccatcgatacggcgttgacccagatcaacggtgacatcacaccggttgccgataccttgcgggcccatgacaagaccgccgctttcaatcaggaggtcaccgccatctgggaagtccgtcatctgatcgaactggccgaggtcatgctgcacgcttccgaatcccgtcaggaatctcgcggatccatgcaacgccttgatttccccgaacgcgacgatgagcatttccttgctcactcgatggtcgccgatgatggttcggtaagtttcaagccggtgcacatcaccgactatccgcccaagaagcgcgagtactgatccgctggtggtaatacccaagccgcctagggcttgtggcacaataggttggctaatattggacttgacatcccactgtttcatggaggcagaacatggctgaggcgagcaacacgacggttaccctgcaagtgcatcgtttcacgccgcgacccgagcgtgccgaacgtgcacgcggtggcagcccgtttgccaagaaaggctccccgttcggcggcggctcggattcggcggcgcgccgtcgtccgcgcggcaagcagtgggtgcaggagtacacgattcccgcgcgcccttcggatactgtgttggattgtctgctgaccatcaaacgcaccgtcgacccgacgctggccttccgttattcgtgcggtcatggcatgtgcggttcggacgccgtggccatcaacggcacccccaccctgctgtgcacagccaccatccgcgattgggccaagcaacccggcgccatgcccgaagtcgatgacgaagggttccgacacaccggcaccgaggctgaggaatccgacgattccgcggaaaacgtcgcaaacgcggcggccgcccagaactcagccgcaaacggttcgctgggagtcatcgaactggcgtccctgcccggcttcccgccgcagcgcgacctcatcgccgacatcgaccctatgctcaaccagatcaggaagctcaccccgtatcttcaggcggacggcgtgctcgccaccactgccgaaggcaaggtggacgtgttcgaatacctgcagaaccccgaacaactcgccaaatacgagctgctgagcaactgcatcgcctgcggcgtgtgcgaaggcgcctgcccggtgtacgccggcggcgacgccttcatcggcccggccgcgctgatttgggcctcccgtttcgtcaacgattcgcgcgacaccaaggccatggagcgtatggatgccatcgacaccgccgacggcgtggccgcttgccagtccgtgcgcgcctgctcccgccactgcccgcgcggcatcgatgtgggcgaggagatgtggcagatcgtggctaaggtccgcgagcgctaagccgcgccgcggctggctgcggcgatcgcctaagcacatgcgtcgatacatccgctgggtgcccgcacgagagaagacatgaaagaacgaattatggacagaacgcagtacaccaacctcgccaaggcatgggaattcaccgaggaacacgcgcgcgaacgtgaatccgatgcgttgaccgacacccgtacggccgccgacgagtccggccagttgcagggttcggcggcgcaggcccgtctgctgggcatgctggtgcgcatcaccggcgccgcttcggtgattgccgtgggcaccggctcgctggtggagaccttgcagctcgcccatgcactggataacaagggcctgctgactgcggtcgattccaccgcccagggcatcgcgctgattcgcaaggcgttcgccgagctgcaggacgagaccgacaccacgttgcgtgcggtgaacgccccggccagcgtgtttctgccgcgcctcaacgccaatgattacgatctgatcgtggtggcgggcgacgccgagaactatgccgccacgttcgcccaggcctcccgtctgctgcgcgtgcacggcgtgatcgtgttcaccgatgtgctggcgttggaggacggtcagggcggcgtgatcaatccggccgaccgcagcgacaaggccatcgccatgcgtgagctgctcaccaccgtcgaagatgacgaaggtttcgagtccacgctcacccctgacggcaccggcctgctcatcgcctacaaaaagtaactctgtccttggctcccctcggagaggggagccactctatctcgcttacctcacaattgcgctgacggccacgtccacggcttcgtcggcgtcatcggttacggtgaccagtttcgggtcgatcgtcgagatcatgccatgctcggccaccggaccgttgagccagtcaaagagcccctgccagtattccttgccgtagagcaccaccggaatattcgccaccttgtgggtctggaccaaggtcagcagctcgaacatctcatccagtgtgccgaagccgcccgggcatacgatcacgccggaggaatacttgatgaacatggttttccgcacaaagaagtaccggaagctcatgccgaggttcacccactggttcaacccctgctcgtgcggcaattcgatgccaagtcccaccgatttgccgccggccagtgccgctcccctattcgcggcttccatgatgccgggaccaccgccggtgatgacggcgatgttgcgcttggctatctggctacccatgcgccgtgctgccttgtagatcgattcggtgcgctgggtgcgtgcggagccgaaaatagagaccgcaggtccgagctcggcgagcgccccgaaaccgtccacgaattccgattggatgcgcagcacacgccatgggtccatgtgcagccagtcggtgtcctgatcggatttcagcaggttggcggtggtgttgtccgagggaatcatctggccgcgtagaatcaccgggccgcgatgataggtgtcgcccagcggcgaggcgtcctccagatcgaccgggttcaccggtgtggccacagcctcagttgccgtctcagcctccaacgccgccgcatcattcgcggctgtggcttccaatggttccatatcgtccacgactgcggacttggatgcggcctcggctagattctttgcttcagcggcctttttgccgtcgttcttcttggatttcttctgcttctttgccatccaatgtcctcctgtacggcgctatcgactcttcgcattctagcgcctgaagctctgcgtacgttttccgcgaaatcatccttgacttcgtgaagaacgtacggtgagtgacactgagcgtacgttttccgcgaaataaggcctcatctcgtgaagaacgtacactgagcgcgtctcagcgtacggttttcacgaaacaaggccaacaatggagtagggaccgtctaagccatcagtggcggaagtcgatttccacactggcggtgccgtcggcgagggtgccggggtgttccgtgggcgtggtgggctctgtggtgtggcttggctgcccgatgccatcaccatcaatcgattcgtcatcctccgcatcagccgctgctgcggctgcggtcttctcgaatcgcttggactgacggctcagcagcacaccggaaatcgcggcggcgatcagggaggccaccagcacgccgaagcgcgcctcagcggaaagttccgcgttcttgtacgccagcgaagcgatgaggaaggacacagtgaagccaatgccgcaggcgacggcagcgggaatcatgtcgcgcacacgcagccccttggccatcttgagcccgcccacatgcgtggacagccatgcggtggtgatgatacccagaggtttgccgaccaccaaagccacaatcagtgcgatgaccagcggcgaggccaacaatagcgggctcatcgactcgaagtgtacgccggtggcgaacaaggcgaagatgggcagggccagcagtgcggagaatggctggagcttgttggcatagcgttcggcacgcggcgagagttcgccgtgcatttcacgagagggggtcagcaggccaaccagcacgccggccagtgtggggtgcacgcctgcctcgaacatcatgatccaagcgaggataccgacgatgccaaccgcgatccacggcacttttttcagtcgtacgaggtatgcccagatggcggcgcatacggcgatgccgatgaaccaataccaggcgttaatcgaggagaagaatacggcgatcagaataatggccagcaggtcgtcgacggtggcaagcgtcatcaggaacgcgcggatcgaaccgggcagggccttggcgaacagggcgagcacggccagcgagaacgcgatatccgtggcggtgggcactgcccagccgtgcgacatctccgagaacgggatgctgctgccggtggtggtcagaatcagcgtgccgggttcaccaggcccgatctgagagaacaatgccgtgacggccaggaacaggatgggcggggcgatcatgccgcccaccgcgcacagcatcggcacggcggccgctttcggattggcaagcgagccggtggtgagttcctgcttcagttcgaggcccacggtcaggaagaagatggtaagcagaccatcctgggcccagtggccaataggcaggtcgagattggtgtaggggatgaacagatgcgtttccgctacggtctcgaacgcatgcgcggtggcgggcagattcgcgagcaccaggccggtgagcgcgaagccaagcatgatgagtccggaaatacggtctgaggcggcgattcgcctgatggtggaccaaagtcccttcttcgcgccggcggtcgtggccatcgcgtctccttgctgcactctcttggatgaaccgtatgtaatagtacggaatatctcaggacgttccgctccgggctgagtcgcgaagggcaaccttagcccaaccctgtgtggccgactcaaccgactcaaacgggccaatacaattggaaaagcctcggaagcatttcgctttcgaggcttactgtgcgccagacaggattcgaacctgcgacctgctgatccgtagtcagctgctctaatccgctgggctactggcgcataccactgttgtccccgtggttcgggagtgcgccagacaggattcgaacctgcgacctgctgatccgtagtcagctgctctaatccgctgggctactggcgcatgttgtctttcagacaactcgatatataatacacgccgttcagctgaatgcaactcggcgtgttgcggcgagtcgcaccatcccgaccactaccgcaacggcgtatttactggcctcacgcctcgtgtgtacggactcggtcaagcaaaaccgactgcgcaactttgagacgtccctgcggcacatccacggcttcgcgcaggagtttgggcgtgctggaaccctctacggacgccttgtccacaatcacctgcctcacatcatccaaactcggcaactggaacatcgtgtcctgcaacgtacgttcgataatcgaacgcaaaccgcgtgcgccggtcccctgcttgatagcgatatcagcaatcgcccgaatggcctgttctgtgaattgcagatcgacgccgtcgacggcgaacagtttacggtactgcttgatcagcgcgttggctggctgggtgagaatcgccgtcagatcgtctacggtaagttccttcagcacactggtgaccggcaaacgtccgatgaactcaggcaacagtccgaactcggccagatcatcggcattgacctgttcgagcaattcctcgtctttcatgtcggcgtcgtgccaattcgcgccgaagccggtctctcgacggcctaatcgcttgcgaacaatgtccgtcagccccacgaacgcaccgccgcagatgaataggatgccgcgtgtgtccatctgcgcaacgtcctgctccttatgcttgcgcgtgccttccaacggcacggaggcgatggttccttccaagatcttcagcaacgcctgctgaacgccctcaccggacacgtcacgggtgatggaggtgttctcaccggatttgcgggcgatcttatcgatttcgtcaatgtagatgatgccgtgctgggctcggcttacgtcgccatccgcagcttggaggagacgttggagcacggtttccacatcgtcgcctacatagccggcttcggtcagggtggtggcgtcggtgatgacgaacggcacgttcattacgcgggccaacgcctgcgcaagataggttttgcccacgccggtggggccgagcaacagaatgtttgacttggcgacctcgacgtcagccaaagggtcattgctgcggcgggcagcacgcgtctgggtgggaacggattgcttggcttgtttgccggtctggccactgtgcccgttattcccgtcaagctgctcagcggactcctgaagctccatgttgacgcgcttgtaatggttgtatacggctacggataatgcgcgcttggcgttctcctgaccgatgacgtagcggttgagataatcgaagatctgagcgggcttgggcaggctcagcgaattgacctcggcatctttgacacgctcctcggagatgatgtccacgcacagggcgatgcattcatcgcagatggaggcattgggaccggccaccagttttcgtacctgatgttcggttttgccgcagaacgtgcaacggggtacgtcctcgttgtagctcaccacacgtcccatgattctcctttgccgactacgccgcaccgtcgaaccgccacgctgcgcattatcattgtcatccttgaaatacaatacccccggtcgttgccgaccgagggtattgcaatgtccggaagttttactggcggtgttccaacacctcgtccacgatgccgtattccttggcttcaggagcggtcaggaaagtgtccacttcgatgtcgcggcgaatcttctcgacgtcctggccggtgtgcttggcgagggtctcctccagccattcgcgcatacgcagcatttccttggcctgaatctcgatctccgtggccttgccgaagccttggtcgatggccggctggtggatgagcacacgggcgttcggcagcatcaggcgcttgcccttggtgccggaggccagcagaatggcggcggcggaggcggcctggccgaggcacacggtctgcacgtcgggcttgatgtactgcatggtgtcgtagatggcggtcatggccgtcatcgaaccgccgggtgagttgatgtacatcatcacgtcacggttcggatcttgggattcgaggaccagcagctgggccatcacgtcgtcggcggaggcgtcgtccacctgcacgccgaggaagatgatgcgatcctcgaacaggcgggagtaggcgtcctgggtcttcatgccatacggggtcttctccacgaactgcggcatgatgtaacggttggtcggcgcgggctgggctgcgcgggcggaggccggcatgaaaccggctacgccctgacggccggccaagcggtcggcacgggcggcgaactttgcttcttcacttgccatgagtctcactccccctgctggttgttgccgatggtgtccggcgtggtcacgagcttgtccacgaagccatagtcgagggcttcctgggcggtgaaccagtggtcgtattcgttgtcgcggtagatttcctcgagggtgtggccggtctgctcagcggtcagctcgctcatggtcttcttcatgtccatgatgagctcggcgttgatgcgcacgtcagtggcggtgccgccgatgccgccggaaggctggtgcatgagcacacgggcgtgcgaggtcaggtaacgcttgcccttggtaccggagctcagcaggaactggcccatggaagcacacatgcccaggcccacggtcgccacgtcaggctcgatgagctgcatggtgtcgtagatggccatgccggcggtgatggagccgcccggcgagttgatgtacagccagatgtccttcttcgggtcttcggcggccagcatcagcagctgagcgcagatgcggttggccatatcgtccttgacctcttcacccatccagatgatgcggtctttgagcagacggttgaaaatcgggtcgacggggccggccgggacgtcatcgcccgccatgaccggcaaggtcgcaaaggtattgctcaccttgattctccttctaattactcgaacattgttcagactaccgccttgaagcgactgaaggcggcttttcgcgtgctttttggcgggcagcgtagggatttcggtttattcgagggtgtcgaggacgtcgtcaatgaggaggcgggtctgggaggcggcatcgtcgcccagacgcgggaagcgacgggcggcattggcggggctggcaccggcggctcgcgctacgttggacttgctggcaccatgggccacggctttttccgcgagccgatcgaccagtgaatcggcgacttggcgcatctgttcggccacccataattgggccatatccgcaggtaagtcgtagtcttcggccacatcgctggctgcctcctgaatggcggcccataacaccatgaatggctttcgatagtagtcaatctgctcagtgagcggctcagcggcaagcaattcaagtgccgagcgaatttctgtattttctgacatagctttctttacctcggctcccctctctgaggggagctgtcgccataggcggctgaggggagtttcgaccggggcagctcccctcagagaggggagccagaatatatgtatttacttacgactcagcaaccactttgatatcagtgacgacgtggccacggccatgccgaccggcacaaagaaggtaatcggcgcttcagagagctccatcaccaagcacatggccataagcggtgcctgttgtgaggccgaaagcaacgaagccgcaccgatcaaggcacacgcggttaccgaatcggtcggaaacatcagtatccatacgaggccgagcatcgcacccagcgtggaacctaatgcgatgccgggctgcagcacaccgcccgacgcaccggagcgaatggtcatcagcgtcaccagcgctttggcaacaaaggtgagtgccaacacacccagcaacatccagatattggactgggacagcgggaaaccggcgttcatcacggatccagaagggccgctcccaccctgaagcatggcccagaacaatgccattccagagcccgctcccccgccagaggccgaatcggatacattaccgccgcccgtcagcaagttccatggagaggcggccgctgaagatgccgactgcatggcaccagcagtgccggcggtttcaggaatgaatgtgctgaatccaagttgcgctgcggcacggccgttgcccatcacctgcggcacaacagtcgccaccaaaccggtgatgagaccagccagcggcatctgccacagaatagccttaccggttggcttgtgcgcttccgcccattgcgaaccttttcggaacaatgcgccgcccactccacatgccgcaccgcagatcagagcgaacaccattaacgttggcgtggattccggttgcatggcggtaatgtcgtagaacaggtgatgccctttgatcgcaaccgccacgaatgcggcaatggcagacatgcccagtccaaacgcaactttttcgattgtcacatctaccaacaggatttcgacggcgaagaacatgccggccagtggcgcgtcatagacgcctcctagaccagcaccggcagccactgccaccaccatgcgccggtcgatgccgtcaacgccctcgatatggaacaggtcgcagaaacgttgcgcgagcatggcgccgagttcgcgtggggcgacttctcggccgatcgaggcaccggagccgacgatgaaaatctgcaataccacatgcgcaatggtttgccagaaaggcattcgctttcccgccacggccttcttgactgagggcaccgcagtcgttttgtgtcgcatcagataccagataatgcctgcgatgctgagtcccacggtcaccgatatcgcacggcgtgcagcgggcacgccgaatggaccaggcaattctgggccttcgatgtagccgagcagcacatgttcaacgccgtagagcaacagggtcagcagacctgctcccacaccgatgagcacgccgagcacaatggtcgccgcagcgagccaaccaaggcgtttgatagtaaccgttggctgcatgtcaacctccgcaccctatgcaacgagtatgccttgggaactcccctcagtctcgccacgctcgacagctcccctcaaagaggggagccaaagaaatagtccttttgccagaataggaagagcccggaaccatgaaacacgattccgggctcaaacaatcacgctaacgcgatgaggctatgctcactcagcatccttggcgtcatccttggcggacagttcgtcggccacggcggcagcagcggaagcggcctcgacggactcggactcttcgtcctcagcggcctcgcccaggaaggcggagaggtccacaacctcgccatcagcggtgaacttgacggcgcgcatgccggcgagcaggcccttggaacggccgacttcctgcacagcggagccaagctggccattcttgatgatggcctggatgaagttgttcggatccatgccgtactgctgggcgatggaagcgaggaagttgaacacgtcggactgggacacctgaacgtccagcttctcggccagagcgtcgagcaccatctgatcgcgcagatccttctccacggtctcctcggcctgagccttctgctccttggtggccttctccgggtccggggtcatgcccttgagctgctcttcgaccatgttggccttgacgcccttcggcaccgggatctcgaggccttcctgcagcttggcgatgaaggcatcgcgagcctcggtggcctgacgaccttcggcgtcctgagcggcagccttgcggatgtcagccttgagctcgtccagagtgtcgaactcggaggcttcggaagcgaactcatcgttcagctccggcagttcctcagccttgacggagttgaccttgaccttcacggtggccttctggccctcgtgctcgccggcttccagcatgccttcgaaggtggtctcctcgccggcggacaggccgtcaagggcctcgtccagaccgtcgagcatggtgttggagccgagctcgtagctcacgccttcctgggagtcgacggtctcaccgtcaatctcagcagtcaggtcgatgttggcgaagtcgcccttggcggccgggcggtccacgccgaccaaggtgccgaagcgctgacgcagggtctcgaggcgcttgtcgacgtcctcatccttgacttccggcttggagatggcgatctcaagaccgtcgatttccggcagttcgatgtcaggacgacgctcgacggtggcggtgaacttcagcttggtctcgtcgttggcggactgcggaacatcctgcacgtcgaactccggctgagccatcggacgaatcttcttctcatccagggccttggagtacagctccgggaccgcgtcgttcacggcctcaccggcgacggcggcgaaaccgatgcgctggtcgatgatcttgccgggaacgtggcccttacggaagccgggaacgttcacctgcttggcgatttccttacgggccgcatccagatacgggttgagctcttccggttcaacagtgacggtgagcttcaccttggtgggctcgaggttacgaacgctgatcttcacgctaatgactcctcaaaagtcgttatttcttacagttctgccgtaaggcaacctctacatgataacgccacttacggacggtgcaatgagtttcacttgccagttccttgcgccctgctcgatcaggaacgtctcgacgtccacttccaccgggtcttccacccagcacagattgcgtaggatctgtggcttgatgatcatctcggccggcgtgcgggtgtcttcggcgatgcggttgatcacacgccgtacccgttgcagacggtcataacgctccggatggcgctgttgccacagccgcatggatcggggcgcgttcaccacaccgttttcgtcctgttcgggggcgggcatggtaggccattgggtgggcttcagggccatggctcgatcgatggcctgcttccagaccttcggtttgaccgcacgctgaatcggcgcgtaccgctcgaacattttgtcctgctcggtgccggtatggatgcgcacacgctcgttcagggatcggagcgcgcggaattgggcagcattgtgcggcttgtttgtcgccgcctcgatgattgatgaatcggccaataacaggctgggcgcaatatcgtattgccgggcgagtcggtcgcgctcctcccatagggatttggcgatggccaggccccttggatcacgactcagctgggtgatgcgcgagatacgcagccaaggaatcggatgcggtttgcgcggggcaaggcccgcaaccaaagcgtgagaaaactcttcagcggcccactcgtccttgcctgcggctttcaggtcacgacgcatcatggtttcaagttcgataagcacctccacgtcgagcgcagcatagttgcgccagtcgcgcggcagcggacggtaggaccaatcggcggcggagtgctctttggctagcgtgatgccgaggtagtgttcggtgacggcggccagaccgaagcggtgcaggccgagcaatcgcgccgctatttccgtgtcgaacagggctttgggtttgagcccgatttcggcgaatccgggcaagtccatcagagaatcatgcagaatccacgtggcgtcgcccacggcgtcattgaattcattccaatcagctccggcccgggtcagggcgacgggatcaagcaaggcgatgcctgcaccctcacgtttgaactgaatcagccaatcctcgtgtccatagcggaagccggacgcccgttcggcgtcggcggccagcgagcccgtcgcctcggccagcgcatcgcagacacgatgatagccgtccaacgtcgaagtgacatcgggtacccccccgcgaggctctttcagcagtcggggttcggtgtcacggacgtcactcaactggcgtcatcctcctcaaaacggatggtggatctgatgaatgcggcccacgagcggacttgtgcgccggcgtccatagtaccgtccggcccggtcccgtcaagcggggtccatgagacgcgaatctcacacccggcgctggtggagccggccatcgagccaaaagccgtgttctgggtcacggtgactgtgccggataccgaatccggctcgatgccgtcgaaatagtcgcacatgtcatcccagtacatgccgggggtcagagaatcgttttcggcggtttccagcggcagtcgcgcgaacgccacgcaacgccagttggaatcccagtcaatgcgcagctcatgagcataaagcatcatgatccagcctatggcgattcgtgattcggcatcgctgccaagaccggcggaaaaggcatcgccgagggcacgctctcccgcttcgaattccacgccgataccataatcggccaaggtggaaggcacgggaatctcccgatagcgcacgtcatggatgcgcttcatggtgctgacggattcgacggctgcccatacttcatccggcacaccctgagggcgcacggggcgtccgtcgttggactctcccgtaggaaatgcgtagatgtcggccatatctctagggtatgggcgaacgggccgaatcgtggtatttacgcgcggttcggccctgcaatttaatacacggtgaagccgtggtccttgaactggttggccacccgttcgcgggtggcggcgttgggtcccttctggttctccagcgggtatgggatgcgcagttcgtgccacttcgggcggccaagctggtggaatcccagcacgtcgatgtgttcgacggcatcaccgaaggactcgcagaccttcgccacgttttcgacgttctcttcggagtcggtcaggcccggcacgagcacaaatcgcacccagatcttcttgccggccttggccagtcgctggccaaaatcgatggtgggctgcaaggtgccgccggtgaccttgtgataggtctcctcgtcgccggatttgacgtcgagcagacacaggtcgatgtcctcgagcatctcgtcggtgtaattcgtgttgaggaagccggacgtatcgaggcaggtgtgcacgcccatctccttggcggcatggaacacacgcgagacgaaggcgggctgcatcatggattcgccgccggagaaggtgataccgccatgcgtggccttgaacaggtccttgtaacgatcgaccttcttgatcatggcgtcaaggtagacgggcttgccgtcgcgcatcttccaagtgtccgggttctggcagtactggcagcgcagcgggcagccggacatgaacacggtcatgcgggtgcccggtccatccacggaggtgttgatgtcccaagagtggacgaagccgatatcaccggatttcagggcggaaaggcggtcacgtcggtcgagtccgattggggattcaaagccggaaaggccacccatcaaagtctgcgaggcataggtcttcgattccttgagcatatgcctggtcgtggtgcggaacgtgggtgttgcgggcatcgttgtcctcctgttccaaatgatgcgaaagtctgtgggaaataaggaaggggtggagccgtgccccaccccttcagttagtcattgccgcggttcgcgggggttggtcatcagtcgacgacggcaccctggtggaaggtacgggagatgacgtcgagctgctgctccttggtgagcttgacgaagttcaccgcgtagccggagacacgcacggtcaggtgcgggtacttctccgggtgatcgacggcatcctcgagctgttccttgcgcagcacgttgatgttggcatggtacaggccatggccgttgccggcgtccagaatgcccacaaggttgccgatgcgctcgttctcatcgcgacccagaccatcaggggtgatggtgttggtcagcgagatgccgtcaagagcgtcgttgtagtcgatcttgccgacggagaacatggacggcagcatgccgtgggagtccatgccgttctccgggttggcgcccggagcgtacggggtgcccttggcgtggccggacgggaaggaaccggtgttcttgccgtactcgacgttggaggtgatcgtcaggatggactgggtcgggacggcgccgcggtagaccgggagcctcttgacctggcccatgaccgtggagacgacccacttggcgatgtcgtcggcgcggtcgtcgtcgttgccgtagaccgggaactcgccctcggtgcggtagccgacgatcaggtcgtcgtcggcgccctcaacgtactcgtactcgtggccttccagggtcttcgcgtccttgttgtagatcgggtagaccttggcgtacttgacggcggcgagggagtcggcggcgatggacagaccggacatgccgcagccgagggtgcggtacacttccttgtcgtgcagggccatctcgatggactcgtacgcgtacttatcgtgcatgtagtggatgatgttcagggccatgacgtaggtctcggacagccattcgagggccttctcgtagttgttcttgaccttctcgtaatcgagggtgccgtcggcctccggggtaatcggctcgatcacgcccttgtcgatgacctgcatgccggtcatctcgtcgcggccgccgttgatggcgtacagcagggccttggcggagttcacgcgggcggcgaagaactgcatctgcttgcccacgcgcatcggggagacgcagcatgcgatggcagcgtcgtcgccccagtggctacgaatttccttgtcggactcgtactggatggccgaggtgtcgatggagatcttagcgcagaagcgcttgtaggcctcaggcagcttcggatcccagaagatggtgatgttcggctcggggccaggtccgaggtgctcgagggtcagggtgttgagcagacggaacgaggtcttggtgaccatcgaacggccgtcatcgccgaagccggcgtcggaccaggtcgcccagtacggatcgccggagaagatcgaatcgtagtccttggtacgcaggaagcgcacgatgcgcagcttcatgacgatgttgtcgatgagctcctgggcgtcggtctcggtgatcttgccggcctggaggtcgcgctcgatgtagcagtcgaggaaggcggagttgcggccgaaggacatggcggcgccgtcctgggacttgatggaggccaggtagcccatgtaggtccactgcacggcttcctgcgcggtctgggccgggcgggacaggtcgaggccgtactcgttgccgaggttgatgagcttcttcagagccttgatctgctcgtcgtgctcctcacggaagcggatccagtgctcgatctccggctcggtgaagtcgttgcggtacggcacggagtccttgtcgcgcttcttgaaggcgatgagcttgttcacgccgtacagggcgacgcggcggtagtcgccgatgatgcggccacggccgtaggcgtccggcagaccggtgaggatcttgttgtggcgggcgaccttgatctgcttggtgtacacgccgaagacgccgtcgttgtgggtcttgcggtacttggtgaagatcttcttgatctccggatccggttccttgccggcttccttgatggcctgctcgaccatgcgccagccaccgttcggcatcatcgcgcgcttgcagggaacgtcggtctggaggccaacgaccacgttatcgacttccggggagtcgatgtagccggccgggaaggcgtcgacgtcggccggggtatgggtgtccacgtcgtagacgcgctgcttgcgctccacggccaggtagttgtcgtcgaggtacttccacaggtgcttggtcttctcggtggcaggagccaggaatgtctcgtcgccctcgtacggggtgtagttcttctggatgaagtcgcggacgtcaatatccttctgccagttgccctcggtgaagccggcccacgccttggcgtcgagctcctcctgggagacagctgcattttccactgcggtcatgtcactccttaaatggggttgtaggtttcgcatcttcacggaacccttggttcaacagtgtagttggcacttgcttgagaaaagctgaaattgggagtgagctatctcacattgtttctgtgaacgctaccattccaatggcttctagatattgatgggactattgcacgtctccagatatgggaaaccgctcatactgtgatgttcgtatgagcggttcggtcttgagattgacagcagaaccgtatccgtcagttttcgaccgtcaatcctcggggcgagcctgtgcgggtttcacgccgtagttcttccagcgccggttctcctcctcccatctggcattgcggtccaccacgatgtcccacgcatgttcggcgtcttccttggtcttgtacggacccatgcgctgttcgatcggtgagaccatgcccaactcggcctgcttcttgacggtgttgaaataccactgcttcttgttatcgtctgtcattggtacctcctcaacggtattacttgctcccgctggcgggagcaatatatgtttattccctgaatgcgttggtgacgggcagtcggcggtcgcggccgaacgcgagggccgtgaccttcggtcccagcgggtattggcggcgcttccattcggcgcggtccaccaatcgcatcacggtgtctacggtgacctggtcgaagccgtcggctaacaggtcggcgcggccgtgcgcgtgctcgatgtatgcggcgagcaccttgtcgagcagcgcgtattcgggcagggagtcggagtccttctgcccggggcgcaactcggccgagggtgccttctcgatggaggagaccggaatcatcacgccgtccttcaacgggatgccggtgttgccgtcctcgttgcccacgatcttgagaccgccgatgccgacgcctgcggccgcggccttgttacgccaacggctgatctcccagacacgggtcttgagcaggtccttgatgggtgcgtagccgcctaccgcatcgccgtagatggtcgagtagccgcaggcgagctctgacttgttgccggtggccacggcgagcagaccgcgcgaattggagctggccatcacgatcacaccgcggatgcgggcctgcaggttctcggcggagacgccatcaaggtcaagttgctgttggtaggcgttgaacaatggctcaatgggctggacctcgtaatgggcgccaatgttggaggccaaatcggcggcgtcgtctttggaaccgtcggaggagtacatggagggcatggagatgccccagacgttctcgccgccgcatgcgtcggccgccatggcggctaccagtgcggagtcgatgcctcctgagaggcccagcgtcacgccggtgaagtggttcttggccatgtagtccttgaggccgagcacgcaggcggtgtatacctcttcgtccgggtcgagttccggaacgatctcggccttggcctgatgttcggcggcggaatcgaagtcccagaacgtcaggttttccatgaacatcgggctgcgttcgataagcgtgccgtcggcgtcgaccacgaagctgccgccgtcgaagacgaggtcgtcttgaccgccgacctgattcaggtagatgaccggggcgttaacctcggcggcacgacgctgggcgagctcgaaacgggtgttggtcttgccttcctcatacggcgagccgttgatggtgagcagcaggtcgatgttcttggtggccaggtcggccaccgggccgccgtcctgccagatgtcctcgcagatggccacgccaatggtggcgccgtccacgtcgagggtcacggagcggtcgccggcggagaagatgcggaattcgtcgaacacgccgtagttgggcaggaagtgcttgtcgtagccagcccagaccacgccttggtgcaagaccaccagtcggttgcgcggcttggaggtcttgcggtcggtgcccacggtgccgaccaccacgaacagatcgccgaggccgtcgtcgttgagctgggtggcgagttcgttggccttgtcccatgcggcttggcggaaggtgcggcgcagggccagatcctcgatggggtatccggtgagggtcatttccgggaaaacaaccacttgggcgtttcctgcggcggctttacgggagtagtcgagcaccttggcggcgttggcgtcaagcgcgccgacgcaggtgtcgatctgggcgagtgcgaagcgaagctgtgtcatagattcttagtgtagccgcgtatgacgtcggattgcctgttcttccggcttggcgtcattcattaggtcgtttttgcgttcattaggtcactgcaatgcgatatcagtcgttgcaatggcgcgattccaacaaccagtatcgccgttcaccgacctaatggacgatgaatcgacctaatgaacgaatgccactcccctcagtcagcttcgctgatagctcgtcctgcacttatggacgggcgaggcccgcgcatatctggttcggctgtcgcctcaccttcggctacagacagcccactgggctgtctgcctaacgcctcagcctccggaggcgagccagaaaaggattttacttcagctcgttgagcacgcgcagagcggtgttgacgtagaagttgacgaaggtgggaatggattcgtcgagacccacgaaatgcgggctatgccagtcggcgcaaccttcctggccgtttgacccgacgaacgcgaacaccggcaacgtcaccttggcgaattcgcagaagtcctcccccgccatcgactgacgtatcggttcgagctgcgcgtagtcgttgacatccgccgccacggccttggcgagacctggatcggagaccagcgggtcttgaaagtcatcccagaccacgtcggcgctgatgccgtatgcctcggcggtgtgttccaccacttccttgaatcggcggccgaccagattgccatccgacttgtggaaatagcgcacagtcccttggaatccggcttcggcgggcaccacgttccacacatggccgccgtgcacttcggtaacggacagcaccagcgggtggaagggcgtgacgttgcggctcacgatggtctgcaggctcagaataatactggcgagcgcttcgatgggcccggtgcccttgtacgggtaaccggcgtgggtgccttgggcgtggagggtcacgcggaatttcacgcagccggccatcatcggctcaacgccgatggccagctggccgggcgcatagttggggttgttgtgcgtgccgataatggcttcgacgtcatccacgagtccggcgtcgatcatggcgcgagcgccttggccggtctcctcactcggctggaacagaatcttgatcgagccggcgaacttgtcacggtgctcggcgagccagaaggcggcaccgagcagaccggtcatgtgcaggtcgtggccgcagccgtgcatcacgccttcattgacggagctgaactccagtccggagtcttccacgatgggcaggccgtcgatgtcagcgcgcagcccgatacgcggcccgggaccggcctcgccctgaatgagccccacaacaccagtctccagcgggttgtgcaggatctcgatgccgtgcgccttgagctggtcggtcagatagatgctggtgccgaattcacggaaactacgctccggatgggcgtgcaggtagtggcggatagtgatgagttcgtggtcgatgtcgatatgttcactcatggttcccgattctagtagcgcgaagaatatattgcggccctcgctccatattggcgagggccgcgatctatggggtcagtatgccttgttattgctggcgtttgagcagtcgtttggcgatggcgttggcgatgccctgcaccacctggaccagtacgatcatgatgatcacggccgtccaggtgacggtctggtcgaacttctggtagccgtaggcgatggcgaagttaccgagaccgccaccgccgatgtagccggccatggcagacatgtcgagcacgccaatgaacaggaaggcgtaggccaggatcagcggtgccagggcttcggggatgagcacggtgcggatgatggtgagcttgccggcacccatcgaacgcgcggcctcgattactcccgggtcgaccggcacgagattctgttcgaccagacgcgaggtggcgaaggtgcacatcaccaccatcgggaagatggcggccacggtgccgatggacgtgccgaccacgacgatggtgagcggctgcatggctgccaggaagatgatgaacggaatcgggcgcacgatgttgacgatgatgtcaaggatgcggtagacgaccgcgttctcgaacaggttgccggggcgggtgccatagagcaccacgccgaggatcaggccgaggaatccgccgatgacgagggtgacgagcaccatggtcagggtctggccaatggattcgaacagtagtggacgcagcacgttccagtcgctacgcgggttggcgaggatgatcatgcgttggctccttcatgtgcggcggcggacgcggcgggcgcggtggcagtatcggccgccagtgggtcatgggcgcggtcttcggcgtaggaggcatgtccggcgactgcgtcggcgtaggccacaggctttgcggcggtgccgaagtcgatgacgtcgctattggcggcgagctcgcgcaggaattcgtccacatgccagccgggcccgttgaattcgtaggtgatggcaccgatggcggtccccttgaccgtgtcgatgccgccgtagagcaggctggattcgacgccgtatttggcgatgagttcggagatattctgtccggatgccttgagttcatggccttgggtgccggaaacgtccttttggcggataagcacggtgacaatgcggcccgaccattcgtgatgcaatcgctcgacccggtcttcctcgggcaggccagacaatgcggtggcaatgaatcgcttggtcaccggctgctggggtgcagcgaacacatcgtatacgtcgccggattcgaccacgcgtccggcgctcattacggccacgcggccggcaatctgctggaccacgttcatctgatgggtgataagcacaatggtgatgccgaattcctcgttcacacgcttgagcaaggccagcacttcggtggtggtttccgggtcgagcgcgctggtggcttcgtcggcgagcagaatctccggattagtggccagtgcgcgggcgatgccgacgcgctgcttctggccgccggacagctgcgaagggtatttgtttgcgtgctcactgaggcccacgaattcaaggagttcgttgacacgacgatcctgatagtccttgcgccagtgatcgagttgcagtgggtaggcgatgttctgggccacggttttggtggagaacaggttgaactgctggaaaatcatgccgattttctggcggatgggccgcagcttggtctcactcagagaggtgatatcagtaccaagcacggtcacagtgccggaggtgggtcgttcgagcgcgttgataagccggaccagtgtggatttgcctgcaccggaatagccgatgatgccgaagatgtcaccgcgatcgatggtcaggctgacgtcatccacggctcgtgcgatgttcgcgccgcgtccgcgtgttttgaattccttcacgacatggtcgaaggtgatgatggggtcgctcatagtgctccctgatgctggttgttggtgtccggtcacggaagcggagcgaatcccgattgttggctcgggtactcgctccgcttggtggtaatggctatggacaggctagtcgtgcgctcgtatcagccgcggctcactgctgggccttggcatccttctcaatgtcggacaggaagccttgcagctcgctggcgctgaacttgtcggcgaacaccgcggtaccgccggagttctcctgcagggcgtcgagcacatccttctgctggtagatggaaacgagcttcttgtaggtctcgttgttcacgtccgccttgcgggccacccacacgttgatgtaggggcgagcctcttcggattcggcgtcatcctggtagatggcgtccttcgggtcgagaccggcatcggccacgtagtcgttgttgatcacaccagcggcgatggtcgggtccttcagggtggtggccacctgttcggccttgagcggggtgaccttgaccttgctcttggcttcgtcgatgtaggccggggtggagaaggcggtccagtcgcccttgagcgtcacgagaccggcggccttgagcacgccgatagcgcgggcctggttggtttcgtcgttcggaatggtgacggtgtcgccctgcttcaggtccttgatgtccttgaccttggtggagtacacgccgagcgggtagatggcggtgccgccgatgggctgcaggtccttcttgttgctcacgttgtagttggccaagtagagcaggtgctggaattcgttgaggtccagctcgccggagtcaagggccgggttttcggaggtgtagtcctggaagtcgacgatgtcgacgtagatgccggccttctcggcgtcctgcttgaacttgacccattcggggttggtagcgccgaccacgccgatcttgaccgggttgcccttgctgcccttggcggacgactcgttggcaccggcaaacgcgcggtagccgaagaacgcggccacggcgataatcgccacgaccacgatggtgatgatgacgttgcgggcggtgtggttcacacgcaccggctcgttattgttaggagcgtccggggttgccggctgggttgctgctgtcattggatttcctctctccaaaattgatgtcgggtaacaccataacgcgcttgaaccgcgaaagtgacggaaaatggccgattgccatataggtgtcttttatggcgcgcatgcaatgtccgggattcgtgcgtttgataacccgctataggcgtgccgaacacgccggaaagcacgtcgagaggggctttgacaatggaagctatgactaccgatactgccaatgccgatatccgagccgtattcttcgatatcgatggcacgctcaccagtttcacgacccatacggtgccggattccacaatcgaggcgattcaccggctgcaggccgcaggcgtcaaggtgctgatttgcacgggccgcgcgccttcacagatgcacgtggtgctggataccatgccggtgacgttcgatggcgtggtggcgttcaatgggcagtattgttttgatgacaccggcttctttgcctcgcaggccttggatactgctgatattgaggtgattctcgactggctggaccgtcaccccgatgtggtgtgcaatttcggcgagaaggattacgtgtacttcaaccagtccaatgatctgcttcgcgccacgtggagcaaactgggcaaaaccgcaccgacccggtatttcgaggacccgcgcacccgcgcgctggatcatgagactttccagatcagtccctttgtcgggcccgagctggaggccgaactggtgggactgtgcagcaatgtgcgcggggtgcgttggcatccggatttcacggatctgattccggccgatggcggcaagccgcgcggcatccagcggttcatggcgcattacggcatcacgcgcgagcagaccatggccttcggcgatggcggcaatgacacggatatgctcgcctacgccggcatcggggtcgcgatgggcaatgcgaccgccgagcccaaggccgccgccgactacatcactgacgatgtggaccacgacggtgtgcgcaatgccctgctgcatttcagggtgctacgcgattaaaacatcacaacagttcgctttgttctgccccgccgtgacagggcttatgaataagcaaagggctcgggacgaatcccgagccctttggtgttagcgaactaacaacaccgtggaggtgttatcactcgttgtcgccagcggtagcggcggtagcggtgacggcacccttcttgtcggtgttcacgccggagtacacccagtcggtgtagtccgggtggtcgtagccgttgtcgacggcgaactggaaggcctcatcacggaacttctcgagctcgtcgatcttgtcggcgtacttgtcggcgtcgatcatgcgcagagcctcagcggtcagctcgtagcggtcgatgcggttgacacgaaccatgtcgtacggggtggtggtggagccctcctcctcgtagccgtggacgttgaagttgtcgtggttcggacggtcgtagatcaggccacgcacgtcgtgagcgtaggagtggtacgcgaacagcaccggcttgtcggcggtgaagatgtcggcgaactcctcgtcggtcagagcctcgtcgttctccttggcggactgcagggagagcaggtcggcaacgttcacaaccttgaacttgacgcccagttccttcagcttgtcggaagcagccatgatctcctgagtcgggacatcgccggcggcggcaagcacgacctcggcctcatcgttgttcttggcggtggaagcccaatcccaagcggcggcacccttctcgagctcggcacgagcctcgtccagggtcagccaggtggcagcaggctgcttaccagcgatgatggcgttgatcttgttggtggacttgtagcacttctcggcgatggccagcagcatgttcgcatcggtggcgaagtagatgccgatgacgtggtcgttgtggaagcacttgttcagcaggacggaggtgacacccggatcctggtgggagaagccgttgtggtcctgacgccaaacatgggaggagaccagcaggttcatggaggcgatcggcttgcgccacggaatctcgcggacggtagcctcaagccacttggcgtgctggttcagcatggagtcgatcacgtggacgaaggactcgtaggagctccagatgccgtgacgaccggtcagcaggtaggcctcgaggaagccttccatctggtgctcggacagctgctcaacgacctggccggagacgtgcatgtgctcgtcgacctcgtcggagatgtagccggcatcccactgcttgttggtgacttcgtaggaagcctgcagacggttggaagcggtctcatccggtccgaagatgcggaagtcgcgcgggttgttcttgatgatgtcgcgagtgtaggcacccagggtacgggtggcctcgagctggccccagccgtggccgtactcagccacttccttgacctcgtagtcctcgaggttcggcagcttcaggtcgttgcggatcacaccaccgttggcgttcgggttggcaccgatacgcagctcgcccttcggcatgaaggcaaggacgtcgtccttgacagcaccgttggcgtcgaacagctcttccggcttgtaggactcgagccagttcttgagaacctcgaagtgggcctcggtgtcgcgggcggaagccagcggcacctggtgggaacgccaggagccctcggtcttcttgccgtcgatgtacttcgggcaggtccagcccttcggggtgcggaagatcagcatcgggtagaacggacggtgcacgttgtcggtctgagcggtggccttgatgtcgcagatctcgtcccagatggtctcccacagctcggcgaagcgacggtggatggacatgtggtcctcatcatcgaagccagcgacgaactcgtagggctcgtaacccatgccgtggaagaactcgtggagctcttcgtcggagatgcgggacaggatggtcgggttggcgatcttgtagccgttgaggtgcaggatcggcagcacgataccgtcggtgcgcgggttcacgagcttgttggactgccagccggtagccagcgggccggtctcagcctcgccgtcgccgacgatggccgggacaaacaggctcgggttgtccatgatggcgccgtaagcgtgggacagagcgtaacccagctcaccaccctcgtggatggagcccggggtctccggagcgaagtgggacggaatgccgcccgggtaagagaactgacggaagaacttctgcagaccagcttcgtccttggtgatcttcgggaaggtctcggtgtaggtgccgtccaggtaggactgggaggtaccggccgggccaccgtggcccgggcccatgatgatcacggtgttctggccgtggtcagcaatgaaacggttgatgtggccgatgaggaagttcaggccaggggtagtgccccagtggcccaccagacggtgcttcacatcttcgcgggtgaagggctccttcatcagcgggttggaacgcagataaatctggccgatggaaaggtagttggcaacgcgccagtacttgtcaacgccttcgagggcttcctcggaaaccggagcgttgagcttcttccaaggggtgccaataacaggactcgtcatgtgtactcctgtactcctgcacgtgatcgtgcgattgattatttctgttcggtcacggtccctgacccttgcggtgccaaggttttccgttcccaatcaatcgtcatggtacgaggacaacgcgacttttgaacgatttcttgcgggtgtgttcgaaattgttgcggatatttcagtatttgtgcggttcgactgaccgtttgtcaacattagttttttcaacatactttttcaaaacagcggaagcatgcggaaatccagcatttggctagaacagcgcacgttcgatttcccatgttcgaaatcggcgtgttgtccgtctacaggcatgtagtttgttcgatttgcgcacatagtctctgcgtgtcggccttgtcgccttgaccagtgataatcaggggtgttcagcccacgtaaaattccaatgaacgttaggggaatatcaatggcaaacggtcctgtgcttgtcgtcgacttcggcgcccagtacgcccagctcatcgcccgccgcgtgcgcgaagcaggcgtgtactccgagctggtccctcattccatgccggtcgacgagatcctggccaaggatccgaaggcgattattctgtctggcggcccggcctccgtgttcgagcccggcgcgccgaccatagacaccaaggtattcgaatccggtgttccggtgcttggtatctgctacggcttccaggtcatggcctatgagctcggcggcaaggtggataaggccgcgctcggcgaatacggcaagacctcagccaccatcgacgacgccgccggcatcctcgccgactcccccgccgagcagaccacgtggatgagccacggtgtggcggtcgaacaggccccggccggcttcgaagtgctggcccacaccgaaggcgcgcccgtggccgccatggcggacgaatcccgcaagctctatggtgtgcagtggcacccggaagtcaagcactccccgcttggccagaagcttatcgaaaacttcctgcaccgttgcgccgcgctgcccaacgactgggatgcctcctcgattatcgaggatcaagtcaagaagatccgcgagcaggtcggcgacgccgaggtgatctgcggcctgtccggcggcgttgattccgccgtggccgccgctctggtacacaaggccatcggcgaccagctcacctgcgtgttcgtggaccacggcctgctgcgcaagggcgaagtcgagcaggtcaagcacgacttcgtcgccgcgaccggcatccgcctcatcaccgtcgacgccgccgacgacttcctcgacgccctcgcaggcgtctccgagccggagcgcaagcgcaagatcatcggcgagaagttcatccgcaccttcgagaaggcccagcgccaggtcctcgaagaggccggcgcccgcggcaaggaggtcaagttcctcgtgcagggcacgctctaccccgacgtcgtcgaatccggcggcggcgacggcgcggccaacatcaagagccaccacaacgtcggcggcctgcccgaggacatcaagttccagctcatcgaaccgctgcgcactctgttcaaggatgaggtgcgcgccatcggcaccgagctcggtctgcccgacgaaatcgtctggcgtcagcccttcccgggcccgggtctgggcatccgcatcatcggcgagatcaccaaggagcgcctcgacctgctgcgcgaggccgacgccatcgcccgcgaggaactctccaaggccggtctcgaccgcgacatctggcagtgcccggtcgtgcttctggctgacgttcactctgtcggcgtccaaggcgacgagcgcacctacggctcgccgatcgtcctgcgcccggtcagctcggaagacgccatgaccgccgactggtcccgtgtcccctacgatgtgctcgccacgatctccacgcgcatcaccaacgaatgccgccagatcaaccgcgtcgtcctcgattgcacctccaagccgccggcgaccatcgaatgggagtaagccgatagggctttgacctgctcttttgagtgccgtggtgtaccgctgagtttcgtttcgtacgagagtcatggcaaaaccgccagcgacggcagtgagtaaaaacgatttcctagcctccgttccctcgttggaacggaggctttttctttgccgttttactccctttcacctgcgatttcgccatttactccccgtgtttcaagacaacaaggcacggggaggtattcgagggaatgggagtaaggatttatcccaagtgagttgacgcgcggtttttgtccccgagggcgaaacggggccgtttcggggcccgtgaaactcaaatcgaactcaacgggcattttttgctgggcgttccaatgttcccgttccgtgggataccctgattctctctgtggtactgtttgtggtgtttcctctggctggcggtatgctgacccgttcggctgtcatcaagcggaaggggcagtgtactttgaggagactttcatccatatgtttgacagtgtaactaccattggcttattgctgacgctggtgatgattttctcgttccaaggcaataccattctggaaaaacctctgcacattgttttgattgcggtaccgctgattttacagaccttcctgatttttgcgattgcgtatatcgcttgccgggttttgaagctgccctacaagattgctgcgcccgccggaatgatttgtgcttccaacttctttgaactggctgttgctgttgcaatcgccttgtttggaacgacttcccctgcggcactggcaacgactgtgggtgtgctgacagaagttcccgtgatgctgttccttgtaaaaaaacgcaaataaaacgaaagactggttcaaatatgagtaagaaaaaggtggcatttatctgcgtccataattcctgccgcagtcagattgccgaggccttgggaaagcacttggcttccgatgtgtttgaaagctattccgcaggaacggaaacaaaaccgcaaatcaatcaggatgctgtccgcattatgaaagaactgtacgggattgacatggagaaaacccagtattccaaactgatctcggatattcctgcccctgatattgcaatctccatggggtgcaatgtgggctgtcctttcattggtagagcatttgacgataactggggattagaagatccgaccggaagcgaagatcaagtctttgtcgagatcattcgagagattgaaaaacggattctacagttgaagcagtcccttatttgattgaaatagcactctgcttgtggtataatacagatgatccaaaccattgcttttctgctgataacattgggcttgataattttttgataacaggagtccgacaacgccgtataagttggataattggtatcaaattgagcaactaagagtcaaatcccctaaacagtattgtttagaaccagttttactttggcgagtgggagtaaactggagcggattttgcgcaatcgaaattccgtccgtagagtgtcgcagtgtgccgccacgtacgaaaaagcgtaaagccacctgtgatttggggtgagtaaaaactattgagaccctctggaaacaacgttttcagggggtctctttatgccttttgacctgcagtttcagtcatttttactctaaaagcgcgtacaccacggacatggcgacacgcagcggacgaagagtaaaggattttttcgaagagtgaactgtcccagtagtttgtcccaccaccccaaaaacgcccctgaaactcaagtgaaactcaataggagcgcaagggcgtcatcatgcgagcaccgcagcctgagccgccgataccaggctcgtttgcgacgccgtcgctgcttgcctggatcgtcaacggcaagtacgtcatgtcgctgccgctctaccgcatagagacagacctcaaggcgtgcggcgcgacgatatcgcgccaggacatggcgaactggatgatgaacgtgcacgcgcgctggctggcgaaggtccatgagagaatgaaggtcgagctgctgtcgcatgtcaggattcatgccgatgagaccacggttcaggtcctgaaagagccgaaccgcgaggcgaagaagaaatcgaggacgtggctgttctgctcggcgcgctgcgacgtgcccgtgtatgtattcgaataccacgagacccgcaggaagggcgttgcccaggagtttcttgcgggctggtccggcacgcttaccaccgacggctacaaaccctacttcaatctcggcaaccccaacatcgccaacacggcgtgcctcgtccacgtgcgccgctacttcgtgtttgtgttcaattagttgttgcgggttta

SEQ ID NO: 953 - DNA, 547 bp, Unknown
  gut microbiota DNA sequence
ccggcagtttcttgaactgcttcttggcgaggattcgggccacctctccgacatgctggtccagaaacggttgattttactgtgctcaatccggatacatacaacgtcgccaaggctcagggaaccgccgccttccccatcagtggaatatccaaaatagacaacagggacggctgcacgacgttcaatggcgaggtccgcgccgtggcagatggattcaagccatctgatggacagcaaatcaagatttccctagtactgcgtaacgcacagaacgcaatcatctatggagatatcgcattcgtggattggccgggcaatggccgatccacgccattctcgattaccgtctacgatctgccgaagtatgtgtcttacgatctgtatgcgcaaatctggtagttgactttacgtctggcagatggccgtcaggtgcctgtcaggccgctgttctcgtcacctgcgcactgacgttacggcgcgcctggccgaacagatagatgccgatgggcagggtcagaacaccgccgatgatgaacaccagcga

SEQ ID NO: 954 - DNA, 209 bp, Unknown
  gut microbiota DNA sequence
aacgcctggccggtgagtagaagcactacacggcggatccacgcacgctcggattccccgttggccactgctgcggcataggcggcaccgggtttgttcgcgctatggaccgctgcgcgcgcattcgcattgtcatcgccggaaacctcgggtgtttcgcgcacagttggttcagttgttgtactactagaagacatacgagtgttctc

SEQ ID NO: 955 - DNA, 454 bp, Unknown
  gut microbiota DNA sequence
tatgcctgacgatatgctgtaggttatggctgaagaactgtttactccccataacatcattgtgaccggtggctgtggtttcatcggttcgaatttcgtccattacgtgtacaacaatcatccggacgtgcatgtcacggttttggacgcgttgacgtatgcgggcaacctggagaacatcaggggcatcctgggcgaccgtgtggagttcgtgcacggcaacatctgcgacgccgagctgctcgacaagatcgttccgggccatgacgccatcgtgcactacgccgcggaatcccacaacgacaacagcatcgcgaacccggagccgtttttgaagaccaacgtggagggcacgttccgcctgctggaggcggcccgcaagtacgacgtgcgctaccaccacgtgagcacggacgaggtgtacggcgacctggctttggacgatccggccaag

SEQ ID NO: 956 - DNA, 1563 bp, Unknown
  gut microbiota DNA sequence
gcataggctacgcgttgcggcccgttgtatttgccgtcggtgttctcctgcttccatgctgcggtgttgttgccccagatatggccgccgcggttacgtcccgcatagccgccggccatgccgcggcgtgtggtcgtatccgatgccgcctgtgcgcgcaccgcgccgccgcacactgtggcatcggtcgagctgttgcgaatcgtcggcacgaagtcctgcacgagcgagagcaggttgtcgaggttgacgagcttcttgagcacgctgccgtcgccgagtacgtttgccacggctcccggctgcatggtgcccacgtagccgccggccgaaacctggccgatgatgtatacgaactcatgcgagctggagccctggatatggccgccttcgatgtctccggcgaagccgccggccatacccagtggatcgggcttgttgttggcgttcctatggtctgccgtgccggccagcacggagtatccgccgatgccgccggtcacatcggaatgttcaatcgtcgagacgacgacatccagcacactgagtacatcgctgagattgacgttctggccgagcaggctcaagccgccgcccacggccgccgccgagccgatgtccattttgccgatgtagccgccggcataccgagcggcggtgactgcatacgagctgtctttgctcagataggtgtcgtcgatggatccggtggtttccagattcttcggtgccttgacatcagtacggcgcagttgggtcacactggaatgggacacctgcacaccggaaccgtatccaatgtagccgccggcggaaccggattgcgtatcggactgatcaaatcgggtggcggaaacggtgaagccgggatcatccgggtcggaaatcttgttaccgctagttgcctccacggtggtggcatcggaatgcacacccgcgtaggagatgaacggcacatagccctgcaccacctgcaacaggttggcgagatccaccgtaccgaatttgccgagcaaactcaggccgccgttgccagccgaagcgagcgcgccggaaacgaccttgccgccgaaaccacctgcgtatgcgccgccggtcacatggtcaaggttgacaacggccacggggttggcttgaacgcgggactgcacgtctgccagcgttgagtcgttctcgagatcggtttcggagaactgattgaccttgccgctttggaagtttcccgcatagccgcccgcgatatcaccttcgacgtaaccgccgttgacgtacgtcacggtggtatccgtatagcttggaatcagatacggcatggcaccgagcaggtcgttcacggacagcagtccgcccttgatgaggttgtccaacacgctggaatcatcggcgttgctaagtgcgtcggcgaggccgccggtggtggagaagcccacgaaaccacccgcgatgccatcggacgtgctggtatcggctgtgaccgatttgaggttcgtcacatggctttcccgggtcttggtgctgttggcctgaccatagaaaccgcccgcagcgtaatcggtggtctcg

SEQ ID NO: 957 - DNA, 435 bp, Unknown
  gut microbiota DNA sequence
cgaatcttgcaacacaactgccatatccagcaaagcgaaattatccgacgaagcaatcgcacctcacacagccgtcaacatatcggcgcgaatcccagatcaaccatcggaacagacgcaggaaaccaacccaccaaccggtcgcgatcatcgttcgaacgccctgcaacacttgcgcattaccgcacccaatctgcatgatttgctcacatcgttgaaactgaaatccgtagaacttgccaatacatccaattcgcgagggctgaattgggtggaacgtgtttccgcgtggacgcagcaccattatgtgctcatggattccgttggcgccgtgatattggtcatgctgctgaatcgcatgtcgattacgttcttttttgatagttcacgcgatgcgcagctctctcatgcgatcgccgcatgctgcttgctggc

SEQ ID NO: 958 - DNA, 401 bp, Unknown
  gut microbiota DNA sequence
ctttccgcccttcccggccatgccttgaacacatccatagccagctcccctcgccgcgtatcgtcgtcattgatacctcctgttgatattaacccaccaatccgccggcagctcgggcaccgcgccctcgcgttcggcgaacgcgaggcacgcgagcaccgtgcgcaatcccaacgggaactcccgccgtccctgacgcatcaggaacgtccagtcctccacgcagtcctcgcaatccgaatgatccatgatcccgcgacgggccagcacggcccgctcctcgatgtcatccgtcatcatccactccttcttccgtcttgcttcgcctcggcccttgcgtccgccgcgtcgaggggagggcagtcatgttcgatccatgccgtgagcatgtcgcggatggt

SEQ ID NO: 959 - DNA, 199 bp, Unknown
  gut microbiota DNA sequence
gcaacccggcggcgatctcgtcccacagtcgcgtgccctcggccgccttgcgcggtttggggcgtttgagccggtccgcggccttctgctgggcgcggcagggctcgtaaccgccggactcgggattcctgttgcgctcgacctcgcggctgaccgtgccggggtcgcggcccagcaggcgggcgatggcgcggatcga

SEQ ID NO: 960 - DNA, 472 bp, Unknown
  gut microbiota DNA sequence
acccacttctgaatgaactcgcaaggcaggccggaacgctcgacaccgacgaccgtccggccttggccgcgaggctccgcgcggcacgcgcctacctctccccgcacgtggatggctacggcatcccgaaggacgtggtggacgactgcacgctgtcggtggctttggacttgtggcaggccaaggacgcgagaaacggcatcgtgggaatcacggacggcgtggaaccgttcagaatccccaccgacccgttgcgcaccgcttggccgaagctcagggctgcgggcttgcccgcaggattgggcatcgcatgagccgagtggccgaactcaccgaacagctcacggaacgcatcaccgaagccgggcacggcctgatcctccaagtcaccacagacccgtcactggtcaaaccatcgccgggcaaggtcagcttggtcatcatgccgccttacatcgcttgggacggctgg

SEQ ID NO: 961 - DNA, 119067 bp, Unknown
  gut microbiota DNA sequence
atctgaattgtattgaaccacgatattaaaagaaaggaaacgtgtgataattaacttcctaattatcatacaaggtaaaaatgaaaggtttgaaaaaatatatggcaggtattcttgtggcaggcatggttcttggaagtgcagcagttccggcaccggtgtatgcgacagaggcagaggatgcacaggaagataacggggatgatgtggaaattacactggacgacaagccatatctggcgctcggagcggatctgactgcagaccagcagcataccgtgttatcttatatggggatcgaagcggcggattttgataaatatgatgtggtttatgtgagcaatgcagaagaacatcagtatctggattcttatgttccgaaaaaacagatcggaacgaaagcgctttcttccgtgctgatttccctggcagattccggtaacgggctgaaggtatccacatacaacattaactactgtacggcgggcatgtacaagaacgcacttgccactgcaggggtggaagatgccaatgtgattgttgcgggaccgtttccgctttccgggacggcagcactggtcggaacgtttgaggcatatgaaaaactgaccggaaaggaactggatgaatcggttgtggatgctgcaatggatgaacttgtcacaaccggagatcttgagcagagcattgacggcgattccaatgatgtggaggcgatgattgcagatctgaaagggcagattgccagtggaaagatcaaaacgccggaggagattgaacaggcgattgaaaaacttgcggataaatatgatctgaaattatcggacgatgacaagcagaaacttcttggtctgatgaaaaaactgcagggactggacctgaactgggattccattaaaaatcaggcatctgcatgggcttcccagctgcagaatcagcttgcggacaagaatatcggacagaagatagcagccttttttgaaaagctgtttgatatgatccggagtctgtttcaaaaataaaaacataaaatttgagtaaagtgattgtaaaaaccatgagaagtgttttataataaatcgaagcatgtaaaaaaaagaagaacaagaaaaggaaacagatatgaatggcataatgattgtcctgacacttctgagtggtgttgcactatttctttatggaatgtctctgatgggagacggactcaaacgtgtggcaggaaaccaactggagcttgtattgtataagctcacaaatacaccgatcaaaggtgtacttcttggaacgatagttacagcgattattcagtcatcttccgcaacgaccgtcatggttgtcggattcgtaaattcgggaatgatgaaagtcgcacaggcgattggaattatcatgggagcaaatatcggtacgagtgttaccggatggattctttgtctttcctatattgatgggtccagcggtatcgcacagttgttgtccacggcaaccatttctgccgttgttgcgattatcggtattatttttaagatgtttgtcaaaaaggcaaactacaaaaatgtgggagatatcatgcttggttttgcaatcctcatggtaggaatgcagacgatgagcggggcagtttccccattgaaagataacccgcatttcgtcaatcttctcacaaagtttgaaaatccgtttatgggaattattgtgggaattgcgtttactgcagttttacagagtgcttccgcatccgttggtattctgcaggcattgtccgtgaccggaagtatcagttttgcggcagcacttccgattacgatgggaattggagtaggagcggcctgcccggtactgctttcttccatcggtacaaataaaaacggaaaacgtacagccctgatttatctgctgaacgatctgttcggtatgattttctggtcgattgtcttttacagtgtcaatgcttttgtacactttaagtttttgaatatgacgatgagcccgatcaagatcgccatgatgaactctattttccgtctggcaacaatcatgattttgcttccgtgcattaatctgattgagaaactggtattccgtctgatcaaagacgatccggaggatctggaagagcaggcagatttcgatctcctcgaagaacgatttctggcgtatccggcacttgccatcggacagagccatacggcggtcaacggcatggcaaagaaggcacgcaagaacattaaccgtgcactttcgctgttaggagattattcccaggataagtacaataaagtacaggaaaaagaaaacctgattgacaaatacgaggacaagcttggcacatatcttatgcagctgaccggacaggagatgtctaccgtccagatgcagcaggtgtccaaattcctgcacacgatcagcgattttgagcgtctgggagatcatgcggtcaatatttctaatgttgcaaatgaaatttcggaaaagaagattacattttccgagtcggcacagaaggaactttccgtgctggaggcagcagtcagggagattgtcgatctgacagttgatgctttctgcgaggatgatctggagatggctgcaaaaatcgagcctttgcgggaactgatcggaattttgtgcaatgatctcaaaaaccggcatgtaaccagactgcgggaaggaaaatgtgaattccggcagggatttgcgtttaatgatctgctgacgaatctggaaagaatcgcagcgcactgttccaatgttgcggtagcaatgattgagacggagacttcggaatttgatacccatgagtatttaaagagcgtccgtcacatgaaagacgatgcttatctggagtgctttgattcgtatgcacgcaaatacagtattccaccgacaaaaaaagaaaagaaaaataagtagtttttcatcccccggaaatttccgggggattttgtgtaccatttatcggacactgaatatgagatactgtcttcaaccaaaaagaacgggaaataaaagaaaggaagaagacaaaatatgaagggatatgtggtagaaaacggatatatgggatatctggacggaaagtatgttttatttgcagatgagagcgattatgaagaggtgtatgaggaacagtaaacgttacggttcatgcagtgccggaacaccgccgggaaaccatgaaacttcattgaatttctggtctgcttgtggcataatatagatgttaagtttctgtacaggaggtgtctgatatgagaaacgagatacaggttgccggacagcagaccggtataaaattacgcccgtatgaacatcatgcaaaatattacgaaacggatcagatgggcatcattcatcacagcaattatgtgaaatggatggaagaagcgagaatggatctgatggatcagatggggctgagctataaacagatggaagaaatggaaattatcagtccggttttatccattgcggtagagtatcacagtatggtacattttgatgataccgttgtgattcagacgaagctggtgaaatataacggaattaagatggaagtcgagtatgtgatgacggacaaggaaaccggagaactgcggacgacggcgagaagcagccactgctttttgaaccgttccgggaaaccgatttccctgaaacgttcttatccggaacttgatacgaaattttttgagatgaaggaggacatgcaatgataccggaaagacttgctgcgctcagacaggaaatggaaaaaagggacattgcagtttatattgtgccaaccgctgattttcatgaatcggagtatgttggagaatattttaaagcaagaagatttattaccggatttaccggttcggccggaacagcagtgattacacggactaaggccggactgtggacagacggaagatattttgtgcaggcggcaaaacagttagaaggaacaactgtgacactgtaccgtatgggagaggaacatgttcctacggttgatgaatatgtggaacagacgctgaaagagggcgggaccatcggatttgacggaagggttgtcaatggaagatggggcgcaaaactgcagcagatcgcagaaaagaaacacggaaaactttatgtacaggaggatctgatcggacagatctggaaagatcgtccgccgatgtccaaagaacctgtgtggattctggatgaagcatacagtggaagaagtacaaaagataagcttgccgcagtccgtgaaaaaatgaaggaaaaaggtgcagaggtgcatttgctggcttctttgtatgatattgcgtggcttttgaatgtacgtggaaatgacatcagttatgtaccggttgttctttcctacctggcattgacacaggaacagtgcatctggttcctgcaggaagaagttgtcgatgataccctgcgggaatatctgcagaagaatggaattaccacgcgtccgtatgaggcattttatgagtatgtaaaaacactggagaatcagacgattctgcttaatcgcgctgtggttaatacaaaaatctgtaataatctgccggagtctgcacagatgatagatgcagaagatccgacgctggagatgaaagctgtcaaaaatgagacagagatttccaatacgagaaaagcccatgtaaaagatgcagtggcaatgtgcagattcatgtactggctgaagaaaaatgtggggaaaattccaatgacggaaatttccgcatcggattatctggagagtctccgcagagaacaggaaggcctgctggatttgagctttgatacgatctgcgggtatgcggatcatggagcaatcgtacattatgcagcaacaccggaaagtgatgttccactgaaaccggagggacttcttctggtggattccggaggacattatctggaaggtacgacagatattacgagaacatttgcactcggaccggtgacagaagagatgaaagcggattttacccgtgtatgcagatccaatatgaatctggcaaatgcccgtttcctgtatggatgcagcgggatgaaccttgatattatcgcgcgtgaaccgttctgggaagccggacttgactttaaacacgggaccggacacggtgtgggatatgtgctcaatgtgcatgaaggaccgaatgcattccgctataaaggaactgaggatcgtccggggggagctgtttttgaagaaggaatggtaactacggatgaaccgggaatttatatcgaaggaaaatacggaatacgtctggaaaacgaattagtatgccaaaaaggcgaaaaaaatgaatatggtcagtttatgtattttgaaaatctgacctatgttccgtttgatctggatgctatcgatccgaaacagatgacggaggttgaaaagaaacgtctgaatgattaccatgccaatgtatacaaagttgtttccccgtatctgcagggagaggagctggcatggctgaaggaggcaacacgggcaatataaaccgtggccgggaaggaaatgtaaagtaatgagtgaaaagctggtgctgattgatggacacagcatattaaaccgtgcattttttggactgccggatctgacaaattccgaaggtctgcataccaatgccgtgtacggattcttgaatattctttttaaaatattagaggaggaacagccggattatctgacggttgcatttgatgttcatgcaccaacttttcgtcataaaatgtatgaggcatataagggaacacgaaaaccgatggatgatgccctgcggcagcaggttccgctgatgaaagaaatgcttgcggcgatgggggtctgtaccattgagatggaaggatacgaagccgatgatcttctcggtacacttgccggaatgggagagcgtgccgggatggaagtttctgtcgtatccggggaccgcgatctgctgcagcttgctacggatcatgtcaggattcgtattccaaagacgaagcgtaccggaacagagattgaagattatctggcggcagatgtcaaagaacggtatcaggtgacaccgaaggaatttatcgacgtaaaagccctgatgggggatacggcagacaatattccgggtgtgccgggaattggagaaaaaacagcgactgcgctgatcggacagtatggatgcattgaggaagttcatgcacatgcggatgtggtaaagccaccgcgtgcatccaaaaatattgtagaatactgggatcaggcagtgatgagcaaagaacttgcaaccatcatcacagatgttccggtggattatgattttgccaatgcaaagatagacggaaaggcttctctgtatacagaggaagcctatttgctgtgtaagagactcgaatttaaaaatcttttgaaccggtttaccgtggacgcaccaaaaaaccatgcggaagaaagttttcagatcgtaaaggatcagaagacggcagaccggatctggaaaaaagccgagggaaaagcggcaggcttttatgtggtggagcagggagtacaaaaccagcagctttccctgtttgataccgcagaggaacagaaatttgccgggcttgccatttcgttttcggaagaagacaattatcttatggtggcttcacaggaacttccggcagaaaaattaaaacaggatctactggaacgacaggaactgtatgcggcagatttaaagccggcgctggctgcttttgatctgcacgatgtaccggaagaaatgagaacccgtttttttgaccgtacgattgcagcatacctgctcaatccactcaagggagcgtatccatacgaggatattgcaaaagactatctgggactgatgattccgtcgagaacagatctgcttggcaaacagatgccgggggatgtcatcacggaaaaggaagcggatgtgctccggtatgcctgctgggaatcttatattacatggaaatcagccgcagttcttaaggaaggacttaaggaacatgggatggagcagctgatgcgcgaaatcgagatgcctctggtgtttgtcttatcggatatggaacaggatggaatctgtatcgatgccaatgcattaaaagagtatggtcagaaactgtcggtttccatcggggaactggaacagaaaatttatgaggaagcgggggagacgtttaacataaattctccgaaacagctcggcgtgattcttttcgaaaagatgcagcttccgaatggaaaaaagacaaagaccggtttttcgacttctgcagaagtcttggaaaaacttgccggagattatccgattgttgcagatattctggaataccggaaactttccaaactcaaatctacctatgcagatggtctgtcaaactttattgatgcaaccggaaaaatccatacaacgttccatcagacgatcacggcaaccgggcgattgagcagtacagatccgaatctgcagaatatcccgatccggatggaacttggaaagatgataagaaaagtatttcatccaatgccgggagatttgtttgtcgattccgattattcacagattgaattgcggcttttggcacatatgtccggtgatgagcagctgattgaggcgttccgcgaaaatcaggacattcatcgaagtacggcatccaaagtatttcatgtaccgtttgatgaagtgacagacttacagagaagaaatgccaaggcggtaaactttggaattgtatacggcatcagtgcctatggactgagtcaggatttaaatataggaaccaaagaagcgcagggatttatcgacagctattttgaaacatatccgaagatcaaagaatttctggacaacaccgtagcacaggcaaaggaaaagggatatacaagaactttgtttggacgcatccgtccgattccggagctgtcatcgggtaattttatgacaagacagtttggcgagcgtgtcgccatgaatgccccgattcagggaacggcggcggatattatcaaaattgccatgatccgggtacatgaccgtctgatccgggaacatttccgttcgcgtctgattttgcaggtacatgatgaactgttgattgagactgcggaggaagaaaaggaaaaggtcattgcacttttggaagaagaaatgcaaaaagcagccgatctgaaagtggaacttgccgtcggtacggcatgcggacaggactggtatgaggctcattaagaaaaatatacgaaaaggaacaaacccgggaggtgatggaatgcggtttattggaattacaggaggggtgggagcaggaaaatctgccatacttgcacatcttgcgtcaaagccgggtatcagggttatgctggcagatgagattgcacatgatctgatgcagccggggacggaatgttttcaaaagttaaaagaaaaatttgccggggaagacatttatcagccggacggatcgttggaccgtgcgcagcttgcaactgtcatcttttccgatgaccggaaaagagaagaactgaatgccattgtacatccggcggtccgggaatatgttctgcaacagaaagaggcagaggaacgggctggaaaactttttctgctggttttggaagctgcacttctgatcgaggaacattatgatgaaatctgtgatgaactctggtatatttatactacagaagaaaaccggagagctcgtctgaaggcatcaagagggtattccgatgcacatgtggaccggatttttgccagccagctgagtgaggaggaataccgcagacactgccgggtggtaatagataataacgggacattggaagaaacactgacacagacagaggaagcgctgaggagagaagcatatgaataacgtatttggtttggatataggaacccgcaatgtggtgggaacggttggacaccggacagaagatggagcctttattgtagaggcacagtatgtcagacagcatgagacacggtccatgctggatggacagattcatgatattggaaaagtggcgcgtacgatttccgctgtaaaagcagagctggaggcgcagctggatgcaccgctttcggaagtgtgtattgcagccgccggccgtgtgttaaaaaccgtcactacgcatgtggagtatgagtatgcggaggagtcggtcgtcacaggagaagatatccacacattaaatcttctgggggtagagcaggcacaggatattttgcgggaacagaatgacacaaaatataagttttactgtgtcggatattcggttgtgaaatattatttaaacgaagaagtatttatcagtattgaaggacataaagcaaataaaatcggtgaggacattatcgtaacatttttgccggaagatgttgtggacgggctgtattccgcagtcggtcaggctaaaatgacggttgccaatatgacactggagccaattgcggcgatcaatgtggcaatccctgaaaatttccggatgttaaatattgcactggtcgatgtcggagcgggaacatcggatatttccatcacaagagagggaagtatcatagcttatggtatgattccatatgcaggggatgaactgaccgagctgatcgtgcagcagtatctggttgattttcagactgcagagaaaatgaaactggcatcttcgagtgaggatgaagtgacatatgaggatattatgagtatttcccatacaattccatccaaggagatctgggagctggttgccccgacggtggagaagattacttccgaggtggctgcaaagatcaaggaactgaatggggataaaaccgtaagcgcctgctttgttgtcggtggtggcggaaagattcacggatttacggaaaaacttgccgggcatctggatctgccgacggagcgtgtggcattaagaggcgaagaagtgcttaaagaagtgacatttgagcaggaagatatcaaaaaagatccgctgcttgtcacaccgattggaatctgcctgaattattatgaacagaaaaataattttattatggtccgcttcaacggagaacgcctgaaactgtatgataataacagacttaccattgtggatgcggcaatgcaggcgggatttccgaatgaccagctgtttccgaaacgcggaatgccgatcaatttcaccgtgaatggaggcgcaagaatcgcaagaggagaggctggggaggccgccatagtgacgatgaatggccaaccggcaaatatcaacacaccgctggagccaaattccgatattacgattgagccatcaacggcaggagataatgcggtgtataccatcggacagcttccagagtatcacgagtccgtgatttcgtttgtgatcaatggacagaacgtggtatgtccgaaatttgtcgaggtaaacggaagccttgaaccggattcctatgaaattcaggagggagattccatcgagacacggaatttttataccgttgcacagattgcagaatttatggacgtggaaattgacccggacagtgaaattctggtcaataacagggaagcggggatggagaccctggtatacgaaaatttctccattgactggacaccgttaagcttcggggttgcgtcagagagtgagaatcggtataatgcaacagaggggggtacagattccgcggaaatatcgcgggaagaaatgactccggaaacctccggggagaccaaggcggctgagtcggagaaaaaagatacggtctgtgttgtcacggtaaatggcgagacggtggaacttacgggaaaagaagattacatatttgtggatgtttttgaccggatcacgtttgatctcaacgccggaaacggacgtgcaattgcaacgcttgtaaatggcacggaagctgaattttcccagccgcttaataatggagaccgggtagaaatttactggaaagagaaatagtatgttagaattatgcagtattgcaagtggcagcagtggaaactgtatctgtgtaggctcggacaaccaccatgtgttaattgatgcggggatcagcggaaagcggattgagaatggattaaacgaggtggatttaaagagtcaggatatggatgggattctggttacacatgaacatctggatcatatcgcgggacttggtgttatggcaagaagatatgggctgccgatgtatgcaacggcaggaaccattgaagccattaagaacacgccgtctgtgggaaagatcgacccggaattatttcatgaaattgttccgcaggaagattttgtaatcggagacctgacgattaccccgatccatatctcacatgatgcggcggatcctgtggcataccggataaaaaaagaaaaccgtacctttgcggtagtaaccgatctgggaaattatgatgatgagattgtgcagcagctgcagggacttgatactttgctgctggaggcaaatcatgatattcatatgctcgaaacgggcgtatacccttatccgctgaaacgcaggattatgggaaacaggggacatctgtcgaatgagcggagtggccagctgctctgtgaacttcttcatgataaattcggcacagtggtactgggccatttaagcaaggaaaataattacgaggaactggcgtatgaagcggtgcgtctggaagttacgatgggggataatccgtacaaagcggatgatttcccgatgtatgtggcaaaaagaaatgcggtttcgcctgtaattcgtgcagagtaaaaaggagagtttatattatggaaaaaacaatggacaaagcaattattacagtagtaggaaaagataccgtcggtattattgcaaaggtatgtacttatcttgctgacaatggcgtaaacgtgcttgatatttcacagacgattgtttctggattttttaatatgatgatgattgtggatatggcagatgcaaagaagcactttgcagagatttccggagaaatggatgcattgggagaaaaaataggcgtttcaattaaatgtcagcgcgaagaaatttttgaaaaaatgcatcgtatctaaaacatggaggaagcaaagaatgattaacagctgggaagtacaggaaaccaacgaaatgatcgagaaggagaatctggatgtgagaaccatcacactcgggatcagtcttcttgactgtattgattcggatctggatcgtctgaatcagaatatttacaacaagattacaaccgtggcaaaagatctggtagcgaccggagaaaagattgaaaaaagttattccattccaatcgtaaataagagaatttctgtgacaccaattgcgctggtgggcggttcggcttgtaagacaccggaggattttgctacaatcgccgcaactatggatcgtgcagcaaagacggtcggcgtcaatctgatcggcggatattccgcactggtatctaaaggcatgacgaaagcggatgaacttctgatccgttccattccacaggcactgcacagtactgaacgtgtatgcagttccgtaaacctggcatccaccaagacgggcatcaacatggatgcagtacggcttatgggcgagattattcttcagacggcagaaatttcaaaggacaacgattctgccgactgcatgaagctggtggtcttttgcaatgcaccggacgataatccgtttatggcaggagctttccatggagtgaccgaggcagatgcgatcatcaatgtcggagtcagcggaccgggtgttgtaaaaaatgcgctggaaaaagtacgcggagagaattttgaggttctctgtgagacgatcaaaaagacggcatttaaggttacccgtgtcggccagctggtggcacaggaggcatctaagatgttaaacattccgtttggtatcgtggatctttccctggcaccgactccggcaatcggagacagtgttgcggatattctctgtgagtgcggtctggagtatgcaggtgcaccgggaaccactgcagcacttgccatgctcaatgatcaggtaaagaagggcggcgtgatggcttcttcttatgtgggtggtttaagtggtgcttttattccggtcagcgaggatcaggggatgatcaacgcggtagaggcaggcgcaatttcccttgaaaaattagaggcaatgacctgtgtatgttcggtaggtctggatatgatcgccatcccgggagatacaaaggcaacaaccatttccggaatgattgcagacgagatggcaatcggaatggtgaaccagaagacaaccgctgcacgtctgattccggctgtgggaaaaggtgtgggagacagagtggaatttggaggattgtttggatatgccccggttatgccggtaaacaaatactcctgtgatgactttatcaaccgtacaggacgtattccggctccgatccattcttttaaaaattaataggtaaaaaacagaagtaaaaaatttggagcagatttatgatagcatatgaaaaattaccgctggacaatgaagtgaaggcagctttagaaagacttgagattgaatatgtgttccagccgatcttttataaagattgtgtgagaatatatgcatatgaagcgttgatgagaccgaagaagatgacggtggggcagctgattgatgaatttgccagggatgagaaactgcatatactggaagttgccactttttttggtgcaacacaggcgtatattgagcggggatatcaggaatatctctgtatcaattctttcccgtcggaaagttttacggagaatgaggcagaagcatttgatacttattttggaaaccagaaaggaaaaaggatcattgagattttagagtatccgaaagtttccctgcgcgagtgggtcagaaaaagtgagatggtccagaataagcactggaaggtatcgctggatgattttggcatgggtgaaaacaatatgaatgctgtatatctgtatacaccagatatcgtaaaactggatcgctccctgatctgtggaattgacaacgatgccagaaaacaggagaacgtccgtacatatctggaaagtttccatgaaagaggaatgcaggtgcttgcggaaggtgtggagacaagagaagagtgtgattttttacggtctttgggagtggatctgtttcagggatattatctggctatgccggcataaatacaaaaagagagcgtgcgaaagcacgttcttttttaaaaaaataaattatctgaaaaaacataataaaataaacaattatgagaaatataaaggaaaaataaaaagaaataaaaaaacaggttgacataatgtaaaatgcgtgttatatttaagacaacaaaaaacaagcagccatcacgaagggtgacgagaaagctctggacgtgaaatctaatgtaaggaggtacagtccaaagggaacataagccattggcagggagcaaccaaacacaggtcatcaggcttcacttgatgaaagaataaacattcgagaatggaaaccagtgacagagtacaaaagagagcggacaaagaggaacggataaaaggtgatttgtccagaacgtcatttcggtaaacaaaagaagaatggatatagaacaaaagatgaagtgaggagcagtccaatggagtgtggaaatcattaggcgtcatcagaagtatctgatggcgtcttttgttgtgcatgaataagaattatccacgggttttggaaataacatgaccaaagataatccagtgggacatctccgatgcgttattactgtcgatataaaacgtctgtccgtaataggtgagaggttctaagcgccagggatctgtctggcgaaggcggcggatgtaaagaagaccggtcactttgttaataaaaataccggtgtcgccatcacgtatgggattccgcgcgattaataaaatatcgtttgcatgatagacaggagacatatgatcacttgtgacaagaagtgcacaatcaatctggtttccatagcgtttgcggtatccggaaatattgattttttcgagagaacaggaatcatacaccattccatcgtgcatgtttccacttggaatgatcatagtggtatagtcctcgcgggaaaccgatggaaccgtttccagatttctggcaaaatcgaattcaaactgtacaagggattcaataaaatgtaactgtgtaggcgaaagattgcgcatgcggtcataggtctggaataaatcagaggattcgccacataattcatagaacatctttccggtaagctggctgagcttatatacggtatagacatcgacttttccggtatccccattggcaagtcttttgtacgaggaaagggacatatctagtgcttttgccatatcctgctgtgaatagccgagtttaaagcgctctctttccagatttgttccaagatttctggataattgttcgcgtgtcagcatgaaccatcacctccgaataaaatatcaaatctattataataataaacgctaaaaaggtcaaatgacatatcgcgtttccggataaggatcatttctgacccctgaccgacaaaagtcgccggaaatatcaaaaaatttagccccgaattgaaaaaataggaaagatataatcaatatgtaaataaaaagtcaaattcagtcaaaacaaaaagaaaggggaaagacgaaaggtataggataaatacataaaagggaactgatgcgtccggcatacagttctttttttgttttttatgtgaacgagtgcacaaaagcaggaaattatggtaaactgtttcataggaataatgagcggatgtatgctcatgaaaaggggtattataagtggaaaaacaacgattacattattatgaacagcttgcagaactgtatccgacgattggaaaagcatctacggaaattatcaatctgcagtctattttatatctgccaaaaggcacggaacattttttgtcggatatacatggggaatttaaagcattttcccacgtattgagaaacgggtctggagccgtccgcaaaaagattgatgacgtattcgggcatacgctaagtacggcagataagatgtctctggcaacactgatttattatccacagaaaaaaatcgagctagtgcgtcagaccgaggacgatatcgagaactggtataagatcacactgtaccggctgatcgaggtgtgtaagacagtatcttccaaatacaccagatccaaagtgcgcaaggcgctgccggaggattatgcgtatgtaatcgaggaactgattacggaaaagcaggaggttttgaataaagaggcctattacgaggcaattatcaacaccattctggaacttgggcaggcagataattttattgtggcactggcggaactggtgcagaggctggtcattgatcatctgcatattctcggggatgtgtatgaccgcggtccgtcaccggaccggattatggatcagctggaacaatatcattcgtttgatatccagtgggggaatcacgatatggtatggatgggggcagcagccgggcagcttgcctgcattgcatctgtgatccggacaagtatccggtatgggaatctggatctgattgaggatggttatggcatcaatatggttccgcttgcaacttttgccatggatgcttaccgcgatgatccgtgcagacagtttgtactgaaagattccacggatgaggaacgaagcaagaaagaaacgctgatgaaccggaaaatgcataaggcaattgccatcataaagtttaaactggaaggacagctgatccacaaatggccggagtatggtatggaaaaccgctgtctgctgcaccgtattaattacgagaacaaaacagtggaaattgatggaaaaacctatgacatgctggataccagttttcctaccattgatccggaacatccgtatgatctgacacctgaggaacaggaagtcatgaaccggctgcgcacctcgtttatacactgtgagaaactgcagcgccatgtacggcttctgctaaaacgaggcagcatgtataaagtctacaacggaaatctgctttatcatggatgtgtgccgctgaatccggatgggacatttaagaaagtaaatgtatatggcagggaatacagcggaaaagcactctatgatgtgctggaatcctatgtccgcaaggcatttttctctctggatgaaaaagagagggaaaaaggaagggatatcatgtggtatatctggacggcaccggattctcctttgtacggacggagtaagatggcaacgtttgagcggtattttcttgcggacaagtccatgcatcatgagagtaagaatgcgtattatcatttgtttgacaaagaggaaacggcagataatatacttaaagaattcgggctgacgggggattttgtgcatatcatcaatggtcatgtaccggtagagcgcattgccggcgaaaatccggtcaagtgtaacggaaaactgatcctgatcgacggtggattttcaaaaacataccggagaaaaacgggaattgcaggatatacactgacgtacaattcttatggactgacgctttctgcccatgaaccgtttgactggtcaaacgaggcggtaagagatgaactggatattgtatcgcatcaggaagcagtggaataccgggataaacgtattctggtgggtgatacagacgttggtaagcgcatgatgatccgcattgaggaactgaaaaaactgattcaggcatatcaggacggcgaaatcgccgaacgggatgccagcagtgcttataaatggtagaggataagttatgtatcaggtagaaggctacgcatttgaaacaaaggaacaggaacatacagcaaaacatgaggtagagatcatcgggtatatccggaaaaatacgagaatggatgatccggatattgtgctggcgttatataacaaactggtgttaaaagaaatttttgtcacgccggtcggatatgattttttgcacaggcttcaggaatatctgtataccattccctatatccggagagaagatattcttccgatcacggtgtatgaaccagaaggaatggtttcaaaagaaaaaagaagcaaagaggaaataaagcagaagaaaaaaagacagaaaaacaaagagcatgtggtcagtaaaaaccgccggaagaagaaccgggattatcagaaactgtttcacatcagtacatttttcgcagttgtttttgcacttggcatcattgggatgcttgtgattacgtggctcagcgaagataatgtgacgattttaaactatgaaaataaggtgattgataaatacgaaatctgggaaaaacagctggatgaacgggaaagccagcttgaggagagggaattgagactgacggaacaggaggcagaatagagatggacaaagtgaagatccttgtggtagatgatgagagccggatgaggaagctggtacgggattttttgacccggcagaactatgaagtcttagaagcagcagatggagaggaagcactggatattttttataaagacaaagcgatcgctttgctgattctggatgtgatgatgccaaagatgaacggctgggaagtctgcagggaaatccgtcagacatccaaagtcccgatcatcatgctcacggccaaaagtgatgagagtgatgaacttatgggatttgaccttggggttgatgaatatataaccaaaccgttttcaccgaaaattcttgtggcgcgtgtcgaagcgattctgcgccggaccaataagatcggcgatgcggccgatcttaagacggcaggagagattattctggataagacggcgcacgaggtgaaaatttcgggaaatccggtggaactcagtttcaaggagtttgaactgctggaatattttatgaataatcaggggattgccctctcgagggaacgcattttaaacagtgtgtggaattatgactattttggggatgcacggacgattgatacacatgtaaaaaaactgagaaataaactcggagcatgtggaagttatataaaaaccgtatggggaatgggttacaagtttgaggtgtcctaaatggaaaagaaacaaaagacttccctgacgtggcagctgattttgacgatggttgtcattgttgcgggaacggttgcgatgtgctggttttttaataccacctttttggaaaaatattatatttttcataaggaaaaagagttaaaaagcagttttgaccaggtaaggctgatttgtgaaaagcagggggattccagtgatgatgcgtatgtgcagttcgagagaatctgtgcaaacggaaatatcaatatgcttattgcagatcaggacagaaacctgatatggagttcctacagcagtgcacagcgttttcagatgcagatggaggactggctgtatggaagtgaccgcagccgtgtgcaggtgctttcatccggaaaggattatacgctgcttcggcagaccgatgaacggctgcagtcggagtatctggttcttctgggaactttaaaaaatggaaacaatctttacatgcgtgcggctgtggaaagcattcgggaaagtgcgagcataacaaaccagttttttgtaatggtgagcacgggagccatcatcttaagtgtgattctgatcatcgttctctcgaaaggaatttcccatccgatccatgccttatccgatattgcaagaaggatgacacagctggattttgatgcaaagtatataccggtacgtcatgtgagccgggagattgatgaacttgggaattccatgaatgaattgtcggagacactggaagagacgatttcggaactaaagacagcaaacgtcagcctgcagcaggatatcgagaaaaaagaacagatcgatgaaatgagaaaagaatttctttcgaatgtttcacacgagctgaaaacaccgctggcactcatacagggatatgcggaaggattaaaagaatgcatcaatgatgatgcggagagccgtgatttttactgtgatgtgattatggatgaatcggaaaagatgaatcatatggtaaagcagctgctgacactcaatcagctggagtttggcaatgataccgtggaaatgacacggtttgatatcacggagctgattgacggcgtgatccagtctgcatccatcatggcggcacaaaaacaggtgaatatcgaattttacagggaaggtccggtatatgtctggggggatgagtttaaggtggaagaggtgattacgaatttcctgaccaatgccatgaaccatgcggcaggagaaaaaaagattaccattcgttttcaaaaacatgaccatctggtacgcacgagtgtgtttaataccggtgacccgattcccgaagaggatcttgacaagatctgggtgaaattctataaagtagacaaagcaagaacacgtgaatatggtggaagcggaatcggattgtccattgtcaaggcaatcatggattcttttcatcagaaatgcggtgcagtcaatcacccggacggtgtggagttttggatggaattggagaccaataattaatgcaaagaaaagattgtcttatttttcagaatatgataccataaaacatagattatagggcaaaagtgacaagagggtaaaagagtatgaaaaagaaaataagtctgcctgtgatggcagtgtcagcaatactcctgttgggaggctgtggaacccagatgtatgatttgtcggaggacgaagaaaatctggtcgtgcagtattcggcgcatattcttgcaaagtataatattgagcagaaagacggaatgacagccgcttcatccgaagagacacaggaaacacaaaaacaggacagccagatgccggagagccagaatacccagagtgcggacaacaacatggcgtcagatgccacgggagaaacccagacacaggagatggagacgatgccgatcgccgaggcaatcggacatgcatcgggtctgaccgtttcttacaaaggatacagggttcagaatatctatcaagagggagactattttgcagtaactcctgaggatggaaacaaacttgttgtgatgaagtttgaaattaaaaataaggggaagaaaaaggtcaggctggatacagaaaaactcggtattacattttatgcatgttttgacggaaaaaacaggataaaggagactgcttcgctcggaaccagaagtctttcctcttatggggaaaccatcaggggcggaaagaagaaaacagcggttttactgtttcagattccgaaagaccaggctgataaaatttcgggtgagacactgtatgcagaaataaaagatacaatttattctctgaaatacaaataaatgcccccaaattttacaaaatatgatataataaacataagggattaccaatacagaaaagtgcgggaggacgtatatggatacaaatattctgttagagtcagggacgaacgaattagaaattttagagtttacattaggagataatcattacggaatcaacgtggcaaagatcagggagattttgtcataccagaaggttactcctgtaccgaatacacatccgagcgtagaaggcatttttatgccgcgcgaggtgatgattacggtcatcaatctgaaaaagtgtcttggcatggaggatgatggacaggaaggtctgtttattatcacgaattttaataaacttgatgtggcatttcatgtggatcaggtggtaggaattcaccgtgtatcatggaatgagatcatcaaaccggattctacgattaatggagaagacggaagtgttgcaactggtgtgatcaagatggacggaaaactggttgttattcttgactttgaggcaattgtatcatccatcagtccggaaaccggtctcagggtcaatgatattgaacagatcggggagagaagccggagcgaggatacaattctgattgcagaggattctccgttgctgagcagtctgattacggactgcctgaaaaaagcaggatacgaaaaactgattgttacatgtaatggaaaggaagcatgggacaagattcaggaatttgaaaaggcggggacattggacgagaacgttcattgtgtcattaccgatattgaaatgccccagatggacggacatcgtcttacgaagctgatcaaatcagatgacaaactgaaacatcttccggttatcattttctcctctcttgtaaatgaggaaatgagaagaaaaggggagtcgcttggtgcagatgcacagctgaccaaacctgaaatcggaagtcttgtagatgccattgatgaattacttgcaaagagaaacaaataaattccggcaaaacagtaaggggtgtgatggcttcatcacatccctttgcaggtttatggaataaacagatggaatggagaaaaacacatgggagaccactcatcggaaaattatctggatcaattattaaattccatgcatggagaagaaacggaacatccgaaggaacagccgacagcaaaacaggttctgagagatgattttgaaaagcaattgtttggagaagaagaaacgaaggaaaaggcaaaagcgaaaaatgaagaagattttttgagggagtttgaggaagaactgctcaaggaagatattccggagtataccgagagcctgaatcaaaaaaaacaggaagaaaaagccacacagattgacgcttccctggatgatctgctcgataatattccacaggatgatttttcgacaggggatgcagcaaaggaagaagaaaccggttttcaggggaaaagtccgttggaaactgcaataccacccgatgagggtgatttcgaggtgaatacacttgatgatgcagtcggaacgtttgacagcaatctgccaaaagaagaggatggagaactggatctgtcagggctttcggattcggatcttatggatatgctttccggagatcaggatttatcggatctgggggatatgctttcttctgatcaagatggaaaacctttggaagaagctgattccatcggtgattttgcaagatcggaaatgaatccacaggaagaagaggcagataagattccagaacttacagagcaggaagacataccggcacaggcagaagaaaccccttccaatgggaaaaataaaaaaaagaaaaagaataagaaagagaaaaaagagaaagaaggcggcttctggcagaaactttcccggattattttcggagaggatgatgaggaagaaaagcaggcggttgacattggaaatacacagggagcggatgtcagtgaactttcggaggaaaaccagcagatcttaaaggaacttgaaggtacaggcggtgatgccggaagggaaccggaaaagaaaaaggaaaaaccgaaaaaagagaaaaaaccgaagaaagaaaagaagccaaaacagccaaaaccgccgaaaccgaaaaaggagaaaaaacctaaggaagtggataacacaccgccgctgccaaagagaccggtgattgcgattgttcttatggcagtgtcattgtttgcatttgtcatgattgtgacaaatcttttggggtatcaggcaaacttaagtcaggcaaaggaaaaatatgagcagggttcttatgtggaagcatacagtaagctgcaggggctttcgatcaaggagcgcgatgaaaagctttatcatcagctggcaactcttgctgctgtctcggaaaagtatcaggcatatctcgtatttgataattacggttcaaaaattgatgcacttgatgcactggtatgtgcatatgggcgttatgacctgaaccagaaaaatgccaaagagtatggctgtgaagatcagctggagaagatcggaggaaagattatcaaagcactgctgaaagattatgatatgacaggggatgaggcactggatatctaccagaccagaaagcgggatgattatacggtaaaattgcatcagaagctgaaagaacttgggctgggataaaaaaatagcagaaagtaaggcaggagactgttaatttaggagtaagacctatatgattgcaataatagactacaacgctggaaatttaaaaagcgtggaaaaagcattgcattttctcggagaagactgtgtgatcacacgtaattttcacgagattgagaccgcagacaaagtgattcttccgggagtcggtgcatttggcgatgcgatggaacaattgaaaaaatacgagctggacaaggtgattcatcaggtgacagcggaaaataagccatttcttggcatctgtctgggactgcagcttctctttgagggaagcgatgagagtcagggtgtagagggactccatgtgctggacggacagattctgcggattccggatcagtcgggacttaagattccgcacatcgggtggaattctctgcatttacagaatgacggaagactttttgctgggctggaggaaaatccgtatgtatattttgtacattcctattatctgaaagcagcggatgaacagatagtgaaagcaaccacacagtacagtacgacaattcatgcatcggtagaatccggaaatacatttgcatgtcagttccatccggaaaagagcggtacggttggactttcgattttgaaaaattttgcaaagctgcagggaggaaatgcatagtgtttacgaagagaattattccttgtctggatgtgaatgacggacgtgtggtaaaaggcattaactttgtgaatttaagagatgccggagatccggtagaggtcgcagcagcttacgacaaggcgggcgcagatgaagtagtctttctggatattaccgcatcttccgatcaccgtgcaacggtggtagacatggtgcgtaaggttgcagagaaggtgtttatcccgtttacggtaggcggtggtatccgtacggtggaggattttaaggtactgcttcgggaaggtgccgacaagatttccattaattcttccgcaatcaatacaccggagctgattggaaatgcagcggacaagtttggcagccagtgtgtggtagtcgccattgatgccagacgaagagaggatggaagtggctggaatgtttacaaaaacggcggtcgtattgataccgggcttgacgctgtagaatgggcaatgaaagctaacagacttggtgcgggagaaattcttctgaccagcatggactgcgatggaacaaaggcagggtatgatattgaactgaccagacagattgcagacaatgtttccattccagtgattgcatccggtggtgcgggcacaaaagaacatttttatgaggccctgacagagggacatgcagatgcagcactggcagcgtccctgtttcattataaggagctggagatcatggatctgaaaaactatctggcagaccgcggtgtctccgtgcgtagataggagtgaatgaaattatggcaatgataacaaacgactggcttccggcagtccgtgaggaattcgccaaaccatattaccggcagctgtatcagtttgtgaaagaagagtatagccgcacggttgtgtatccgccggcagaggatatttttaatgcactgcattttacaccgcttagtgaggtaaaagtactgattctgggacaggacccgtatcacaatgaacatcaggcacatggtctttcgttttctgtccttccggatcagaaagaaattccgccatctctgcagaatatttataaagaactgcaggatgatctggggtgtaaaattccaaacaacggctatctgaaaaaatgggcagatcagggtgtactgcttttgaataccgtgcttacggtgcgggcgcatcaggcaaattcccatcagggaagaggatgggagcagtttacggatgcgatcattcaggcagtgaatgcgcaggatcgtccgattgtgtatatgttgtggggacgtccggcgcagagcaaaataccgatgcttacaaatccaaagcacctgatcttaaaggcaccgcatccaagtccgctttccgcgtatcgcgggttctttggatgcagacatttcagtcaggcaaatcagtttctaaaagaacatggaatcgagccgattgactggcagatagaagacatttaagaaatttcttgataaaaagaggagtgccccattgtccaatggacaatggggcgaattatgaaaaaataacaagttagtaactttgctttcttttatgttcttataatagcatctgattgtgaataaaatatgaacaaaacgaaaagaaattgttatcttttcgtaattataaccaaaatacggaaaaataccacaaaagtattgtaaaaacagtgaaaaagcgataggataaaagaaagaattgtgtgaaagaggtgatactatgagaggaatttcgatgtatgattcatcgtcagtaagtactttattttccagtctgggttcttcgaaaagcacaggaagtggcctgtttggaatcaatttaagtgagtatgcaagtattcgcagtggttcttatggcaaattaatgcgctcttatttttcaatggattccacgaagggcacctcgaagtcggatgacagcaccaaaaatacgatcgaggatctggccacgaccacatcaacgtcaaaagacagtaccaagacgctggctgcgattgagtccgatgccaaggaactgacagactctgccaaggcattgtatacccgcagtaacaacaaggtgtttacaaaggattccgggggcagctacgatacggacaagatctacaaagcagtaaagcgttttgcggatgattacaactccatgctggatacagccggcaagtcatcgacgaaccgcatttcccggtcggtaagttctatgaaaaatgagacttcttacaatgagaaacccttaaaggaaataggaattacggtcgatgaaaagaccggcaagctgtcggtggatgagacaacgtttaagagtgcggacacagagaaaataaagaacctgttcaatggaaccggttcctacgcatacagtgtggcaacaaaggcagccatgacagagtcctatgcaaagtcagaagccgcaaaatccaatacatatacgaagaatggcacgtataattacaattataacagcggaaatatttttacagatatgttttaaatagttgaaaatgagttttcgaaatgcaggaaaccctctttgctggacagaccagcagagagggtttcctgtttttaccaaacagacagagggtaacagattaatcatctgcctcctcatctgcagttgtattgtatacctgacgttttcttgccataacatcactttcgagatattcgtcataagtagaaaccttgtctaccatgcttccatccggaagaaactcgatgatgcggttcgcagttgtctgtacgacctgatggtcacggcaggcaaacaggatgacaccagggaatttgatcataccattattcaatgcggtgatggattccatatccaggtggtctgtcggctcatcaaagatcaaaacgttgcttcccatgatcatcatgcgggagagaaggacacggactttttctccaccggagaggacacgcatcttttttacaccatcttcaccggcaaaaagcatacggccgaggaaaccgcggacataagttgcgtctttgatctcggagtattgggtcagccagtcaacgatcagctcatcggaatcaaagatggcggtattatccttcgggaaataagactggcttgttgtaactccccatttgtaagatccttcatccggttccatttccccggcgagaattttaaacaatgttgtctttgcaagctcatttccaccgacaaaggcgattttgtcatcgtgtccgacaataaaggaaatgttgtcaagaacttttacaccgtcaatggttttactgattccgtctacggtcagaacttcatttccgatttcacggtttggacggaaatcaatgtacggatatttacggctggaaggacggatgtcatctagctggattttttccagggcacgcttacgggaagttgcctgcttggatttggaagcatttgcagagaaacgggagataaactcctgcagctctttgattttttcttcctttttcttgttggcttctttcatctgacggacaagaagctggctggattcataccagaaatcgtagtttccggcatacagctggattttgccgtaatccatgtctgcaatgttagtgcagactttgtttaagaaataacggtcatgggaaaccacgataaccgtgttttcaaagttgatcagaaattcttctaaccatgcgatggcatcaagatccaggtggttggtcggctcatcgagaagaagaatgtccgggttgccaaacagtgcctgcgcaagaagtactttgacttttgcggcacccggcaggtctgccatctgtgtgtagtgatcctcggtcggaattccaagaccgtttaacagggtggcagcatcggattcggcattccagccgtccatgtctgcaaattctgcttcaagttcactggcgcggataccatcctcatcggaaaaatcttctttcatgtagatggcatctttttctttcatgatgtcatacagacgtttatttcccatgataaccgtgtcgagtacggtatactcatcatacttgaagtggtcctgctgcaggaaagacagacgctgtcccggtgtgatgacaatgtcaccgctggttggctctaactgcccggataaaatttttaaaaaggtagatttgccggcaccgtttgcaccgatcaaaccgtaacagttcccctcggtaaactttacgtttacatcttcgaaaagggcttttttgcctaatcttaaagtaatgttatttgcactaatcatacgaaaacctcattgctttacttaatatgtctatgataaaatcacaaattctattataaacatgacatgggatatatttcaagaagaaaaacgctttcttgttggaaatgtatagaaataatgatataatggagaaagaattgaacgaaattggggcaaagctatggattatagggaatttatacagttggatctgcctgtcgcagttgcaattgtcagttgtggggcagactggagagtggaagaggcaaacgcagagtttacggatgtacttggatacacggaaaaggaactgcgggaaaccagaccacaaaaaatggtatatgacgaagattatgcaaatctggtcagtgtattggaaaatgttgtccggacacatgacaacggaaaaatgcagcttcgtatcgtacgccccgatgggaaaacccggtgggtggagatgcggtgcagtgttctggcacattacgatgtaaaaccatatgtggttttatttttatgggatattgatgaggaaaaaagacgggaagaacatcagaaactgttgaaccagaaatatgagctgatggaacagctgtctttggaatatccgtttgatctggatgtggaaaactggacgatgctgcgctcgtaccggctgatggaactgaggggacaatacgattattccgaacaatattttccggtggatgaagaagttctgacactctgtccaccggatcaggagctttttctgaaggctatgaaagaagctgccacagaggaaaaaaccggaagtatggatacaaggtttaatatccatacggaaaatgagacaccgaaatatctctggtttagaacttattacaagagcattgcagaccataatggacggatcacccggattatcggaagaagttttaatattgatgaagataagaatcttcaggaagaagtgcggagagatccgctgacgaaactgctcaacaagctggaaatccaaagggagaccgatgcatttctggaaggaacagaagacggaacccatgtattgtttctgattgatattgataattttaaaggtgtcaatgataatttcgggcatacattcggtgatactgtaatcgtagatgttgcaaatatcatcaaatcttttttccgcaacaatgatctgaccggaagggtcggtggggatgaattccttgtgctgatgaagaacacaacactcgagaaggcaaaggaacgtgccggaaatcttggagaagcactctgcaaagtttatacggggggctccattcactacaggatctcggcaagtattggtctggccgcctgtaacggtggggatggaaatacatacagttccctgtttgaaaaagcggatcatgccatgtatcgtaccaagcaggggggcaaaaatggatatgagattgccggtgcaaaagatgtgggaatgatcagaaacggaatcaaaaacattgagcggcgggaaaacatgggcgcagaagaccgtgaattccttgcattttccatcagtcttatggcgcacgccaaaaatatagatgggtcgctgaatatgcttttaaacaggattacggaaagataccagctggatcttgttatggtatttgaggataacaccgaaaatgacggaatggtcatgaccaattattttggaaataatttctctttttatgggaaaagtgcgtttccaaagaaaagtccttcactaaaggaactacagccaggggagtatatgatagttaaaaattcgcggagcaattttgcaacggggatgggaaattatcttaagtcaacggatacatacaacgaaaaagctccgttttctgctgtggttggaaaatttgaatatgttgggggctgtacaggggaagtaatttatgtgtcactggacgaagaacggcagtggcagccgggagagttggaaatttttcaggaactgacccgtatgatggctatttttgtgtccctgcgctatcgggtcacagaaagccgggaacagatcagttccatccagaaaaaagatccgctgacagggctgtacaatcaggaggcattccgtgaagcggtggttgaaattctggcacattccaagccggatgaagtatatgccattgagtatatggatatcaataattttggatatatcaatgaaaattatggctataaagtaggggacagtgtccttaaaatgtttgcacaggatatctttatgcaggagtatttccgtgcaggctgccgtttgtattcggatttttttctgcttctgattgcagatgaaagtcaggaaaaaatgatcgatcgtctgcacaacagaaataaaagattttccaatatgcagaatcacaggtatccaaacagtggaatggggatatcggcaggggtatatattctggaagacaataaaatggacatcgagtttgcgatcgaaaatgccaatcttgcatggaaaaatgcaaaaaataccgggaagagggatattaccctgtataatccttccctgcgtatccagcgtaccgaggagcaaaaaatagtcggggaattttatgaggcattataccgggatgatttccagatgtatctgcagccaaagtttattttacgtgaccggagtgtttatggggcagaagcactggcacgatggaaacgtccggatggaaagattcttccgccgggaatgtttattgattctctcgaaaaaataggatatatcacagagcttgatttttatatttatgaggaagtgttaaaaactctcgaaaaatgggacaagcagcaccggagaaaaattgtgatttcaaccaatttttccgggcgtcattttgagtcggacggagaggaatttttaaaccgtatccagcatgtgctttccaaatacagtgtccgtccggagtatatagaaattgaggtgacagagggcgtacttgtaaaaaatgtagcagtccttgaaaagtgtatgaaccggctgcacgagattggattccgtgtggcaattgatgatttcggaacaggatattcttcactttccgtacttgcagatatgcctgcagacgtcataaaaattgacaaaagttttattaataaaggcatgacggaacaaaagaaaaatcttctttacgaaatcggccgtatggtaaagattttacataaagatattattatagagggggtggaaacggaggaacaggagcagttcctcaaagaaggtggattcacctgcggacagggatatttatgcaattgtccggttccgattggcgactttgaaaagatgtatttgtaaaaaaacaagaaatgctgtcgctatcgcttgatttttgggtgcattcatcctatattatttagttagaagacattctgattcaatgttttttatgtttgaactttaattaaaaataggaggactaattcatgaaacgttcaatgaaaaccatggatggaaaccatgcagcagcacacgcttcttatgcgtttactgatgttgcagcaatctatcctattactccttcatctgttatggctgaggctacagatgagtgggcaaccgctggtcgtaagaacattttcggacagaccgttcaggttacagaaatgcagtctgaggctggtgcagccggtactgtacacggatctcttgcagctggtgcattaacaactacttacacagcatcccagggtctgttacttatgatcccgaacctgtacaaagtagctggtgagagacttccgggcgtattcaacgtatccgctcgttgtgttgctacacatgcactgaacatcttcggtgatcactctgatgtatatgcttgccgtcagacaggtgttgcaatgctttgtgagtcatccgtacaggaagttatggacttaactccggttgctcattgcgcagcaatcaagggaagaattccattcatcaacttcttcgatggattccgtacatctcacgaaattcagaagatcgagacatgggattatgaagatctgaaagatatggtagatatggatgcagttgatgctttccgtaagaatgcattaaatccaaatcatccggtagaaatgggatctgcacagaaccctgacatcttcttccagtcaagagaagcttgcaactctacatacgacgagctgcctgcaatcgtacaggaatatatggacaaggtaaatgccaagatcggcacagactacaagctgttcaactactacggagctgctgatgctgaccgtgtcatcattgctatgggttctgtatgtgagaccatcgatgagaccatcgattacttaatggcaaagggcgagaaggtcggtgttgttaaggttcgtctttacagaccattcgtaaaggaagctttaatcgaggctattccggatactgttaagagaattgcagtattagacagaacaaaagagccaggttctcttggtgagccattatacttagatgtagttgctgcattaaagggatctaagttcgatcaggttacaattacaagcggacgttacggattaggatctaaggatactactcctggacagatcatcgctgtatacaacaacacagagaaagagagatttaccatcggtatcatcgatgatgttacaaatctttccctggatgttaaggaaaatcctgttactactccggaaggaactacaaactgtaagttctggggtcttggtgcagatggtacagtaggtgccaacaagaactccatcaagatcattggtgacaacacagatatgtacgctcaggcatactttgattatgactccaagaagtccggtggtgttacaatttcccacttacgttttggacattctccaatccgttccacatacctgatctctcaggcaaacttcgtagcatgtcactgtacagcatacatctacaagtacaacatggttcaggatctggtaccgggcggtacattcctgttcaatacacagtggacagttgatgaactggatgagaagttaccgggtcaggtaaagagatacatcgcagagaacaacatcaacttctacatcatcgacggtgtaaagatcggtaaagagatcggtcttggaaaccgtatcaacactgtacttcagtcagcatttttctctctgacaaagctgattccggaagaggaagttatcaagcttatgaaggacgcagctacaagatcttatgctaagaagggtgacgatgtcgttaagatgaaccacgacgcaatcgatgccggtgctacagcatacgttaaggtagatgttccagagagctggaagaactgcacagatgatgattactctgtagaagttaagggagacaacaaggaagttgttgacttcgttaaggatattcagcagaaagtcaacggacagcagggtaacacaattcctgtatctgttgttaagaaatacgagacaggctggactccatccggtacagcagcatacgagaagcgtggtgttgcaacagacgttcctgtatgggatgctaccaagtgtatcgagtgtaaccagtgttcttatgtatgtcctcatgcagcaatccgtccagtcgctatgacagaggctgaggcagctaaggctccggaaggaatgcagatgaaggatctcaaccagatgccaggttacaagttcgcaatcgttgtttccgcattcgactgtacaggatgtggttcttgtgtaaacgtatgtcctgataaggtacaggctatcacaatgaccggattcgaggcacatgaggatgagcagaagtacttcgattacgcagtatctcttgaggataaggaagatgttatcgagaaattcaaacttaactctgttaagggatctcagttccgtcagccattacttgagttctccggagcttgtggtggatgtggtgagacaccttacgctaagttaattacccagttattcggtgacagaatgtacattgcaaatgcaactggatgttcttctatctgggcaaactcttcaccttctacaccttatacaacaaacaagaagggtcatggtcctgcatggtctaactcactgttcgaagatgcagcagagtttggttatggtatgttacttgctcagagagcaatccgtgacagattaaagaacgagctggatgagatcgcagctaacacagataaggctgatgttaaggatgccatcaaggagtggaatgatacattcgcttccggtatcgagaacggaccagctacagagaagttagtagcagcattagaggcttgcggatgcgatgcttccaagaatgtattaaaagagaaagatttcctcgctaagaagtctcagtggatcttcggtggtgatggatgggcatacgacatcggattcggtggtgtagaccatgtattagcatccggtaaggatatcaacgtaatggtattcgatactgaggtttactcaaatacaggtggacagtcttctaagtctactcctacaggtgcgatcgcacagttcgctgccggtggtaaagagacaaagaagaaggatcttgccggtatcgcaatgagctatggttatgtatatgtagcacacatctctatgggtgctgatatgaatcagtgtgttaaggctcttgcagaggcagaggcttatccgggaccatcactgatcattgcttacgctccatgtatcaaccatggtatcaagaagggtatgagcaaggctcagaccgaggagaagttagctgttgagtccggatactggttcaacttccgttacaacccaacacttgctgcagaaggcaaagatgcattctcattagacagcaaggagcctacaggcgattatcaggcattcttaaagggtgagaaccgttatgcatctcttgctaagttcaacccagagagagctgctgagttatttgcaaaggctgagaagaactctaaggatgagtatgaccacttaaagaagttagtaactctttacgctggtaaataattgatccggaaacagaggaatacagataaaccgcagggacgaatgtccctgcggtttttaatttcaggcataaaaaaatctatgccgtacatactatctccagaaaccatttctgcaaaaatgcatatggtaaaaggggaggaagaggcatgttggaaaatagttatccgatccgtacggatctggcactcgaatcacaggagcggctgcaggaagaccaggcagatatgcgcggcatccgtgttctggaagaacggcgggaaaatggagtgattgtcagtaccgtgatgatcgagactgagaatgcatccgttgcgatgggaaggccaaaggggacgtacattacgatcgaggcgccggagatgatcgaggaagatgccggataccacagggatatttctttggagctggcaaagatcatgcggaatcttctgccgggaaaagagattgaaaaaaatttaaaaaaggggctggaagtcgcggcactggttgtcggactgggcaaccgggaagtgacgcccgatgcgctgggaccgagagtggtggataatttatttatcacccgccacatcctgaatgaattcggaaagtatgcattccagagagaagatgtgggaaaagtcagcggaatcgtgccgggggttatggcgcagaccggtatggaatgtgtggagatcttaaagggtgtggtaaaagagacgaaaccggattttctgatcacggtcgatgcgctggcggcaagaagcatccggcggctgggacggacgatccagctgacggatacgggaatcacgccgggaagcggaatcggcaatcaccgcaatgccatcaaccgcaaaagtgtgggcgttcccgtgatttctctcggtgtgccgacggtcgtggatgcggcaacgattgtctcggatgccatgacggaatttatttccgcattatcgctttcggatctgcagaagctggatgagagggagcggcaggaactggcaagggaactgctctcgccacagctgaatggtctttttgtcacaccgaaaaacattgatgactcgatcaaaaatttaagttttctgatttcggagggactcaatattgcgcttctgggagataaagaggaatagggacaaaagaaaaggcatataattctctcaaggtggtgatagggtgaggagacgattgcttctttttctggtgacgatagattttgtgctggtctgcgcttttgcgtattgctggggtggcggactggtgcagtttctggggcagaatctgtccctgaaattttataacggagtgcttaatctttatgtgccgggggtactgggggcgcaggaggaaggaattccgaatatataccgggatgtgacggcttccatgtatccagcaattgcacaaaacgagcagcggctgtggtatgaatcacaggaggaaaacctggcgtattatgagaatcaggcagcagaggaaaacgaacaggcaaagcagatcattgcggaaaatgaaaaggcggtaacggaacagccagtgcagcaggaaagtcagaatgtggacgagactccgacacaaaaagagtccaaaaagccggagaaaaaaacagaaacttccgggaaaaaagtttctgtcaaccgcaaaaaactgcaggattttgattatctgagacagaccttttatcaggttgataatacaacgaccatcgggaaaaatcagctggacgtggataagctgatgaaaccggatctaaggattgaccagtcggtggacggccctcagattttaatttatcatacccattcccaggaacggtatgccgattcaaaagatgaaaaaacgggtgttgtcggagtgggagattatctgacggaattgttggaaggggaaggatttcaagtcatgcatcataaaggagaatacgatgtgggcgaccgggatcatgcatattccaaggcagccccgtcgattcagaaaatcataaatgataatccatcgattcaggtagtgatcgatttacatagagacggcgtgggagaaaacacgcgtctggtgacaacgcaaaacggaaaaaagatggcaaagatcatgttttttaacggactgagcagaacaacggcttccggggatattccgtatttaaaaaatccgtatatttccgataatctggcgttttcgtttcagatgcagcttgccgctgcggaatattatccggattttacaaggcggatttatctaaaagggtaccgctttaatatgcatttctgcccgaagagcatgctggtggaagtgggcgcacagacgaatacgtttgaggaagcaaaaaatgcgatggaaccacttgcagatctgtttgcaaaagtgttgaaataacggctgtaaatgttacaatgtacttatatgaggagggcatttttatggttgattatacagaaggctcaggcagacagtatcacacaggcgtgggaccgcaggacataggtaagtatgtgatcctgccgggagatcccaaacgatgtgcaaagattgcggaatttttaacggatgcaaagcaggtggcagataaccgggaatttacgacttacaccggaacgttagatggtgtcagggtgagtgtgacttccaccggaatcggcggaccgtcggctgcgattgccatcgaggagctttccaaatgcggtgcacacacgtttttgcgtgtaggcacctgcggcggaatgcaggaaaatatacttggcggagatctggtgattgcaaatggagcgatccggatggaggggacaagccgggagtatgcaccggttgaatatccggccgttccggattttacagtgactactgcactggtacaggcagcaaaaaaacgcgggatacgtcatcatgtcggcgttgtacagagcaaggattcctttttcggacagcatgagccgcagattatgccggtaagttatgagctcacgcagaaatggcaggcatggcttaggatgggatgtctggcatcggagatggaatcggcggcgctttttattgccggaagttttttgcatgtgcgtgtgggcgcctgctttcttgtccttgccaatcaggagcgggaaaaaagggggctgccgaacgtgcaggtgcatgatacaacgcaggcaatcgctacaactgtggatgccatccggctgctgatacaggaggataaagatgcagacagattataaagaactgatccggagtgcgtttcaggcgagaaagcgggcgtatacaccgtattcccgttttcaggtgggtgcggctcttctggccaaaaacggaactgtgtatcagggatgcaatatagaaaatgcttcctatcctgcaacaaactgtgccgaacgtacggcattttacaaggcggtcagtgagggtgtgcgggaatttcaggcgattgcaatcgttggtggaagtgttttgtacccaaaaacggcagaggaaaaccaatgtacggatctttgcagtccgtgtggaatctgcagacaggtgatgcgggaattctgtccgggagattttgagattgtacttgcaaggtcccaggaggactatgaagtacacacgctggaggaactgctgcctcttagttttggaccggaaaatcttaagaaacagggaggggagtaaatcatggacagacgattgaaacgtgtttttgtaatagtactcgattcgatgggaatgggagcgatggcagatgccgcacgcttcggagatgaaggtgccgatacattggggcatatttcacagaccgtggaacatttttatattccaaatctggcatctttagggctggcaaacctgaaatccttaaaacaggtacagccgcaggaacatccacttggatattatgcggcactgaatgaaaaaagcaacggaaaagacaccatgactggacactgggagatgatggggattgaaacaaaaaagcctttcatcacctttacggaacatggatttccgccggagctgatcgcagaactggaaaaaagatgtggcagaaaaattataggaaaccgggcggaaagcggaacaaagattttagaggaactcggcgagcaggaaatcagggaaggaaagctgatcgtgtacacatcggcagattcggttctgcagatctgcgggaacgaggagacgatgggattagagaccctgtatcattactgtgagattgccagggaactgacgatgcgtgatgagtggagggtgggacgcgtgatcgcccgcccgtatgtgggaaagaaaaaaggcgagtttgtcagaaccagcaaccgcagggattatgcgttgaaaccgaccgggccaacagcattaaatgcgcttcaggaagccggatatgacgtgctggcagtcggaaagatccatgatatttttgacggatacggaattacaaaaagtctgcattcgaccagcagtgtccatgggatggaccagaccattgcgctggcccaatccgatttctgcggtttgtgctttaccaatctggtcgattttgatgccctgtggggacaccggagaaatccgatcggatacggagaggaaatcgagaggtttgacaaaaagctcggagaacttatgccactgcttaaaaaagaggatctgctgatgatcacggcggaccatggaaacgatccaacgtataagggcacggatcacacaagagagcaggtgccgctgcttttgtattcgccatccgatcagggaagcgggtcgctcccgacacaggatacatttgcggtgatcggggcgaccattgcggataattttggagtgcagatgccggcaaatacgatcggcacatcacttcttccgttgttatagtttgcagaagagagggaaaagccgatgatgaatcgatttattgcacacaatatgccaaaaatagagctgcactgtcatctggacggttcgatgagcctgcccctgatccagaaactgatgcagcaggaggggaaagagccgctggggctggaagaactgcgggaaaaactggtggcaccgatggactgcagttcactggcagagtatctggagaagtttgaactgccgcttggctgcctgcagacgaaggagggactttcggcagcagcacaggatctggcactttctgcagcaaaagaacaggtcaagtatctggaagtgcgttttgcacctgcattttccatggagcaggggctttcggtccgggaaatcttagagagcgtccgggatggcctgaaaaaagcagaagaaaaagcggacatcctgaccggaatgattgtctgcaccatgcgcaatctggaaaccgaaaaaaatattgccatgttaaaagaagcgcgggaatttctcggaaacggtgttgttgcctgtgatctggcaggggatgaaaaggcgtacccgacagcagcgtttgcggacgtatttgccactgcaaaaaaatatggcatgccatataccatccatgcaggagaatgtggaagcagggaagaaatccgtacggccattgaactgggaacatcgcggatcggtcacggaattgccatgagcggggacgaggaattaaagaaggaagttgcagagaaaaagatcggagtggaactgtgtccgacgagtaatctgcagacaaaggcggtcacggattttacagactatccgttccgggaattttacgatgccggaattttgctttccatcaatacggacaaccgtaccgtcagcgataccagctgtacggatgaatatatgcgtctggcagaagccgggatgtttcaagagccgatgtgtgagaaaatttatatggcttcgctgcattcggcatttgcggacgatgataccaaacaggtattatggaaaaagtggatgtcaatgtttgatttatagacctgttttcggtataatgtaacattgcgtaggttctatcagcatctgatggaccgtacttatcaaacgataaattatagtagaaagaaaaagaggaataagatgtcaatcgatcagagcaaaattcgtaatttttgtattattgcccatattgatcacggtaagtctacacttgcggatcgaatcatagaaaaaacaggaacgctgaccagccgtgagatgcaggcacaggttctcgataatatggatctggagcgtgagaggggaatcacgatcaaatcccaggcagtgcgcatcatttatcaggcaaaggatggagaggaatatatttttaacctgattgatacgccgggacacgtggattttaattatgaagtatcccggagtcttgcagcgtgtgatggtgccatcctggttgtggatgccgcacagggggtggaagcccagacacttgccaatgtctatctggcactggatcatgatctggatgtgcttccggtcatcaataagattgatctgccgagtgcacgcccggaagaggtcgcacaggaaatcgaggatgtgatcggtatcgaggcgatggatgctccgcgtatttctgcaaagaccggactgaatattgaggaagtgcttgaacagatcgtgacaaagattccggcacctgccggagatccgaaggcaccgcttaaggcgttgatcttcgatgcgctgtatgattcctataagggggtaattgttttctgccggatcaaggaaggtaccgtcaaagtgggaaccaaaatcaaaatgatggccacaggagccgaggatctggtgacagaagtgggatatttcggtgccgggcagtttattccgtgtgacgagctttccgcaggtatggttggatatatcgcggcgagcattaaaaatgtgcgcgatacacgtgtcggagacactgtgacagagctcgaccgtccgtgtgcagaaccgcttccgggatataaaaaggtcaatccgatggtgtactgcggattatatccggcagactctgccaagtatccggatctgcgggatgcgcttgaaaaactgcaggtcaatgatgcatcgttacagtatgaaccggagacgtcccttgccttgggatttggattccgctgcggattccttggattactgcatcttgagattattcaggagcgtttagagcgtgagtttaatctggatcttgtgactacggcacccggtgttatttataaggtgcacaagaccaacggagaagtgtttgacctgaccaatccgtccaatctgccggacccttcggagattgaatatatggaggaaccgtttgtatcggcagagatcatggtaaccagcgagtatgtcggggcaattatgaagctttgtcaggaacgccgcggtatttatatcagcatggattatattgaagcaacccgtgccgtgatcaaatatgatatgccactgaatgagattatttatgatttctttgatgcattaaagtcgcggtcccgcggatatgcctcttttgattatgaaatgaaaggatatgtccgttccgaccttgtcaaactggatattcttattaataaggagatggtggacgccttatcctttattgtattcaaagacagtgcatacgacagaggccgtaaaatgtgtgagcgtctgaaagaagagattccgagacatctgtttgaaatcccgattcaggcagccgtaaacggaaaagtcatcgctcgtgaaacggttaaggccatgcgcaaggatgtcctggcaaaatgttacggcggtgatatttcccgtaagaaaaagcttctggagaaacagaaggaaggaaagaagagaatgcgtcaggtcggcagcgtagaagtgccgcaggaggcattcatgagtgtattgaaactggatgaagactgattctatgaatgaaaagaaactggaattatatattcatatccctttttgtgtgaaaaagtgtgattactgtgatttcctgtcctttccggcagacagcaatacacagatcagatatgtgcatgccctgctgcaggaaatccgttattacggaaatctgcttggggattatcatgtcccgacaatttatatcggagggggcacgccgagctggctggaggaaaatctgatttacaccgtgctgcagcaggttgcttcgagttttcatgtggaggcggatgcggagatcagcatcgagtgcaatccgggaacggtgacggcaaagaaactgaatgtctatcagagtgcggggatcaaccgcctctcgatcggactgcagtcaacaaacaatgaggagctgaaagcacttggaagaattcacacgtatgatcagtttttaaaaacgtatgagctggcgagaaatgcaggatttgaaaatatcaatattgatctgatgagcggtctgccttaccagacgctggacaaatttttggaatccctgcagacggtgatccgcctgaaaccggaacatatttcggcatattccctgatcatagaaaaggggacaccgttttatgaacggtataagtttgacgcagtgaagcaggaagccggacttcatacagagattcttccggacgaggatgaggtataccgcatttataaggccacgcaggatgtattgaaacaggcaggataccggcagtatgaaatctccaattttgcccagccggggtatgcctgcagacataacatcggctactggaccagagaaaattatctggggctggggctgggggcatcttccctggtggaaaatgtccggtataccaacacccggcagctgtatgcgtatggagaattttgtgaccacctgcaggagaagtctccggcagagtttttaaaagacggggagcatgccgtaccggaggatctctggattggcagctgtgtacaggaacaggcacagattctgacaagaaaagagcagatggaggaatttatgtttctggggctgcggatgaatgagggagtaaccagagcagcgtttgagcaaagctttggggtaccgattgaggccgtgtatctggaaacacttcgcaagctgaaagaacagggacttttgcagatggttgctggcaggattgcactgaccgacaaggggatggatctggccaactacgtgatggcgaagtttcttttataaaatataattataaaataaaaataaaatagcatcagggtgttgacaaaaaaacaccttggtgctattttaataacagaacgatattagcactctaagtaaatgagtgctaacaaaccaaaaacaaccggtgaaggttcaggaacaggagacgggaaaatggcagacgagaatatggaattggatgaaagaaaagtaaaaattctggatgcagttatccgtaattatcttgcaaccggtgaacctgtgggatcacgaaccatttcaaaatatacggatctgaatttaagttctgcaaccatccgcaatgagatggcagatcttgaagaacttggttatatcgtgcagccacatacatcagcaggaagaattccttcagacaaaggctatcggttttatgtggatcatctgatgcaggaaaaagaccgggaagtcaaagaaatgaaggacttcgtaatagaaaaaacccagaagatggatgaggtattaaaaaaggttgcaaagatgcttgcaaacaacaccaattatgcgacaattgtttccgcaccgacttacagtggaaacaaagtaaagtttatgcagctgtccaatgtagatgagaaacatatactggcagttatcgtaatgaacagcaacatggtaaagaatcagatgatcgacgtggaagaaccgctcgacaacgaaactttactgaaactgaacattctgctgaatacagcattgaatgggctgtcactgcaggaaatcaatctgggaacgatttccaaactgaaagagcaggcaggcgtgcacagtgagattgtttcccatgtgctggatgcactgggacagacactgagtgaaaacgaggatctgcagatctacacaagcggtgcaaccaatattttgaaatatccggaactttctgattcagagagtgcggcaggtcttctttccacatttgaggaaaaagatgagctggtaaatctggtaacggaatccctttctgagggggagagcaaaggaaatgaaatacaggtttatatcggaaatgaagctccggtacagaccatgaaagattgcagtgtcgttaccgcaacttatgatctgggggagggcgtcaaaggaacgatcggaattgttggtccgaaacggatggattacgagaatgttgttgacaacctcaaaaacttaaagtcccagttagacggtatttttgataaagaaaaagggcaatcctagaaaggtggtaaacatggcagagaacaaaaaagtcatggaagaagaggcagtagatacaaaagaaaccaaggccgaacagacatgtgaagaaacaaaggacacaaaggagacggcggcagaggaaacaaaagaaactgcagccgaagaaaaggatacaaagaaagaagagaaatccgaaaaaaagggtgcctttggaaagaaaaagaaagataaaaaagacgaacagatcgaagatttaaacgaccgtctgaaacgtcagatggcagagtttgataatttccgtaaacgtacggaaaaagaaaaagcgcagatgtttgacatgggagcaagaacaatcattgaaaagattctcccggttatcgacaatttcgagcgtgggcttgcagctgtaccagaggaacaaaaggatgatgcttttgttaccggtatggataaagtatataagcagatgctgacagaattagatgccatcggggtgaaaccgattgaggcactgggaaaggaatttgatccggatctccacaatgcagttatgcaggtggaaagcgaagagtatgaaccgggaacagttgcccaggaattacaaaaaggttacacctacaaggacaatgtggtccgccacagtatggtcgctgtagtcagcgaataaaggtatttcctatttcgcatggagtagtaaatcataaattagcaaaacaattttatttgatcataattttagcaggaggaaaagaaaatgggcaagatcattggtattgacttaggaacaaccaacagctgtgtagctgttatggaaggtggaaaacctaccgttattgcaaaccaggaaggtgcaagaacaacaccatccgttgtagcatttacaaagacaggagagcgtctcatcggtgagccggcaaagcgtcaggctgttacaaacgctgagaagacgatttcttccattaagagacatatgggtacggattataaagtagccattgatgacaaacagtacagtccacagcagatttccgctatggtacttcagaaattaaaggctgatgcagaaggataccttggagaaaaggttacagaagctgttattacagttcctgcatatttcaacgatgcacagcgtcaggcaaccaaggatgccggaaagattgcaggtctggatgtaaagcgtatcatcaacgagcctactgcagcagcacttgcatatggccttgataacgaaaaagaacaaaagatcatggtatatgaccttggtggtggtacatttgatgtatctatcattgagatcggtgacggtgtcatcgaagtattatctaccaacggtgatacacatcttggtggtgatgattttgataacaagatcacacagtggatgatcgatgagtttaagaaggcagagggtgttgatctttctaccgacaagatggctttacagagattaaaagaagctgccgagaaagcaaagaaggaactttcttccgcaactactacaaatattaacttaccattcatcacagctactgctgagggaccaaagcactttgatatgaacctcaccagagcaaaatttgatgaattaacacatgatctcgtagagagaactgcagtaccggtacagaacgctatgaaggatgcaggtcttaccaatgcagatttaggccaggttcttctggttggtggttctacacgtatcccggctgtacaggataaggtaagacagatgacaggcaaagagccaagcaagtccttaaacccggatgagtgtgtagcaatcggtgcttctattcagggtggtaaattagcaggtgatgcaggtgccggcgagatcttacttctcgatgtaacaccactgtcactttctatcgagaccatgggtggtattgcaacccgtctgatcgagagaaatactaccattcctacgaagaagagccagatcttctctaccgcagcagataaccagaccgctgtagatatcaacgttgtacagggtgagcgtcagttcgcaagagataacaaatctctcggacagttccgtctggatggtatcccgccagcacgtcgtggtgttccacagatcgaggttacattcgatatcgatgcaaacggtattgtaaatgtatctgccaaggatcttggaacaggcaaagagcagcatatcacaatcacagccggatctaacatgtcagatgaagaaatcgataaggctgttaaggaagctgctgagtttgaagcacaggataagaagagaaaagaagcaatcgatgccagaaatgaagctgagagctttgtattccagacagaggatgcattaaagcaggtaggagatcaggttgatcctgcagacaagtcagcagtagaagctgatgttgcagcagtaaaggctttcctggatgcacacaaggaagcagagcagatgacagatgcagatgttgctgaattaaaggcagcacaggagaaactgacacagagtgcacagaaggtatttgcaaagatgtatgagcaggcacaggcagcacagggtgcagcaggcgcaggcccgaatccgggagcaggtcctgatatgggttctgcagcaggagcaaacaccggagcaggagcaaatggtgcagatgatgatgtcatcgatgcagatttcaaagaggtttaatttagaaaataaatagacaaagcgtggggtttccggttttccggaaaccctatgcgtactataagggattaatattatggcagagaaaagagattattacgaggtccttggaattccaaagaccgcaacggaagcagaaataaaaaaagctttccgtacaaccgccaagaagtatcatccggatatgcatccgggagataaagagtgtgaggaaaaatttaaggaagcgcaggaggcatatgccgttttgagcgatccggaaaagcgcagacagtatgatcagtttggtcatgctgcgtttgatggaggcgccggcggtgcaggtggattcgatttttccggcatggatatgggagatatctttggcgatattttcggagactttttcggtggcggaagacgaaacagcaacaataacggaccggcgcagggcgcaagtgtacgtcttaccgtccgtattacgtttgaagaagctgtgtttggatgttctaaggaacttgagttcccgtataaagaagaatgtaagacctgtcacggaaccggggcaaaaccgggaacttcaccggaaacctgcagcaagtgcgggggaaaagggaaagtggtatattcccagcagtctttgtttggcatgatgcagaatgtgcagacctgtccggattgcggcggtaccggtaaggtgatccgtgaaaaatgtccggattgccggggaacgggatatatctcaaagaaagtacgaaagaccgtagagattccggccggaattgataatggacagtctgttcgtgtcagaggttacggagaaccgggacgaaacggaggtccgagaggagatcttctggtagaagttcttgtttccagaagcaatgcgtttgaacgtcaggacatgaatatattttccaatgcttcgatttcctttggtattgcagcactgggcggggatatccgtatcaggacggtggacggagatatcatctataccgttgcaccgggtacccagagcggaacgagaatccgcctgaaaggcaaaggagtaccatcgatccgaaacaaggcagtacgtggagaccattatgtaacactgattgtcaacacgccgacgggcttaaacaaagaggcaaaagaggcgttgcgtaaatttgatgaattgacgggaaattccctgaataaagagggcggagcacagaccggaaaagaaaaaaagaagggttttatggacaaaatcaaagaatctttcgatgaacattagtacaaatcgcctatagtaatctggtacaaagtattgtatgatgagtctgttagtattattggcagcatgtgtgtacggatacggaggcatgtgggggatgacgctggaagaagaacgtaaagctttggaggagcagcgccgcacgctggagcgtgaacggcgggaatttacccggcgggtggagattgaagaccgccgtctggaacagcagcagaagcttttcaatatgaaatttaaaatactcgaagaagaactggtgaaacttgcaacagagaaagaacatgtgaagaagcagaaagctttctatcagcgggtaagcgatttttccgtgacagcagagcagcctgttatccggggagaaatgttcttctccggagtagagagcagacagtctcttaagaaacgttataaagacctgatcaaaatttatcatccggataatctggatggggataagaataccgttcaggaaattaacagtgagtatcataagctttgtgctgtgtacaaaaattaaaacagccatacggtctgtccgcagaccgtatggctgttttatgcatgtttaacatgtttaatgtcgttcctcatgaagacgcttaaaaatctcctcctctgacatggcagtggcggactgaatgttttcttccatattgtaggttctctgttttttgatatagagagtattggtgttctctttatattctacatcactggtatcagaagtatttcgctgccggtcatcggtgttgaatgctttctgaagtccttctacaagattgcgtttatccatttattgttttctcctataactgcataactatcaacttaacccctatattataacatgggtttttttgatgtacaatgttttcttgaaattttattggaaataaggtatgatacatatagtatgccttagtgtagaattgagaggatggtaacatgaagtggaaaaaatatacaattgagacaacgaccgcagcagaggattttatgagttccatgctgatggatctgggcattgagggaatagagattgaagacaatattccgcttaccaaagaagaccaggcggatatgtttattgattttctgccggaacttcctccggatgagggcatcagccatgtgagcttttatgtggaagaagacggcagtgatcagacggagattttaaagcaggtaaagatcggactcgagaaactgcgtgacatggtggaagtgggaagcggtgtcattacatcttccgaaacagaagatcttgactggatcaataactggaaaaaatattttacttcttttaccattgatgatatattaatcaaaccgacctgggaagaattaaaggaagaagacaaagataaatttctgattgagatcgatccgggaatttctttcggaacaggaaaacatgaaacgacacagctttgcatccggcagttacagaaatatgtggaaggaaaacatccgaaagtactggatgtgggatgtggcagtggaattttatcgattgtggcattaaaactcggcgcaagagaagtcgtgggaacggatctggatgcagactgcatgacttctacaagggataatatgcaggtaaaccatctcgatttgtctctgggaaccttttatgtgggaaatctgattgatgatgaagaacttcaggaaaaggttgggacagaggaatatgagattgttgtggcaaatattttagcaccagttatcattgccatggcaccggtcattccggccagattaaaacagggtggttattttatcacttccggcatcattgattttaaggaaaacgaagtaaaagaagcgatagaagcagcaggacttactgtagtggaaatcaatcatcagggtgagtgggtaaatattaccgcacagaaacagtaggagcagggtatgtaccagttttttgtggaagatgaacaggtgcagcaggatcggatctgcattgtgggcggtgatgtcaatcatatcggtcatgtgctgcgcatgaagacaggggagaaaatccgcatcagcgataagagcggcagatcgtatttttgccgtattctggaaattacagaggaagaggtctgggcacagatagaggataccgatgaaatggggacagagttttcccataaggtgtatctttttcagggtcttcctaaaagtgataagatggaactgatcatacaaaagaccgtggaacttggtgtctataccgtcataccggttgccatgaaaaactgtgtggtaaagctggatgaaaagaaggcacagagcaaatgtaagcggtggcaggcaattgcagagagtgcggcaaaacagtcgaagcggaccgtgattccgcagattcagatgccactttcctggaaacaggcattggaagaggcaaaggagctggacgttgtcctggttccgtatgagaatgaaagaggcatggaagcaacaagagagatctttcgctcgattccggaaggggcgtccatcggagtaatgatcggtccggagggcggattttccccggaagagattgcgcagctggataaagacatgcatcggatctctcttggcagacgtattttgcgcacagaaacagcaggaatggcaacactttccatgctgatatacgaattggatatataagaagggtaaaaatggaagcatatttggataattcggcaacgacaagatgttgtgaggaagcggcacagctggtggtaaaattactgacggaggattatggaaatccatcttccctgcacaacaaaggcgtaatcgccgaaaattatatgaacgatgcaagaaaaaaaattgcaaagacattaaaggtacaggaaaaagaaatctgttttacgtcaggtggtactgagtccaataatcttgcaattatcggtgtggcagaggcaaacaagcgaagtggaaaacatgtgataacgacgtccattgaacatccgtccgtgtcggcaacgatggcatatctggaggaacacggatatgaagtcacatatcttccggtagatgcttatggtgtgatttctctggacgatctgaaagcggcaatccggccggataccattctggtttccctcatgcaggtaaataatgaaatcggagcggtggagccgatcgcggaagcgggggcactgatcaaacagtgtaatccacagacgctttttcatgtggatgccattcagtcctatggaaaaatgagaatttatccggcaaaaatgcatgtagaccttctctcggtcagcggacataagattcatggaccgaaaggaagcggatttttatatatcaaagacaagacgaaaattcatccgctgttaaacggaggcggacagcagaggggaatgcgttccggcacggaaaatgttccggcaatcgcaggacttggcgtagcagcggaacgtatttatactggttttgaggaaaaaatcgaccggatgtataccctgcgagagcattttattgaggaagtgacaaaaattccgggtgtacacgtcaacggtcataccgatcgcagcaatgcaccgcatattgtcagtgtcagcacggaaggtgtgcgcgcggaagtattgcttcatgcattagaggataaagagatctatgtgtcagcgggaagtgcatgttcttccaacaagccttctgtcagtcatacgctaaaaagtattggcttaaagccagagcttttggatgcaaccatccggttcagcttttgcgtggagacaacggaagaagagattgattatgcagtaaaagagatggcggcattggttccgatgctgcagaaatatacaagacattagaaaaaggagagcaatatgtataaatcatttttgattaaatatgcggaaattgccattaagggaaagaaccgttatctgtttgaggatgcactggtacagaatatcagatatcatcttaaacgtgtagagggaaccttccatgtacgcaaggaaaacggacgtatctatgtggatacggaaggagaatacgattatgatgaaactgtagaaacattacagaggatttttggaatcgtaggaatctgtccggtagtattggtcgaagatgaaggatttgatgccctggcaaaagtagtatgtgactatgtggatcgcacatatccggacaaaaattttacatttaaggtggatgcgcgccgtgccagaaagaattatccgatgacttcgatggagatcaatgcagctgttggggaaaagattcttgaagcatttccggaaaccagcgttgacgtacatcatccggaggtgatgattcatatcgagatccgtccgatgatcaatatttattccacagagatcccgggaccgggaggcatgccgcttggcacagcaggccgtgcaatgcttcttttatccggcggaatcgattcaccggttgccggatatatggtatccaaacgaggggtaacacttgaagcgacctattttcatgcaccgccatacaccagtgagcgtgcaaaacagaaagtgattgacctggcaaagaaagttgcaagatattccggacagatcaagcttcatgtggtgaactttaccgatatccagctttatatttatgagaaatgtccgcatgaggaactgactatcatcatgcgccgctatatgatgaaaattgcagagcattttgccgaagagggaaaatgtctgggtatgattaccggagagagtatcgggcaggtggcaagccagaccatgcagtcccttgctgtgaccaatgaagtgtgtcatatgccggtataccgtccgctcattgccatggacaagcaggatattgtatcaatcgcagaaaaaattgacacatacgagacgtccattcttccgtatgaggattgttgtacgattttcgtggcaaagcatccggttaccaagccaagcttaaaacatattaaaaaatcagagtgccggctggaagaaaaaatagacgaactgatgcagacagcaatcgatacgacagagacgattctggtagatgcagaataatctgtttttggaaaattatttccgtgaaacaaaaaatcccctgtctgcaatacagacaggggattttgtaagtaattactgggaaataatgtatggctttaaagcttccagaatctcattcagattatcctcggtatggatggcgagatcaatcggcttggaaagatccaggctgaaaattcccatgatggattttgcgtcaatgacatatctgccggaaatcagatcaaaatcgtactcaaactgagagatggtattaacaaatgattttacttttccaatagaatttaatgaaatctgtactgttttcataatgaaaacctccttgaaaatattcatgaaaaactcatgctgtttatatctttgatagtaatattttttattggaaaagtcaagaaatgtatgaagataattgtataaaggagtaaaaatgaaaaaagcagcattacacaatctgggatgcaaagtgaatgcatatgagacagaagctatgcagcagatgcttgaagaagcggggtacgaaatcgtgccgttttcggagaaagcagatgtctatgtgatcaatacctgttccgtaacaaatatggcagaccgcaaatcaagacaaatgctgcaccgggcaaaaaagcggaatccggatgcggctgttgttgctgccggatgctatgtacagaccaaagaggatgaggcaaaatgtgatgaagcaattgatattctgatcggaaataatcagaaaaaagagctggtagagcggctggatgctttctttgcgggcagaggagaaaaggtggaggctgtggtggatattaaccacgaaaaacaggcatttgaggagctgacactggatcatgcagcagagcatacccgcgcgtttataaaagtacaggatggctgtaaccagttctgcagttactgcattattccgtatgccagaggacgggtgagaagcagaaatgttcagaatgttctggaggaagtaaagcgtctggcagcgtccggatatcaggaagtggtactgaccggaattcatctgagctcctacgggattgactgcggggaaagtctgctgcatctgatccagatggtgcatcaggtggagggaatccggcgtatccgtttaggatcgctggaaccgagaatcgtgacggaaacatttgcagaagaactggcaaagatggagaagatctgtccgcattttcatctgtcactgcagagcggatgcgatgcaacgcttgcccggatgaaccggaaatatacgacggaagaatacgaaaatgcatgcagtattttacggaaaaactttacgcatccggcaatcacaacggatgttattgttggatttcctggagagacagaagaagaatttgcacagacaaaggaatatttaaaacgcattcatttttatgagatgcatatttttaaatattcccgacggcagggaacccgtgcggcagtgatggaacatcaggtgccggaggaaatcaagacgaagcgcagtgcccagctgctggcacttgcggaaagtatgtcgagggaattccgcgcatattatgtgggaaaagaggaagaagtactctttgaggaaccaatggaagttgacggagaaacgtggtatactggatataccaaagagtatgtaaagatcgcggcaaaaacggcagaaccgcttgataatgtgatgaaaaggggaagagtggaagcggctctgaccgatgagatttaccgtatgaaactatagcgcttgtatttttcctcaatttcgtatacaatagatgggacaggacttgttggaatgaacaagggcagggacggcgaatatggagaatttaaataatacacaatattttacagtacaaaaggaaccggaattacaggtaagagatgttttagagatcgtattccgtgcattgagtgagaaaggatacaatccggtgaatcagattgtaggatatattatgtccggagatccgacatatattaccagtcataacaatgcgagaagtctgatcatgaaagtagagcgggacgaacttgtagaagaagttttacgtgcatacatcaaaaacaattcctgggaataatccggtacgggagaattatgcggattttaggattggatttcggttcaaagacagtgggtgttgcagtgagtgatgcgctgttaattacagcgcagggagtggaaattatccgaaggaaagctccaacgaaactcaggcagacactggcgcggatcgaacagctggtaagcgagtacgaggtggaaaaaattgtgctcggttacccgaaaaatatgaacagtacagaaggggagcgctgcgagaaaacaaaagaattcaaggaaatgcttgaaaaacgctgtggtctccctgttattttatgggatgaacggctgacaacagttgcagcagaccgttcgatgatggaaacaggaattcgaagagaaaaccgcaaggaatatgtagatgaaattgcggctatttttatattacagggatatctggattatctttcaaatcatccagaagaaaaataaaaatacaaggaaaaaataaatggaaaaaattcagtttacagatccggacaccaatgaggtggtggaatttgctgtggaagaacagacacagctgaatggaatcagatacttacttgtctctgatggcaatgaaaacggggacagtgaagcatatatattaaaagaaataaagacacaggatgaggaagtattttacgagatggtagatgatgatacagagtttgctgcactcgcgaaaatatttgctgaacttgcggatgaagaaacacagcttttatattagagcggaatattatatttggaggatttatgaaaaaacaggaaaaacagaataacagtaagcttaagattataccgttgggaggtcttgagcagattggtatgaatattactgcctttgaatacgaagacagtattattgtggtggattgcggtctcgcattcccggaagatgacatgtacggagtggatctggtgattccggatgtcacttatttaaaggaaaatattgatcgtgtcaaaggattttttattacgcacggacatgaggatcatattggtgccatcccatatgttttaaaagatgtcaatgtgccgatttattcgaccagactgaccaatgccctgatcgagcacaaactcgaagagcatgatatgctcaaaaaagtaaaaagaaaagttgtcaaatacggacagcacatcaatcttggatgtttccgtgtagagtttatccgcacgaatcacagtattcaggatgcggcggcacttgcgatttattccccggcaggaattgtcctgcatacaggagattttaaggttgattatacaccggtatttggagatgccattgatctgcagcgtttcggcgagatcggtaaaaaaggagtgttagcactgctttgtgacagtaccaatgcggagcgcccgggatttacagattccgaaaagtcagtaggaaaaacgctggataacattttttccgagcataaaaatacaagaattattattgcgacatttgcatccaatgtggatcgtgtgcagcagatcatcaattctgcagacaagtttggcagaaaagttgcgattgagggacgaagcatggtcaatattgtatccatcgcatcggaactgggatatatttccctgccggataacattctgattgatgtggatcagctgaaaaattatccggatgaaaagacggttatcattacaacgggaagccagggagagtccatggccgcattgtcccgcatggcatccggcatgcaccgtaaagttaccattaagccaaatgataccattgtattcagttcccatccgattccgggaaatgagaaatcggttaccggtgtgatcaatgaactgatgcgcaagggtgcagatgtgattttcgaagatgtacatgtcagcggacatgcgtgcaaggaagatatcaagctgatttattctctggtaaatccgctgtacgcgattccggtgcatggagaatacaagcatctgattgcacaggcgaagattgcggaagagcttggatatgacagtgatcatatcaaaatcctttcttccggagatgtgcttgagatcgatgagaatggtgcagaagtgaccggacatgtgccggttggcaatgtaatggtagacggacttggtgtcggagatgtcggaaatatcgttcttcgggatcgtcagcgtctggcagaagacggaattattattgtcgtcatgacactcgaaaacggatccggacaggtacttgcaggaccggatatcgtatcgagaggtttcgtctatgtacgtaattccgagagtctgatggatgaagcaaaaaccgttctcgataagaccatggattattgtatggatcacaacattaccgattggggcaagatcaaaaatgaagtaaaagatgctctgggtgatttcgtctggaaagagaccaagagacgtccgatgatcatgccgattatcatggaagtataggggtattatgaataaagctttgttcactttcattaaaattgcgtttgttattatgctgatcctgctgattttatatggaaccgttcatttatgcaggacctgttatgattacgggtatcgtttctttgcagaaaagcagatggtaccggatacgcaggatgtggaaagcacggaggcacaatagaaataaatatgatagtagatgaacgactggtaacatatatcaattccctggatacgggaaataccagaattttggatgctgtcgaacgagaagctctggattcctatgttccgattattcggaaggagatgcagagctttttgaagcttttgctggcgatgacaaaaccaaaaagaattctggaagtcggtactgcggtagggttttcttccattctgatggcagaatatgatccggtaccgtgtgaaattgtcacgattgaaaattatgaaaagcgaatcccgattgcccgggaaaattttaagagagcagggaaagaagagcagattacactgcttgaaggggatgcagcggaaatccttccgacactcaccgagccgtttgatctgatctttatggatgccgcaaaaggacagtatattcattttatgccggatattctgcgtctgctgaaaaccggagggacacttgtctcggataatgtgctgcaggatggggacattattgagtcccattatgcggtgatccgcagaaaccggacgatttacaaacggatgcgggaatatttgtatgagttaacgcaccggaaagatctggtaacagcggtgctgccggtgggagatggaattacagtcagtacaaaagtagaggtagaaaacgatgagaaagaatgagttgcttgttccggcaagcagtctggaagtattaaaaattgcagttatttatggagccgatgcggtctacatcgggggagaggcattcggactcagagccaaggcaaaaaactttaccatggaagagatggcagagggaattgcatttgcacatgcacggggagttaaagtttatgtgacgacaaatattctggcacataattatgatcttgacggtgcgcgggaatatcttacggaactgcagaacatgaagccggaccggccggatgctctgatcattgcagatccggcaatctttacgattgccggagaagtatgcccggatattgaccgccatatcagtacacaggcaaacaacaccaattacggaacatttcagttctgggagaaactcggtgctacccgtgtggtaacggcaagagaactttccctgcgggagatccggcagatccgggaacacatttccgatgatctggagatagagacatttgtacatggcgctatgtgtatttcctattctggaagatgtctgctgtccaattattttacaggaagggatgccaaccgcggggcatgtacacatccgtgccggtggaaatattctgtggttgaagagaagcgtccgggtgagtatttcccggtatatgagaatgagcgcggaacctatattttcaattccaaagatctgtgtatgattgagcatattccggatcttctggaagcaggaattgacagttttaagattgagggacgtatgaagaccgcactttatgtggcaacggtggcgcgtacttaccgtaaggcgattgacgattatctggagtctccggagaaatatcaggaaaatatgccatggtatctcgaacagatcaaaagctgcacataccgccagtttaccacgggatttttttatggaaaaccttcggaggagacacagatttacgataacaacacgtatgaaaagggatatacctatctgggaattgtcggtccgaaaaatgaaaagggaatgtaccgggtggaacaaaagaataaattttctgtcggagaacagatcgaagtgatgaaaccggacggacgcaatatgaccgttacggtgcggggactgatggatgaaaagggagagccgatggaatcctgtccgcatccgcagcagatcttttatgtggatctggggatggaaccggatgaatatgatattctccggagacgggaagaagaagcgatcgccctggattaaaaaaatcttaagaaacaccctctgtctgaacaattgcgaaagcacagagggtgtgctaatataagacaaaaggacgttgttcttaagtagcgagtgaaccagataaggaggagagattatgcgtttgcaaagcaaaaaactgattgctgtattgtgtgcgctggcaatgattatttctgtatttccagtacaggcagatgcggcagcaaaaccgaaatttgtaaaaaattatacggttctttatgaaaacagcaccggtaagggtgtgtatacatataccgtaaccaatcttaccaaagggcagagggtaaaatggagcctttccggcaccggaaaaagttatgcaaagctgaagaaaacaacgacatccgtgagcggaaagacatctgcaaacagtctgacaatccgcacccggggaaaggcagccgcaaagaataaaaccgtaattgtaactgcaaaagtttacaaagggaagaagtgcgtgagcacgatcaagacaaagtctgccaagattaaaatactgccgaaaacaatttccattgtagataacggagtcttgaaatatcaggtgggacagacctatcagttccagttccgtatcactccggcaaatgccatcagcaccaatgtctggaccgctgtggatggaaacggaaatgatgtttcgtccatgattacaaagaccggtgcatttactccggcaaaagaaggtacttataccatcaccgtgcaggcaaaagcgggaaataaagtggtttccgacagcaaggttatcactgtcgcaacttccatgaccggaattgcacagatggcagcaaacaaggtagcggctgtatattccggaaatgccaaaaatcttgtgaaaacaggagatttttctatccggacccaggcgggtgcaaagatggaaatcaagtcggctgtattttccgatgacggaacacaggtatttcttacaacctataatcagctgaaagacggtgcaatctatacggttaccgatggacagtcaacatatgactttaccgcatccgtgggaagaccggtcagccttagagttgtgacaacagaagtgaccatcggaaaagagacaccaatcgaatacgagattcttgatgcgaatggaattgatgtcaagacagcatatccgggagatattacttatacggaacggattacaaatggttaccgtacaaaggataataagatttatatgaccggagtgggagataccggaacggttacactgacttataaatgtgcaagtgatccgaatctggtactgaccggaagcggaacctttgtatgtaaggcagccagtgtgtcaaacaacacaaaccttacacttacttcttcggaggcagtgccgaattacagtgcatccaattacaaggacaatcataatgtagcatccggcagcaattattatgtacatttccgggctttggatacagacaataccgagatgaagtatgacagcatcaagtttgagtcttccgatccggacacattgcttgtaaatcctggaaagaacaatgttgcttatgcaacagcaatcaagacaggtaccgcaaatattatcgttaccgcaacctatgcaaagcaggaatacacttatgtatacgagattacggtagcggaaccggcataccttgcaacattgtctgcagataatacgcagattaccatgtcaaacgcttatgcaacagggtataaggaatatgtcaatattgagggaagagatcagtatggacagagtatgaaactcgagaatgagacataccagatcgtagaaaacagtaccaataaagtatctatggctacctatgatccggcaaccgaccgtatggtatttgacgcatccggaagagcagcaggtgtttacaattataccctgaccctgaccgtgaatgggcatagggcatccgttaatgtcaccgttgttgtacagactcctccttataatggagcatcttcctataaggttgatatcagcaaaccggtcattgatctggcaattacttccggagcatctgcatcggatctgcttgcatcaaaagcgacaacactgcgtctggcagagtatcgcggaggcgtattctatcagtatgtgaatattgcatctgtaaggatcagtaagggtggacagtattatggaagtgatctgtcaaagggtggatcttcaacagaacctgcagcaattggcagtggatcagaaattccgatttctgcggtttcactgaatggaaatgttgtgacaaaggcacagacaggtacttatctgctggaactgaagttctatccaagtgatggacagagcacatcactggctacaactacgggatatctggaagttaccgacagtcaggcaaatccagtgatcagtgtagatcgcaccgtatctaccgtaaactgtaagacggcactggatctggcaaagaactgcctgagcattcagggaatggatggcggagtgattgcagactgtaccgtcaccggatcgagtgtaccgggcgcaagttattccgttacttcaggaatgtctgtcaatatcaattctgttgttgtacaggcaaccacaacactttccgataagacaacggttgtatctaattatacggtttctgtgggaaggacattgagaaatcaatagtaagctgtttattggtaatggcatgtaaatagtggggtatgattctttgaatcatgcccccttttaagtcaaaatctggtgatgcagactttgaccgggtatttaatggagaagaaggaatgagacaacaacttcttgatgaacttatgcagatatcagaagaggaaagtaaatataaggcaggacaggcagcgattgaggaacagttatacagcgaagcgtccatacaggagattgatcgtcaaaaactgctcagaaggggaaaactgattactgtaagacgtcacagcagatttgtggaatttccgttgcaccggcataattatgtggaatttatgtatgtggtacagggggagattacacatgtaattgacggaaaagaattaacactttataaaggagatttactgatgctcaatcagtatgtggaacatgcgattcacagagctgaatttgaagacattggaatcaattttattgctttgccggaattttttgaaattccgcttggaatgcttcaggaaaaaaatgttttagcggagttcattgcaggggcattccggcagaagagtccggttcctcattatctgatttttcgtttaaaggagaatccccagattgaaaatctgatggagaatatgatagaatccatgctttatgaatatatgaatgaagatgttatcaatcagtattccatgggacttgtctttttgtatttgttaaatcatttggagaatttgagccataattcttctatggattacaaggagactattgtgcagtcggttcttgaatatatcaacagtgattgtaaaaatgcaaatttgacaaagattgcagcagatacacatcagtcagttaccgtattaagtaagctgatcaagcaaaagacaggggcaaattttcaggatttactgcaacagaggcgatttcaggctgcggtcaaacttcttgaggaaacggatctgtcaatcgaagatatttcacttgatgtaggatatgagaatcagagttattttttcaggcaatttaaaaaaagatttggtatgacaccgagatcttatcgcataacacatcaaaaataaaaatatcaaataaggacagttttttggtctaatcagaggctaaaaagctgtccttatttttgttatggtgaagcaaatgaaaaaggaggcgtgttttatggatacgatacgtgctattatttttgacctggatggggtcatttgtttcacagataactatcactatcaggcgtggaaagaattggcagatgcagaaggaatctattttgatgagaaaattaatggacgattaaggggtgtaagccgtatggaaagccttgatatcattttggagcgagcatcaagatgctatacacaggaagaaaaagaacagcttgctacaagaaagaatgaaagttacgttcgtctattggaaaagatgtctccaagggatctttcggatgaagtaaaaaatacgttggacaccttgcgacagcgcggttacaagcttgcaatcggatcaagcagtaagaatacaaagaagattttaaagcaaattggattagatggatattttgacgcggtcagcgatggaacaaacattacaaagtcaaaaccggatccggaggtttttataaaagcggcggaaatggttgaggaaaagccggaaaattgtcttgttgtagaagatgcacttgcaggaattgatgcggcttatgccggtggattcataagtgcagggattggagatgccgcgagtcataaatatgtgacatatccaatccatacattttcggatctgctttccattgataagttgtgaaaaagtcagtggagaggtgtaatttgaattaatcgtacctctaacaattctaatgtgacatccagttcgaggatttcatcggagttgacagacacaattttctgatgaaatccaggaacggatgatttttttaaccaatcaatttcctgaggtgtagtaagttccaatgcacccatagaaacccattgatcgaaagcacttccatgcgttcgatttacataggtttcagaaatcttatagtttccctgtggaatatcagataaacacagggagatcattaccggttccgaatcagcaaaaacggtatagcggtctgtttctgtcatatcaaaacgttctccattcgcatataagtaattaaaatgcctgtaattgtaaagcatgacttgaaaactatcattttcacgggtgataaaatattcgtctccacgcccaagaaactgatcacccaattgttgaagaagtgtgtaggcataataactggcttttggaattccatttacggtaaaaagaccaagtccaccgaaaaataacatatttggtaaagaactgtctgccataagatctgtgagcgcctgataagtaaaactttccagacggtcatagttttcaaggatgttcttgacaatataacaggatttgaagcaggtatcattcagtagatcctgttggcttggtgtattattccattcggataagtagattggcaatttaccaagatttagccggcgtcgttctctgagaacctgcatgacaaaatctttgagtccgtctggtgattccgataaactcatggcatatatgaaaccgaaagattcttttgaatgatttttattggaaatcagtttggtgtcataataagtgaaacttaaactgtcagggatgcagtcgttttgtttacaccattccagaaagttcagataccagttttcgtagccttcggatacgatgtagtaagtcggcggaagactaaattcaatatccggacagaaattttttacgcaaaggaaagtttccttataaaactgaaagaagtctttttcgtttgaaaatccgaaaagatccatgtttgtgttgggctggttccaaagaccgaatttccatgagcgaattacctcaagtccatagcggttgctgatatgttgcagaaactctgaaacaagccggcaccatgcggcaatggaatggggttggctgacattagaaccaaacaagcgtttatttggatatttggcgagcttttccggcatgtaagaaagttgaatccatggattaagatgaagtttggttacaaaatcaagaattttatcaatatatgtaaaactgtacacaggtgtaccgtttgctttctcattgtacacatgcagatcatctgaaaatataccgcataatttaatatattcaaatccaatcctattttgaaatctggtcaacatttcctgaatatcacagattaacacatcactggcacgaccgactgtcatcatttttttccatgtatgtagcaatacgtaagaacttccatttacagagaaatcaatttgtttttttgatataggggatacgacgtgggtatgtgtattgtcgtttaaatatttctttaatcctgcaatataattatgttgttctaattgttgagaggtctgttgcttttcttttttttgctcgcgccgatattcttttggcagcattccatattctttttttaaaagagttacaaaggcatgactattaggaaatccgctgtcaatcgctacttcatcaatatttttatctgttatggaaagttcctgcatcgcatgcataaggcggtattgattcaggtagcttagaaaattcatcccaaaatagtcaacgaagaattttgaaagatagggaacggacaaatgaacttcatcggcaagttcttttaaggttatgttttctgtatagcgctgttggattaattgtgatatttctgctatccggatagcgtatttgtggtttttcttttcatttgcagtcgataattttacacggaaatgaaggtacataatatccataacattatagatatatgaccagttgcgaagttcgtagccatcttttttgtccacatttgttttgatgatgtgagcaatcagagagcgtaattgtgcaattgcttcctgattatccgacatgggactaatacagaagaagcggggatgtgatggaaccggcagaatctgttcaaataatgtttgattaaacagaacggttatgatgacacaattgacaccatgtagttcatgaagtgtaagtggattgatgcaaaaaatatcatcttccctgagactgtacatatgatcatcaaattgtaatgtacagcttccggaaacaatcatggacaattcaaaataatcatgcatctgttggcggatatgatcaaatcgctgcatcgtacaccggatcggcatgtgtacatcgttatcggaaataagatagtagttctctgacataaaattcctccatttcatataaaaaggtaactatattgattaaaacatatatgcaatacaaaaatcaataaaaacataggatttttaatctattttttagaggcgagactaaatttaaggtaaacgtatagaaaaaagaaaaacacattaaaaaaatgagtgaaacagataaaaaacaaaatcacataaaaattaacaaaaatctataataagcataaagacgaggtgataaaaatgagtgaaccaattttaacagttgcaaatatgaataagaaatttggaagtacagtggctttgaatgatgtatcactgactgtatatccgggagaaataagaggactcattggagaaaacggatcgggaaagtcaacggttacttctattgtagcaggaatgcaggaatgtgacagcggtgcgatgacatttcagggacagagctggaagccgcttagcatgatcgatgcacttcacaagggaattggaatgattgttcaggagagcggaacaataccggggattacggtagctgagaatattttccttgcggagtctgaaaagtataagaataagttcggcctgattaatcgtaagaaaatgaatgcggatgcgaccagggtgatgaaaaatatcggtgtcaatgatgtaacaggcgaaatgcttatgcagaagcttgattttcaaaccagaaagcttgtagagattgctaaagttgtgatgaaagaacctcagattctggtaatcgatgagacgagtacagcattatcacatgacggaagagaaattttatatgacattatgaatcgcttccgtaaagaaaataaatcagtgatttttatttcgcatgatctggatgaaattatggaagtctgtgatacgttgaccgttcttcgagatggcaagattatccggacatttgaaaaagcagaatttgaggccggagcaatccgcgcgagcatgatcggaagagagctgcaaggtgattattatcgaagtgactttcaggcaagttcacagccggaagtggcattggatgtaagaaatctggtatatgaagaccggttaaaagggatttcatttcaggtgcataaaggagaaatcgttggaatcggtggattggcacattgcggaatgcattctcttggaaaggtttgttttggagcattaaagccggaagagggaagcgttacggtggaagacggaacaatcattgacagtccggcaattgcaatgaagaaacgtgtgggttatgtatcgaaggacagagatgttgagtcgttatgtcttaatgcaagtattgaagataatatttcaattgcaggaatgagtgaatttgcgatcaataattttctgattctgaaaaatcgagaaaaaaaatatgtgaatcatcagattgaagaattgtccatcaaatgtgcgggaagagatcagtcagtatcacagctttccggaggaaataagcagaaggtcgtatttggaaaatggattggatgtggaagtgaaatccttattctggactgtccgacacgaggcgtggatatcggtgtaaaacaggcaatgtaccagcttatggtgagattgaaaaatgagggaaaatcaatccttatgatcagtgaggaattaccggaactgattggaatgagtgatcggattctaattatgaaaaatggtgaggtctctgcggaatttgagagaagcgaaactctttctgatgcacagattattgaatatatgatttaggaggcaaaaaagaatgacgaaaaataaaaaaatgatgataagtgcgttgccttttgtagcacttgtcgtattgcttgcagtattttgtggaattgtaagcagtaaaggatatcgtctggatatgtatattaagattgtatttaatgaagggattgtattatcaattgttgcaacaggtgcaatttttatttatacactgggttcatttgatatcagcctgggagccgcaacgctttttgcggccacgctgggagtacttacctataatgcaactgaaaattttgcgttgatgattatcgtgattttattagcaggaattgtttgctcactggtcaattcagtgcttgcgtccatatttcatattccggtgtttgttacaacggtagcaatgatgtccgtgttatccgcgattgcatcgcagattattacgacaaaaggtggtgcggttggtggaatcagtattccaagcgaggttgtaaaacatctggataactcggcatttaagattggagttctggtaatctgggttgcgatctgtgtatttgtttttgattatacaaagtttggaagaagagaaaaatttgtaggtggaaacccaatctgtgcgcagctttccggtattaaatataacacatatgcaatattgggcttccttttggcgggagtaggagtaggaatcggtgcatttatgacattggtatatacaccatctgttacaacaacgacagccggggatattggaatgaatattatggttgcaattgtatttggaggaatgccgatttcaggtggtgccagatcaaagatttacgcggcagttgttggaggattctcttatattgtattaaataatattttggatctgctcattgattctacatcgggatatggcattacgcagattgtaagtgcagtgttttttctgattatagtatatgttgcaagcgttaactatcgttcgcagactttaccgcgataaaacaagaatttaacacattgtgtgttaaagataaattttaaaagaaaacagggaggaagaaatttatgaaacgaacaatgaaaaaaatgttaagctttggtcttgttgcagctatgtctctgacaatgctggccggatgtggaaacagtaaggatgcaacaaatgatacaaatgtttcaaatggacaggaggaaaaaaagccgacaggagatgtcaagattggtgttctggttcaagatgtcagtggtgaggaagcattaggattccgttcttactatgagaattatattgcggatcagtatggtgtaacatttacttacacagacgaacttaaggatgctgcaagtgagaaatctgcaattgagaagtttgcttctcagggatatcaggcagtcatttctttttcaagcaatgatcgtgcattacagattgaaacatgtgaggaaaacaagatttattatgcagttgcagcaggaacacttgatcaggaacagtttgaaaaatataaaacagatgaatattttcttggacaggtgggtccgagtatggatacagagtatgaagctggtgtagaaatgggcaagttctttgcagataaaggcattaagactgctgcaatctatggcgcatttattccgaatccaatgcacgtatatcgtacagccggcgtacttgcaggacttggactttcttatggcggagcgacaactgaagaggatgtagttggtttgatttttgctgatcagggtatagatttgtcaaagatttcaggagatatcaagatcgtatcttatttacagggatatggtgatacaacaacagacgagatcaatgcagccattcaggcggctccggaagcattcatctctgtcggaatggcaacaacattctttacacagcagttgaatgcagcaggtattgagttttctgatattgattcctttaccaagagtaatggagaggcaatcacaaacggaaagcttgtatatcttgctggaaaatattcatcatcggtaggacctgcttttgcattagtgatgaatgcaatcaatgggaatgtaattcgtgatgcgcagggaaatgctgtgtcactcagccaaaattatcaggtagcaacagatagtgagacatttgataaattttacaagaatgataatggtgataacccgatttacagtagggatacattggatcaaattattggtgatacagttacttttgatactatcaatgaggtggttgcatctaattaacttgttttttattatttggtcgcggcttcttaaagaagccgcaccctctcccaatagatgaatttattactttcatctattgggagagggtatgaaaaattatcctgtaaaaagaaaggagaagataacatgaaaagtaaaaacagactttgtataaaaaatttagcaggagcacttgccataccggtactagtggctattttgttacagggtatttgtatggcaaaaggaaaaacaatgatcatgaatatgacaagctttgacaattttgttgtctatattgcaattgttatgatcacaactatcgctttgtccatcaatcttaacagtggacgttttgatttttctttgggatcaatggcattgctttcctctgtgattggtgcaaagattacatattcgtttttaggtggaggtcagggcagtgcaccgataatgctgatgcttactattttatttggtatgctgcttggactgatttccggtgttttgtatgtggttttacatttgccaccaattattacgtctcttggtgtaacactgatttatgaaggaattctttttacaattacagaaggtcgttacgttatgaaagaggtacagaattcatccatgactgcttttacaggaaactggctttatgcagcaattattattgtggcggtactggtaattattattggactctttgattatacaaaattcggatacgattataacgcacttaagaatggtcagaaggttgcagttaataccggaattaaagaaattccaaatgcaattgcctgttatgtgatctgcggtggcctgatgggaattgttggctttttaaacgcttccagaaatacaaccatcaatggaggtcagcttaactttggatctatcagtattatgtttactgcatttcttccaatgtttattggatcttatatcagcagatttaccaatgaaaagattggatttttacttgcagctttatgtatgtcaatgttgaattccacatttgcggtattctcaaatgaagtaaatgcatccatgcaggcaatcattaatgctttattgcttgtagtgttcctaatttatctgagtaacgaacatttattgattcgtgtgtttaccggaaaacgcaaataaattgcgtcaagtttttacaaaaaacctgacatgtagcgtcagtctttgctgaatgcaaccttaaataactgatgcttaacaaatggaggacagaaatatgatcaatttgacaaaggcacccttctttcttgtgaaagaggatatcgagtgggttgaaaatacaaaaaaagcaatgacgttagaagaaaaaatcggtcagttatttgtaccgatcggatattcaggagatgcagattatctggaacatgttatgctttcacaccatatcggtggaatcatgtatcggtgcggtgaggctaaggagatgcagagaacacatcgttatcttcaggaacatagtaaaattccacttttggtcggagctaatcttgaggatggtggatgtggaattgcaacggatggaacacagtacggaaaacagatgcagatagctgcaaccggagataccgaggacgcctatcgtttaggaaaagtaagttgcagcgagggggcagcggtgggatgtaactgggcgtttgcaccagtggttgatattgatagaaactggagaaatccgattactaatgtgcgtacatatggtgacgatccggatcgggtcttagcatgtggtgttaattatataaaggctgcaaaagaagaaaatgtacttgttgcaattaaacattttccgggagatggctgcgatgaggtggatcagcatattcttaccagtgtgaacagtctctcctgtgaggagtgggatgcaacctacggaaagatttacagcggactgattcaggcgggagcgcagacggtgatggtcggtcatattgcacagccggcataccagaaagcttataatccggattttccggacaagttagttcctgcaacactttctccggaactgttaaaaggcttgcttcgtaaaaagcttggatttaacggattgattgttaccgattctacctgcatggttggttttagctgtgcaatggaaagagagaaggcggtgccttatgcaattgaagccggatgtgatatgttcctctttaataaagatctggacgaagattatcggtatatgttaaacggatacaggcagggaattctgtcggagcagcgtttggacgaggcaatcacaagaattcttgcaactaaggctgcgctgggtctttataagaaagcaaagagtgagattgtgccgacggaagaagcacttcgtgtgatgcgttcggacgaacatgtcacatgggcgaaagaaagtgccaatgctgcggttacgctggttaaggatacacagaagatcttgccgctgagtccgcggaaaacgaagaaagtactgcttgagattatgggagatttcccttcaaatgagagagtgttggagagttttcgaagcaaactggtaaaagaaggctttgatgtaacgatatatgaaccggagaatttcgagactgcaaaatttgatgtcgggacgtttaagaaaagttatgatctcgttatctatataggaaatgttgagaatgcttccaataaagtgaccaatcgtctttcctggtacacattctggggaaacggaaacaatgttccgtggtttgttgcggaacgtccggtgatgttcatcagcctcgcaaatccgtatcatctgatagatgtgccgatgatcaaaacctatatcaacggatattctaacagtgagtatgtgatagaaagcgttgtggaaaaaatcatgggaagaagtgcatttactggtaagaatccagtagacccgttctgtggaaaagagtacttgaagtggtaagagtgagagaaaaaagttatggtgaaaaatttaaaattgttggataaagcgttgcagctgttaccggaagtaaaagaaacggtggttgaacctctggatatagcagcttttttaaagcctcttaaaaagggagattcagttgaaattgattttggtcgacatcttgtggggcacataaaattaaagttggggtatgttcgttcacatccggatgctccggtatggcttcgtttctcgtttgcagaaaataaaaaggaattcgaggaacgggtggaagattatcagggctggatctgttcggcatgggtgcagcaggaacaggtgcatattgatcttgtcccgggagaatattttctgcccagaagatattcgtttcgttacgtgaaaatcgaagtgcttgatgtcagctctaaatttgacctgattattgaagaggcaaaagcggttgcgttgtcttcagcagatgatagccgtttatccgcatatcatagcgagaataaggaattggaacagcttgatcgcattgcctgtaatacgctgcatgattgtatgcagaaggtatttgaggatggaccaaaacgtgaccagagactctggatgggagatcttcgtctgcaggcacttgccaattacgagacttatcagatgaatgatatggtaaaaggatgtctgtatctgtttggggccttaccgatggaaaacggtcaggttggagcctgtgtattcttagagccggagccggaagtggatgatacgagtatgtttgattattcacttctgtatgttgttgctttgtgggattattataagcagacaaaagacaaggaggcgcttcgtgacttgtgggagactgcaagaacacagatttcgttggcgcagaaacgagtggataacggcattgtaagagaccgtgatgtgttaggatggtgttttcttgactggtcgctagaattaaataagcaggcgggagcacagggggttttactgtatgcgatgcagagtgcgattgcaattgcacaggaattaagagaaaatcgtgatgcagaatgcttaaaaggaacttatgaagtctatcgaaaggcagcaaaagcatatttttacgatgaaaagaaaggactttttgtcagcggagaaaatagacagatttcttatgcaagtcaggtctggctgattcttggcggtgtagtcgattccgaagaaggtcttcggattttacataatgttgcagcagatagggaggctcttgagatggtgactccgtatatgtatcactactatattgaagcattgttaaaatgcaacgcggatgaggaagcacttgctgttttgacagagtattggggtggtatggcgcggcttggtgcagatacattctgggagctgtataatccgaagaatccggatgaatccccgtacggcggaactattgtcaatagttattgtcatgcatggagctgtgcaccggcctatttcttgcgtaaatattttggagaaaattaaataggaggaactatttatgaaaaaaattgggagcaaagtgcttttaatgatggttctgtttgttgttatatttggactaaatacgataacttctgtaagatcacaaaatcgtgtaaaacggtctggattagaaatcacggagcagtatattccaattcagacagaaatatttacgattcaaaaaagtatggaacgaggtcagaaataccttaatattattagtttgtatgataatgcagaacttcgtcaacagcttgaaggttcattggcagaggaagtgtcaactattactgagagcgagaagaagatagatgtgtatctaaaagataataacaatacaaagttaaaagatgcaattaagaaatatgaagaattccttgataaagtgctcttgcaattttcaacaatacaggaatatgtagatacgggggattttgcgcaggcaagtatagcacttggatccgatttccaaaatcttgttagagatatgggagagaaaacggaaacgaatctcacggaaaatctggaaggtggaatttctgaacagtcaaagttgtataatcaggcagttgatatgaatattcaagtgacgaaaatattatttgttatatttataatggtgtcggtagtggttcttttgattatgaggagaacagtaagcaaaccggcaagtgcagccagttgtcagttagatcatattattgatgatattaacaagaaaaaaggagatcttacaaaacgcattacagtccgttcacatgatgaaatcggtcaattgtcagaaggtattaataattttattattcaattacagatggttattcgtaaagttcaccaccaatcggagtcaatgcagaattctcttggggtgatgaatacagaagtgaacagttccagcgaaaatgtaaattatattgctacgacgatggaagaaattacggcaagtatggaagaaatagcatcttcaattgaagggcttatgaagaatacacatgagatattggagtttgttaataatgtaggtgatcagacgaaggaatgtgtttccatttcttccgatattaaagctttggcaattggcgtaaaagaagaaactgaaaagaagaaaaatgaaatttcaaatcttattaatgaaaaacagaatgctttattttcttcgatagaggcgagcaggcagattacaaatataaataatttaaccaatgatattcttgatattgcaagtcagacaaatcttctggctttaaatgcatctattgaagctgcgcgtgccggagaagtagggaaaggttttgctgttgtggctgaagaaattcgacaattggctgaaaacagtaaaaatactgcaaatgatattcagagtattagtgtagaagtgatatcggcagtaaatcaacttatggagaatgcacaaaatcttatgtactttgtacaaaatcggattatgagtgattacgttggatttgaaggtgctacggatacgtattatgagaaggcagagcatatggattctgttatggctgtttttaacgataatatttcggcattacataaggttatggctgagatgaataatggaatcaccaacatatcaacggttgtggaagaaaatgcacagggaattagcagtgcaacagaaaatgtgtctgatcttgcaaattctatcacgaacattcgacaacaagcaacggaaaacgttgactcttcaaaacatcttatggaagaaatgaatcgttttcagaaaatttaggatcagattcagggaaagatgggaaacatgagaaaaaaaattgcgtttcttgcaggtgcaatcagttttgataatcagaatcgtgtgatcgacggtgtattaagacgtgctgcggaattcgatacggatgtatttatttttacatgctttgtgaactatgatgagtcggaagaaaacaaagtcggagcatttcaaattatggaacttccggatcttactacctacgatggtgtgatcgttatgaaaaattcaatacaatatgaaccggcttccaactcgttgatgaaccggataaaagagagcaggattccagcggtaagtgttgatgaatatattgatggaatgcataatgtcggaatatcggattacaatagccagaaacgtattgtagaacatctgataaagaaacatcatctgacaaaaatcaattatgtgtgcggtattctacagggcaaagaaggaatggaacgttatcgggcatatagggatgctatggaagagcatggcattcctgtttgtgattgtcaggtttactgcggaaattataatcgtgaaagcggaagaaaagccatcgaatattttatgaaaaaccagacgccgcaggcaattgtatttgcaaatgatgcgatggcgatcggcggaatggagcgcttgcagcagtatggttatgaaatcccaaaagatatcgtagtaaccggttttgacaatgatgagctgtccgcattttatattccgtctttgacgaccgttgatcgcagacaggaaatgctcggggaaaaggcggtcgatctgctttttgatgcacaaagtcatacatctgtgaaattggaaacccagattctgtatcgggaaagctgcggatgtaactgccagacaccaaagtcgatccgggatcttcgagtggaatatcagaaccaatgcttaagctatgaggaggcactagatgcgttaaaaagtatggaactcgatctgaccgggcttgagagtgtggaagaattgtgttcgcggttaaaaaaatatgttatccgatcagatatgaaagagttttatctttgcctgtgtgatgaaaaaaagttgtttgcgtatgatgacataaaaactaatatcagagaacaagcgatttgtgagcactatacccaaaaggttcatataccgcttgcctatcatgatagaaagtttgactcctatggaaaatttccgtcaaaggaaattttgccttatgaaatgagaaataaattacagaaaacattctacatagtgacaccaatttattatcaaaaaatatgttatggatattgtgtctcggatggaagtgtctttgcgttaaaaagtgagcttgcatatttatggacggttaatatcggtatggcactcgaaaatattcgcaaatggaaatggatcaatcagatgaatgagaagatcaaccgtatgtggaagtatgacatgctgacacaggtgttcaatcggagtggctttttttattccgcaaatgcggttgttgaacggattaaaggacaacatcggcgggcatttatgatttttttagatattgacggtctaaagagtgtcaatgatgggttagggcataaggtcggcgatgctttcatacgcgagatggcagatgtgataaaggcatcagttccgaaggattgtctggtaatgcgttatggaggtgatgaatttgtggtgtttgggagttgtacgaatgccaagcggatgcagatgatcgtaagtaagataaaaaatacaatggaaaaagaaaatcaaaacgagaagagaatctaccaattgtctgccagtatcggatgttccgtacatgcatctgacgagattgatgatttaaatcagttgatcgaatcggcggacaagcgcatgtatgaagaaaagaaagaaaaacatatgagaagataataaaggctattcagaaaataaggacagttttttagtctaatcagaggctaaaaagctgtccttatttttgttatctttttggtgtatcagataagagaaaaagggggcagacaatggaaaacagatattatctggcgattgatatcggagcgtcgagtggacgccatattcttgcgcataagaaagacgggcgaattgtcttagaggagatctatcgatttccaaacggaatgcaggaacataacggacataaagtgtggaatgtggatcagcttttttgggaaattcaaaccggaatgaagaaatgtgcggatataggaaagattccgtatagtatgggaatcgatacctgggctgtagattttgtattgttggatgatcagggacaaagaattggtgatgccgtggcatatcgtgatgcgagaacggatgggatggacaagcaggtatatgagattatttcggaaaatgatttgtatgaaattacgggtattcaaaagcagaagtttaatacgatctatcagctaatggcgcttaagcagcagaatccggaaagcctggatagggcacaaagtatgcttatgattccggattattttaactttcttttgacgggaaataagttacaggaatatacgaacgcgacaacaacacagctggttgatccgaaagccaatgactggaactgggcattgattgatcggctgggatatccgagaaccctctttcagacaattatgatggcgggaagcattgtcggaaacttggcggattctattcagaaacaggtaggttttgaatgcaaagtagtcttgccggcaacgcatgatacagcttctgcagtgatggcagttccatccaaagaggaacagccactttatatcagttccggaacatggtcattgatgggaaccgaattgaaagaagctgcctgtgatgagcaaagcagaaagcataacatgacgaatgagggcggatacgattatcgcttccgctatcttaagaatattatgggactctggatgatccagtcggtgcgaaaggagatagccccggaacttggttttggagagatcagcgaacttgcgtcaaagcagacgattccttcttttgttgatgccaacgatccgagatttcttgcgccggagcatatgacgagcgaggtgcagaaagcctgtaaagagagtggacagcaggtgccacagggcattgcggaagttgcctgtgtgatctacaacagtctcgcaaaatgctatgccgatacagcaaaggagattgagaaactgaccggaaaaacatacgactgtattcagatcgttggtggcggtgccaatgcggattatctgaacaaactgaccgcatttttcacgaagaagacaatctatgcaggaccgacggaagcgactgcgatcggtaatctctgtgcgcagatgatcgcagcgggagaattagaaaacttaaaggaggcaagacaatgtgtttatgcttccttcccaattcataaatacgaaaagtaaaggagaagagacatgacaaattacgaagcagcaagagaaaaatatgcagcactcggtgtggataccgacaaggcgatcgagacattaaagaaagttccggtatcgcttcactgctggcagctggatgatgtgatcggttttgacaatgacggaggacttactggaggcattcaaacgaccggtaattatatgggccgtgctagaacgccggaacagttgatggcagatatggaagaagcgatgagactgatgccgggaaccgcaaaattaaacatacatgcatcttatgcaatctttgcaccgggggaatttgcagacagagatgcgcttgaaccaaagcattttgctaaatgggtagaatttgccaagaagcatcatatgggtatcgattttaatccgacctttttctcacacgagaaagtaaaggacggtcagacactttcgagtccggacgaggagacaagacgtttctggatcaatcacggaaaggcatgcatccgcatctcggaatattttgcaaaagagaccggaatgccttgcgttatgaacatctggaccggtgatggatttaaagatgttccggcagaccgtatgggacctcgtatgcgatacaaggattccatcgagcagatcttatcggagccatacgatcataacctcgtaaagccttgtgtggagtcaaaagttttcggtataggtgtggagtcttacacagtcggatcggctgagtttacacttagttttgctgctttacatgacggctgtatgccacttatggacaacggacattatcatccactggagtatgtatctgacaagattccggcaatgctctgcttttatccggaatttgcattgcatatcacaagaggtgtgcgctgggattccgatcatgtgctgattcttgatgatgagacgaaggagatggcaaaagaaattgtaagagataatgcgcttgaccgtgtctatatggctttggactattttgatgcaagtatcaaccgtgtttcggcacttgcaacaggatttcgaagctggcagaaagcccttcttatagctttatgtacaccgaatgcaatgctcaaagcgcttcaggatacgaatcagatgagcaaacttatggttatgaatgaggcggtgaagatgttgccgatcggtgagatatgggatgagtacttaagacgtgagggcgtcgttgatgatcttcatttctatgatgaaatcgaaaagtatgagaacgaagtattggaaaagagaaattaaaaaagaatagaaaagaggaattataattatgaattttttagatgcagaatttgtacaggaatttatccgcatggcgaatgacggatgggagcagggatggcatgagagaaatggtggaaacctttcttatcgtgtaaaaccggaagaagtagaattgataaaagagaattttaaggcgaaggaatggcagccaattggcacaagtgtaccgaatcttgccggcgagttttttctggttacgggaagcggtaagtatttccgcaatgtgatcattaagccggaagattccatctgcatgattgaactggacgaaaaaggtgaaaattaccgtattgtctgggggctggtcaatggaggcagaccgacttccgagcttccgagtcatttgatgaatctcgaagtaaaaaaacttcaaaatccaaattaccgtgtggtctatcatgcacataccaccaatattattgcactcacatttgtacttccactcgaagataaagtgtttacgagagaactgtgggagatggcaacggagtgtccggttgtttttccggacggtgtcggtgttgttccgtggatggttccgggaggaagagagatcgcggttgcaacaagtgaactgatgaaaaagtatgatctggccatttgggcacatcacggaatgttcgcagcaggcgaagattttgatctgacattcggtctgatgcacaccgctgagaaatcggcagaaattcttgtgaagatgttatccatgagaccggataagcttcagacgatcactccggacaatttccgggatctggcaaaagattttaacgttacattgccggaagaatttctttacgaaaaataaacaagaaaaaattggcagtgaagctgttgcatcgtagcctcactgccaatttttattgtgattaaacgttattgtctgtaaaaatcaataatccggtcaagtcttgcggtcatgttggaaaggagcgcatctaaaatcgtgatagctgtcattgcctcaacaacgaccactgcacgcggaacgataatcggatcgtgtcgtcctttgatgctgatctcaatttcttttccgtctttgttgacggtctgctgtgttgctgcaatggacggtgtcggtttgacggctgcacggaaaaataacagcgagccatcgctcatgccaccgagcgtgccaccggaataattggttctcttggagatatgtccattctccatgcaaaatgcatcgttgttggttagtccggtagcggtagctgcaccaaatccggctccgatttcaaagccttttacggcaccgatcgagaggattgcttttgccagattcgcatcaagtttttcaaaaacgggatcaccgagtccgacgggaagcccaaaaatctgacattcgatgatgccaccgctggagttttgttcctgtaaacatttttcgagatatgcgctggcttttgctgcggctgttgcatccggcatatacagcttgttttttgaaatttctgcgggatcaaaccgggcaggatcaatggacaccggaccgattgcctgactgtaggcaagtatggagatgtccatctgctctaaaattttgatcgcaattgcaccgccggcaacgcgtccgatcgtttcgcgccccgaggagcgtccgccgccgcggtaatcacgaaatccgtatttttcatcaaaacagaaatcggcatgtcccggccggtagtaggaggcaatttcactgtaatccgcagagtgctggtccttgttccagaccatcatggaaatcggggtaccggttgtttttccctcaaagacaccggataagatttctaccgtgtcactttccctgcgctgtgtggtaaatttggactggccgggtttacgccggtctaaaaatttctggatatcttcttcacagaggctgagtccggcaggacagccatccacaacaacaccgatgcctttgccgtgggattccccccatgtggtgatacgaaataaattgccaaatgatgagcctgccataaatgcctccttaaaaacgttaatattctaagagatattataaaaaacatcgcattgaatagtcaagagagatatggtaatatttaaaggaaataaacataaaaaagagagagggaacatatggaatttaacgcagtatatcatcaggcgagtgacaattactgttatccgctgaatgaggatgagctgattatcaatataaaaacgggctacgatgtaaaatcggtatccattatactcggagatccgtttgccgcgggaatattaggcggtggggagcactgggatggaaaaaaggagccgatcatatataaaaagcggttaaaaaatcagatctggtggaccacaaccgtgcgtccggagtacaagcgtctgaagtattattttgaacttcagacagaggaggaaagctggttttattttgaagacgggtttgtcagcagcgaacagatgcatctggagggcagaagccgtcagtgctttgttttcccgtggatgaatccctgtgatgtaccgcgtaccccggcatgggtcaatgataccgtatggtatcagattttcccggatcgtttctgcaacggagatccttccaatgatcctgagaatgtggttttgtggagagagcatggaagcgtgaccaatgaggaatgtttcggaggagatctggcggggattacagacaagctggattatctgcagaatctgggaatcaacggtctgtatctgacaccgatcaacgaagctccgtcaaatcacaaatacgataccacggattatacgaagattgatccgcgttttggcgatgaggaaacctttaaacaccttgtgaaggaagcgcataagcggggcatccgtgtaatgcttgacggtgtgttcaatcattccggatattatttcgcaccgtggcaggatgtgcttgcaaagggaccagagtcggaatattatgactggtttatgatcaatgaatggccgtttgataaaaacgggcaggcggcaaagaagaaacagtattatacgtttgccttttttgattccatgccaaagatcaatacaaacaatccgaaagtacgcaaatattttgtagatatttgtgccaactgggtggaaaattacggaatcgatggaatccgtctggatgtggcaaatgaagtttcccacaggttctgcaaagaactgcatgcgcgggtcaaggagatcaacccggatatctatattctcggagaaatctggcacaacgcgcttccgtggctgcgcggagatgagtttgatgcggtaatgaattatccgcttggacaaagtatcaaggatttctggattgataagagcctgacgaatgaagattttgagtatacaatcaaccgctgctatacaagctatatgcagcagaccaatgatgtgctgtttaatctgctcgattcgcatgataccaagcggcttcgctcggatgtgaagaatctggatgaatattttgcacagattgctgtgctttttgcaatgccgggaagtccgtgcatttactacggaacagaaattgccatggaaggaagctatgatccggactgccgcagatgtatgccgtggtcggatattgaggccggaaagtatgcagagcgcagcaggatcatatctacactgattcatctgcgccggcaggaaccgctcttaaaaagccgtaattttcattttccgaatgattatgcagcgtacaggcgtgtgatccagtttcagaaagtggattttccggattgttatgtggaagtgctgattaactgctgtgaggaagatgtcgaggtagtgccgcagggagaaattctgcttgaacgacattacatagattccacacttttgtccaacggtattttgatccgcagaattcgaaagtaaataaaaagaaagaggaataacagaaaatggctacatatgagttgttaaaacaggaaggcagtgcgaaacgtgcggtgtttcatacggtgcacggagatatccagacgccggtgtttatgaatgtgggaacggtggccgcaatcaagggtgctgtttcaacaatggatctcaaagagatcaaatgtcaggtggaactgtccaatacctatcatctgcatgtgcgtccaggagacaagctgatcaaagaaatgggtggactgcataagtttatggtctgggatcgtccgattctgacagattccggtggatttcaggtgttttccctggcaggactccgaaaaattaaggaggagggtgtatatttccattcccatgtagatggcgcaaagatttttatgggaccggaagagagcatgcagatccagtcaaacctcggatcgacgattgccatggcatttgacgagtgtccatcgagtgtggcagagcgcagatatgtcgaagattctgttgcgcgtacgacccgctggctggagcggtgcaaaaaagaaatgcagcgtctgaacagtctggaagatacgattaataaagagcagctgttgtttggaattaaccagggagcaattttttcggatatccggacggaccatgcaaagagaatttcggaactggatctggatgggtatgcaattggcggacttgcagtgggagaaacccatgaacagatgtatcagatcatagaggagaccgttccgtatcttccgaaaaacaagccgacgtatctgatgggcgtgggaacacctgccaatattctcgagggggtagagcgcggaatcgatttctttgactgtgtatatccgagcagaaacggacgccacggacatgtatataccaacgaaggaaagttgaatctgtttaaccagaaatacgaaaaagacatgcgtccgattgaggagggctgccagtgtccggcatgccggcactacagcagagcctatatccggcatctgttaaaagcaaaggaaatgcttggcatgcgcctgtgtgttcttcataacctgtatttttacaataccatgatggaagagatccgggatgctctcgatgccggaaattttgcttcctacaaagaagaaaaactgtaccggatgggacagtcaagtataaaaaatgtctaaaaaagccaaaaaggcttgcccaaagaacggaagttgtgtagaatgggttttagtatttgaatataggaggaaacattgatgagcgcaattttagcaaatagcagcgcttccgcttccggcggaatgggcatgtttggtatgattatctggctggtagtaatcttcggatttatgtattttctgatgattcgtccacagaagaaggagcagaagaaaaaagacctgatgctttctgaagtagctgtgggagacaccgttcttactacatccggtttctatggaacaattattgatattgtagatgataccgttatcgtagagttcggaaacaacaaaaactgtcgtattccaatgcagaaagctgcaattgcagacgtagaaaaagcagaatctgcatcataaagaacatgagagagggtgtcgcatttgcggcacctttttgcattcctttttcaattcagaataataaaaaagatctattataatctcagattatattatttatgaaaaagtaaaatggatttttagttgaaaagaaggccctgttgctatatattaataggtaatagactttgaaacagcagagtagaaaagaggaaaagcaatggaatgtcaaattggtgtgatctcgggagacggtattggaccggagatcgttacagaggcaaaaaaagtattagaccagattgggaaaaaatatggtcatttatttcactatacggatatcctgatggggggatgctcgattgatgcaaccggagttcctttgaccgatgatgcgattgcggcagcaaaagcaagtgatgcggtactgatgggatctatcggaggaaatacttccacatccccgtggtatcaattagcaccggagcttcgtccggaggcaggacttttaaagctgcgtaaatcgctcaatctgtttgcaaaccttcgcccggcatatttatatgaagaattaaaggctgcatgtccactgcgtgatgatattattggaacaggatttgatatgatgattatgcgtgagctgacaggcggtttgtatttcggagcgcgaaagacagaggaagtagatggcgtgacaacagcaaccgatacacttacctacaatgaaaatgagatccgcagaattgcaaagcgaggctttgacattgcaatgaagcgccgcaaaaaggtaacttccgtggataaggcaaatgttctggattcttcccggctctggagaaaaatcgtagaagaagttgcaaaagattatccggaagtaacgtatgagcatatgcttgtcgataactgtgcaatgcagcttgtgaaagatccaaaacagtttgacgtgattctgacggagaatatgtttggagatattttatccgatgaggcttccatggtgaccggttccatcggtatgttatcatccgcaagtttgaatgataccaaattcggtttatatgagccgagtggcgggtctgcaccggatattgccggaaaaggcattgccaacccgattgcaaccattttaagtgcagccatgatgcttcgctatacgtttgatctggataaagaggctgatgcgattgagaatgccgtgaaacaggtattaaaagaaggatatcgtaccattgatatcatgccgcaggcaggagagagcacagaagggattaaacaggttggtacagcaaagatgggcaacctgatcgcagagagagtttaaggagaacataatatgataagtgataacgcaaggagcggtatgcagcaggctccggcgcgcagtcttttcaatgcgctcggatttaccgcagaagaattaaaaaaaccaatggtcggaattgtaagttcctacaatgaaattgttccgggccatatgaatattgataaaattgtaaacgccgtaaaactcggcgttgcggaagcaggtggcgtaccggttgtatttccggcaatcgcggtatgtgatggtattgccatgggacatgtcggcatgaaatattctctggttaccagagacctgattgcagattccacggagtgtatggctatcgcccatcagtttgatgcactggttatggtgccaaactgtgataagaatgtaccggggcttctgatggcagctgcccgtctgaatcttccgaccgtatttgtatccggcggaccgatgcttgccggacatgtgcagggaaagaagagaagtctttcttccatgtttgaggcagtcggatcttacgcagcaggaaccatgacagaggatgatgtgcttgaatatgagaataaagtctgcccgacctgtgggtcctgctccggcatgtataccgcaaactctatgaactgtctgaccgaagctcttggtatgggacttcgcggaaacggaacgattccggctgtttactcggaacgtatcaaacttgcaaaacatgcaggtatggcagttatggatatgttccgcaagaatatctgcgcgcgtgatattattacaaaagagtccatcttaaatgcactgacagtagatatggcactaggatgttccacaaactccatgctgcatctgccggcgatcgcgcatgagattggttttgattttgatatcagctttgcaaacccgatcagcgaaaagacaccaaacctctgccatctggcaccggctggtcctacttatatggaggatctcaatgaagccggcggtgtatatgcagtgatgaaagaactggcagatatcggtctgttacataccgattgtatgaccgtaaccggaaagacgatcggagagaacattgcaaacgcagtgaaccgcaatccggaagtcatccgtccggttgatcatccatattccaagaccggtggtctggctgttctgaaaggaaatctggcaccggatggttcggtggttaagcgttctgctgttgtcgatgagatgatggttcatgaaggaccggcaagagtctttgagtgtgaggaagatgctatcgcagcgatcaagggcggcaagattgtagagggtgatgtcgttgtcatccgctatgagggaccgaagggcggacctggtatgagagaaatgttaaatccgacttctgcgattgccggtatggggcttggcagttccgttgccctgattaccgacggacgtttttccggtgcatccagaggcgcatccatcggacatgtttctccagaagcagcagttgggggaccgattgctctggtagaagagggcgatatcataaagatcaatatcccggagatgacattgaacgtagatgtttcggatgaagagatggccgcacgacgtgcaaaatggcagccgagagagccgaaggttaccaccggatatcttaagagatattctgcactggttacttccggaaaccgtggagctgtcttggaagtgccagaagagaaataaaggatagagggttagaaaatgcagttgacaggatcacaggtgattatagaatgcctgaaagaacagggtgtagataccgtttttggatatccgggcggtgcaatcctgaacgtttatgatgaattatacaaacatccggaaatccggcatgtacttacatcgcatgagcagggggcttcccatgcagcagacggatatgccagaagtacaggaaaagtcggagtctgtatggcaacaagcggaccgggagccaccaatctggtgaccggtatcgcaactgcgtatatggattccattccgatcgtggcaatcacctgcaatgttggggtatcactccttggaaaagacagttttcaggaaattgatattgctggtatcacaacaccgattacaaaatacagttttattgtaaaagatgtaacaaaacttgccgatacgattcgcagagctttttccattgcgcggaaaggacgtccgggtccggttctggtagatatcaccaaggatgtgactgccaacaaaacagagtatataaagaaagagccaaaaatgccgcagccggattgttcggcattcaatgaggatgatttaaagaaagccatccagatgattgaaaaggcaaagaagccgtacatatttgtcggaggaggagcaatcctttccggagccagtgaagtattaaagacatttgtagaaaaaacagatgcaccggtctgcgacacactgatgggaaaaggtgcatatgatggaacatcagaaaactataccggaatgcttggaatgcacggaacaaagacgtccaatctcggtgtcagtgaatgtgatcttctgatcgcagttggtgttcgtttttctgaccgtgtacttggaaatccaaagaaatttgcaaaacaggcaaagattctgcagattgatattgatccggtagaaatcaataaaaatattatcgtaaatcacagcattatcggggatgtggcaatcgtcctcggaaagctgaatgaaaaacttgagcagcagaaacataccgagtggctttcccatattgcggattatcagaagatgtatcctatgaccattccaaaggaagggttaagtggtccgtttatgatcgcaaagatctatgagatggcaaaagatgccattatggtcacggaagtcggtcagcatcagatgtgggctgcacagtattttaaatacagtaaaccaagaaccctgctgacatccggaggtcttggtacgatggggtatggtcttggcgctgcaattggtgcacagactgcaaatccggataagcaggtgatcaatattgcgggagacggatgtttccgcatgaatatgaatgaacttgcaacagcatccagacaaaagcttccgttgattgaagtgattgtcaataaccatgtactcggaatggtccgccagtggcagacacttttctataaacagcattattccgcaacggttttagatgacggtgtggactacgtaaagattgcagaggcgatgggcgcagctgcccggcgtgtgacaacacaggaagagtttaacgcagcttttcaggaagcattggaaagtaagacgccgtttgtaattgacgcaattgtggattcggatgacaaggtatggccgatggttgcaccgggggctccgatcaatgaatgtttcgatggaaaagatttcgagagcaagaataaataagcaacagcatagtaaaatataggaggaagtttgaaatgagcagagtatacaatttctcagcaggaccggcagtattgccggaggaggtactgcaggaagcagcagatgaaatgttggattacagaggatgcggcatgtccgttatggaaatgagccacagatccaaagtgttcgatgacatcatcaaggatgcagaaaaagatttaagagagctgatgaacattccagataattataaggtattgttcttacagggtggagcatcccagcagtttgcagcagttcctatgaacctgatgaagaataagaaagccggatacattgtcacaggacagtgggcaaagaaggcttatcaggaagcacagatgtacggagaggcaattgagcttgcatcctctgcagatcagacattctcttatattccggattgttccgatctggatattccggatgatctggattacgtttatatctgtgagaacaacaccatttacggaaccaaatacaagaagcttccaaacacaaagggaaagacactggtagcagatgtatcttcctgcttcttatctgagcctgtagatgtgacaaagtatggcgtaatctatggtggcgtacagaagaatatcggaccggcaggtgttgtaatcgtaattgcacgggaagacctgattacagatgatgtacttcctggcacaccaaccatgctcaagtggaagacacaggcagacaaagacagcctgtacaacacaccgccatgctacggcatttatatctgcggtaaagtctttaagtggctgaaaaagatgggcggcttagaggaaatgcagagacgcaacattgaaaaagcaaagatcctttatgatttcctggatgagagcaaactgttcaagggaactgtcagaaaagaagaccgttcactgatgaatgtaccgttcgtaaccggagacaaggatatggatgcgaaattcgtaaaagaggcaaccgaggctggcttcgtaaacctgaaaggacatcgtaccgttggcggtatgcgtgcatccatttacaacgcaatgccaaaagagggcgtagaaaagcttgttgcgttcatgaagaaatttgagaaggagaatgcataaaatgtttaattatacatgcttaaatcctatcgctggggtaggtctggatttattttctgatgattacaaaaaagtagacgatctggcaggcgctgatgcagcacttgtccgcagtgcggcaatgcacgatctggatcttccggattcactgcttgcagttgcccgtgccggtgcaggtgtcaacaatattccgcttgacaaatgtgctgacaaaggtatcgttgtatttaatacaccgggtgcaaatgccaatggtgtaaaagaacttgtttttgcaggaatgttatatgcatcccgcgatattgtcggtggtattgactggtgtctggcaaaccagaacgatgataacattgcaaaaactgcagagaaacagaagaagaactttgcaggaacagagatttccggaaagaaattaggtgtcatcggacttggagccatcggtgtgctcgtagcaaatgccgcaacccatatgggtatggaagtatatggatatgatccatatatttctgtcaatgctgcatggaacttatccagaagcgtaaagcatatcagcaatgtagaagatatttacaaagagtgcgattacattacgatccatgtacctcttttggattctaccagaaagatgattgatgccaatgcgatcgcaatgatgaagcctaccgcaattgtattaaattttgcaagagatctgctggtagacgaagaggcaatggttgatgcgctggctgcaggaaagattaagaaatatgtttctgatttcccgaatactacaaccgttggggcaaagggatgtattgtcactccacatcttggagcatctacagcagagtctgaagacaactgcgcaattatggctgtccgtgagattcgtgactacatggagaatggtaatattacccattctgtcaattatccggactgcaacatgggagcatgtaccacagccggacgtgttgcaattctgcacaagaatgtcaagggtatgatcggccagtatacgaccgttcttggagaggcagatatcaatgtgtcagatatgacaaataaggcaaagggtgactatgcatatgcactgatcgatgtggattcccaaattaccgatgatgtgctgaaaaaactgcaggcaattgacgatgtattgcgtgtacgccttgtaaaataacggaaaagataagcattttgctgtatggcggttcgaaagaaccgccatattttttcttgtataaacgtattttttccattatactagaaaggtatagaaaccagcacaatttatggaggataatatggcagacataaaaccatttgtatgtgtcagaccggtagaagatgtagtatctgcagtggctgcattaccatatgatgtatataacagagaagaagcaaaagaagttgtggcaaaaaatccaaagtcatttctggcaattgaccgtgcggagacacagtttccggatgatgtggatacctatgatgacagagtatatgccaaagcggcacagatgttaaaagactggatcgctgacggcacatttattcgggataacagggaatgttattacatatatgaactgacgatggatggaagaacacagaccggcattgcggcatgtgcatccattgatgattatgcgaatcaggtcatcaaaaaacatgagaatacccgtgcggataaggaacaggatcgtatccgtcacgtagatacgtgcagtgcacagaccggaccgatttttctggcataccgtgccaatgccgtgatcaatgaggttgtggcaaagacaaagaaacaggatgccttatatgattttgttgcggaagatggtattcgccaccgtgtttttgtaatatccgatccggaagatatcaaaacgatccggaatgcatttgcacagattggggaaatctatattgcagacggacatcacagagctgcttctgcggtaaaagtcggatttaagcggagagaagaacatccgggatataccggaaaagaagaatttaattatttcctttccgttttattcccggatgaggaactgatgatcatggattacaaccgtgtggtacgggatctgggcggtatgaccgaagaggcatttttatcaaaaatgcaggaactctttgatgtgcagaaaatcgaaaatggaaacgatgtacgaccggtgaaaaagggacagttttccatgtttctttctgataaatggtatcgttgtaccatgcgtccggagtcggttccggaggatccggtagaaggactggatgtatcggtattacagaatgtacttttggcaccggtacttggaatcggtgatccaaagacagataaaagaattgattttgtcggcggaatccgtggcatgaaagagttagaaagaagatgccatgaggactgccaggttgcatttgccatgtatccgacatccattcaggagttatttgctgtggcagatgcgggacgtctcatgccgccgaaatctacctggtttgagccgaaactccgcagtggattattcatccatgagatttaaagaatggcattataggacataaatggagaaatacattgggaattttaataacagaccaactgacacagcttagcaccgagagtgaagtgttaaatgaagtggcgaaaaatccgggaattctccggaaatatttacaggatctgacaccatctctgctggggtttctcgttcagctgatgattgcagtgattattcttctggtaggcagccggatgatcaaaatgctggtgaaaatggtgcgccgtttcttagagcgcggaaaagtagaagccggtgtggtttcctttctgagttcttttgtgaaatatgcgctctattttgtgctggcaatgattattctggggcagtttggcgtgacgacaagctctgtgattgccgtgctggggtccgcaggacttaccatgggactggcactgcagggaagcctttctaattttgccggtggtgttctgattttgttgctgaaaccatttgtggtaggcgattatatattggataatgcttcatcggaagaaggaactgtaaaggagattaccattttttacaccaagctgcttaccattgataacaaactgatcctgattccgaatggaagtctgtccaacagcagtattaccaattacagccatatggatatgcgacggattgatctgaccgtcggggttggctatgcatcggatttatcaaaggttaaagcagtgcttgagggtgtggtaaagacagaaaccgcagtgataaaggatgaaccggtcgatatttttgtatcggatctgggagatagtgccgtagatatgggcattcgcgtatgggtaaaaacagaagattactggccggtgcggtggcgtttgctggagcagatgaaaaatgcactggatgaaaatggaatttcgattccattcccacagatggatgtatcgattcggaaagagtaaaactattccgttgaaataaaaatggaaggatgagaaatatggataaattgaaattgtcagcatatgaaataatagaagtaagaaagattgcggatattgaatccatgggatatattctgcgacataaaaaaagcggagcacgcgtgtgtgtcatttccaatgaagatgacaataaggtgttttcgatcggatttcggacacccccggaagatgagacaggagttccgcatattatcgagcataccacgctttgcggatcggataaatttccggtcaaagacccttttattgagcttgccaaagggtcactcaatacgtttttgaatgcaatgacatatccggaaaaaacactgtatccggtagcaagttacaatgagcgggattttaaaaatctgatggaggtatatctggatgcggtattccatccaaatattacaaagtacaaagagatttttatgcaggaaggctggcactatgagctggagtcagaagatgcaccgctgaccatcaacggcgtcgtatacaatgaaatgaagggggcatattcctccccggatgaagtacttgagacggcaattatggaagcactgtttccggataacacttacagcaaaaattccggaggaaacccggaaaaaataccagaactgacgtatgaaaattatcttgcgttttatcacaaatattatcacccatgcaactcctatatttatctgtatggagatatggatatagaagagaggctcacctggctggatgaggaatatttaagccattatgatgcaaatgaagtggaagtacattcacaaatccagctgcaaaagccatttgacgcggtagtatccgagcgcagaacgtatccgatcacagaagatgaaccggaggagaagcacacgtatctttcttacaataaagtggtgggaaccgttcttgaccgtgaattgtatcaggcattttctgtactggattatgtccttgtcagtgcgccgggagcaccggtacgccaggcactgattgatgcgggaatcggggaagatgtctacggatcttttgaggatggcatgcttcagccgatgttctccattgtcgctaagaatgccgatgagtctgatcagacccgttttgtgcagattatcgaggaaaccttacagaagctggtaaaggaagggctgaatcaggattcccttcttgcgggaattaacagtgcggaattccggttccgggaagcagattacggacagtttccgaagggacttttgtatggactgcagtgtatggaaagctggctgtttgatgataccaagccgtttattcatctggaatgtctggatacgttacagtttttacgcgagcagatcaaaaccggatattttgaagatctgattcagaagtatctgctggacaacgcgcacggtgctgtggttgtggttgcgccggagaagggacttaatcgtgtcagggaacaggcactggcagaaaaacttgccgcatataaggccggattaagcgacgaagaggtgcaggcgctgattgcccagaccagacatctgcgggaatatcaggaagaaccgtcaaaggaagaagatctgttgaaaattccgatgcttggcagagaggatatgaaaaaagaagccatgccgttttccaataaggaggagaacatgggagaaattccggttgtccggcacgaggcaccggcaaatggcatcgattatattactctgatgtttgagtgcaatgacattgcagaggaggaggttccgtaccttggacttctgcgcgcggtactcggatatgtcaataccagatcctacagttatgccgatcttgcaaatgccatcaatatttataccggcggaattaccagtggggtcagcatgtatccggatctgaaaaatcacgatgcgatggcagttaaatttgagatccgcatgaaagtgcttgagagcaatctggagcatgccatgaaactggcagaggaaatcttaaacagttcggatctgcacgataccaaacgactggctgaactgattgcacaggtgaaatccagactgcaggtgaacttaagcagcagcgggcacacggtagctgcaatgcgtgcactttcttacgaatctgtttatgcattttataatgatgcgacaattggtattgtatacaatcagatgatccgcagactggatgaacagatgaaagagaatccgcaggcggtagccgaaaaactgcagcagctgatagaaaaagtatttgtcagaaggagaatgctcgtcagctttaccggagaagaaggctcttatgaaaaagcttccccgatcatgcagaagtatctggagaaacttccggaaggaacaccggcgcaggctgcaatccatccggtgctttctaagaaaaatgagggatttacggacgcttcccagatccagtatgtggcaagatccggtaactttatcagccatggatacgcatatcacggaaccttaaagattttaaaaatgattttaagctatgaatatctgtggatgaatatccgtgtaaagggcggtgcatatggatgtatgagttctttccttaggaccggagacagttattttgtatcttaccgggacccgaatctggcaaagaccaatgccgtctatgagaaaattccggaatatgtggcatcctttgatccggatgagcgtgatatgacaaaatatatcattggcacgtttggagctttagatacaccgttaaacccggaagcaaagggaagccgttcgatggctgcttatctggaacatctgacctatgaggaaatccagaaagagcgtgacgagatactgacagcgacaccggcagatatccgcagtctttcggatctgatcgcctcgatcctttccgatcagtgtctgtgtgtagtgggaaatgagcatgcaatccgtgaagaaagcggtatgtttacctcaattcagggactgtgcgaatagcacgataaaggagatacaaatgacagcagcaaattttaagtcagggtttgttacaattatcggcagaccaaatgtaggaaaatcaacgttgatgaaccgtctgatcggacagaagattgcaatcacatccaataagccgcagacaaccagaaaccggatccagaccgtgtatacggatatggagcgtggacagatcgtttttcttgacacgccgggaattcacaaagcaaaaaataagcttggtgaatatatggtaaatgttgcagaaaagacactgaacgaggtggatgtcgtattgtggctggtggagccgagtaattttatcggtgcgggggaacagcacattgtagaacagctgaaaaaagttcagacgcctgtgattcttgtgatcaataaagttgataccgtggaaaaagataaggtgctggagtttatcgatacctaccgcaagatttatgatttcgcggagattattccgacttccgcccttcgcggacagaatgtggatgacgtgattgattctatttttaagtatcttccgtatggtccgcagttttatgacgaggatacgattaccgatcagccggagcgtgcgatctgtgcggagatcataagagaaaaagcacttcatgcgttaagcgatgaagtaccgcatggaattgctgttgccatcgaccagatgaaaccgcgcaaaggcggaaagatgtatgatatcgacgcaacgattgtgtgtgaacgggattcccacaagggaattattatcggaaagcaggggtcgatgcttaaaaagatcggaaccaatgcgcgttacgagatggaaaaaatgctggatgccaaagtgaatttaaaactttgggtgaaggtgaagaaagactggagagacagtgattttctgattaaaaatttcgggtatcgggaggaagaataaaagataaagatcagatgatgggtttccaatatttttcgggaatagaattaccgccattgcagacgatagtaatggaggtaaggtgcaatggagaaaacctgggaaacattctggacaacaggaaaagttaccgattatctgacttatcggaatgaagtgacggatgccgcaggaagtggcggaggttacggacagaaggaacagcagaagtatgagtcagtctgtgatagtgatgggcatggttttaacagccatgcctgtcaatgattatgacaaaagaataacgattctgacaaaggaaaggggaaaaatcacagcgtttgccagaggttccagacgaccgtcgagccagctgctggcagcgacaaatccctttgcctttggcgaattcgaagtgtttgagggaagaaattcctataatgttaccaaagcaaatattcagaattattttcgcgaactggttttggatctggatgctgcgtcgcttgcgttctactttgcagaattcgcggaatattattgtcaggaaaataacgatgagcgggaaatgcttaagcttttgtaccagtcgtttcgtgcactggaaaacagcaggtattccaaagaacttgtgcgtgcagtgtttgaactaaaagccataaccatcaatggagaaggaccgcaggtgtttgcctgtatgcattgtcatgcgaaagaagacctgtgtttcttttcggtgaaaaggggaggcatcttctgcagaacctgtgcgaaggaagtacagggcatgtatatttccgattccacgcgatatacgatgcagtatatcatatccacacctgtcgccagattatactcgtttaccgtttcagaggaagtactaagggaactgaagatgattatgaaagaatatatggcgtattatgtgcatcatgactttaagtccctttcgattttcggttgaaatgggaatatgaaaagtgtataatatcatggattgtgaatagaggaggatttgtgaaatcatgaagaaattcggtcagatcgtgctggtatttctgcttagcgtaggaatgtttaccggttgcggcacttcttacaaagcggatgaaagcacagtttttgtactgaaagatggaaaaatcgtgtctaccgatgtggaaaattttgacgaaaagacatatgataaagacggattgaaagaatatgtcaaaaatgaaatagatacctataatgagaaaaacggaaagggaagcgtttcgctgaaaaaactcgacacaggagaaaaaaaggcaacgcttaccattgcgtaccgtacagccgaagattatcagaaatttaatgatatggaactgtatacgggaagtgttgcagaagcactggccgcagggtattcttttgacggatcgtttgcatccataaaaaacggaaagatcaaagcgtgtgagagcagcgcatttctggatgactccagctgcaaagtggttgtaatccgtggaaatacaaatgtaaaagtaaaaggaaccatctgttatgtatccacgacaaataccagttatgtggatgcacagaccattgcaatcaaagaaggaacgtcccttcttgcagcggaaaaaacaacagagggaacggaaagtgccacagaggcagcaggcacacagattgaggaaacgacaggagcggtatctgatgacgatctgatcgatgttacggagcaggaatccgaagtgaagtttcagtttgacgaggaagataccagtaccgatgatgccacaggcgaattcagtcaggtatatacctatataatttataagtaactcagatccagcctttgggcggatcagaaaatacataatagaatgtgaggattacataatggaaaagacgatggacaaaattgtgcaggtagcaaaggcaagaggttttgtatatccgggatctgaaatctacggaggtcttgcaaatacatgggattacggaaatcttggtgtagaactgaaaaacaatgtgaagcgtgcatggtggaagaagttcatacaggaaaacccatacaatgttggtgtggactgcgccatcctgatgaacccacagacctgggttgcttccggacatctgggaggtttttctgatccgctgatggattgtaaagaatgtcatgagcgtttccgtgcagataagctgatcgaagattttgcacaggagaataacatcgagttggacggatccgtagatggatggtccaatgagaaaatggtagattttatcgaaagtcataacattccatgtccttcctgcggtaagcataattttacagacatccgtcagtttaatctgatgtttaagacattccagggagttacggaagatgcaaaaaataccgtatatcttcgtccggaaactgcacagggtattttcgttaacttcaaaaatgtgcagagaacttcccgtaagaaaattccgtttggaatcggacagattggtaagtctttccgtaatgagattacaccgggtaacttcacattccgtacgagagagtttgagcagatggagctggaatttttctgtgagccgggtaccgatttagagtggttccagtactggagagcgttctgccgtgactggctgttatctctgggaatcaaggaagacgagatgcgtctgcgtgatcattctgccgaggaactgtgtttctattctaagggaacgacagatattgaattcttattcccgtttggatggggggaactctgggggattgccgaccgtaccgattacgatctgacacagcatcagaatgtgtctggtcaggatatgacgtattttgatgataccaagggagaaaagtatattccttacgttattgagccatcacttggtgctgatcgtgtggttctggcatttttatgtgctgcatacgatgaggaaaatatcggaacagaggaaaagccggacgtaagaaccgttttccatttccatccggcacttgctccggttaagatcggtgtgcttccgttatccaagaagttaaatgagggtgcggaaaaagtatatgcccagctggcaaagaaatacaattgtgagtttgatgacagaggaacgatcggaaagcgttaccgccgtcaggatgagattggtacaccattctgtgttacctatgattttgattccgaagaggatggagccgttaccgtacgtgaccgtgacaccatgcagcaggaaagaattaaaatcgatgagctggatgcttattttgagaaaaaatttgaattttaatattgcataaataaaagtctgccctgtggattacaaaacggatggtttgcgtccggctctgtggttcatggggcataactatggtaaaaaatgcttgcgaaatgcgaattctgtgttacaataagtatagcatagtcgtgaagtctgtgttcacggctcagctttatgaaaaacggatcatgttattcgtttttcgaatttatacaataaacaaatattaggaggaattgtcaaatggcaaacaagtgggtatacaccttcaaagaaggtaacatgaccatgcgtaaccttctcggtggtaagggtgctaaccttgctgagatgactgaaattggtcttccagtaccacagggattcaccatcacaactgaggcatgtactcagtactatgaggatggacgtaaaatcaatgatgaaattatggctcaggctatggaaggtgtagcttggatggaaaaagagaacggcaagaagttcggtgatcttaagaatcctcttcttgtatctgtacgttccggagcacgtgcttctatgcctggtatgatggatacgatccttaaccttggtcttaacgacgatgtagtagcagctatgatcgctggtaacccggatccaaagtttgagagattcgtatacgattcatatcgtcgtttcattcagatgttctctgacgttgtaatggaagttggtaagaaatacttcgagcagctcatcgacaagatgaaagctgacagaggtgttaagtttgacgttgaccttacagcagcagacttaaaggaattagcagagcagttcaaggctgagtacaagaatcagttaggaacagagttcccttccgatccagtagagcagttaaagcttgcaatcgaggctgtattccgttcatgggacaacccacgtgctaacgtatatagaagagacaacgatatcccatattcctggggaaccgctgttaacgtaatgccaatggtattcggtaacttaaatgatcagtccggtacaggtgttgcctttactcgtgatcctgcaactggcgagaacaagcttatgggtgagttcctgatcaatgcacagggtgaggacgtagttgccggtgttcgtactccaatgccaatcgctcagatggagcaggagttcccagaggcatatgctgagttccttaaggtttgtgagactcttgagaaccattatcatgatatgcaggatatggagtttacggttgaaaacaagaagttatacatgcttcagtgccgtaacggtaagagaacagctccggctgcattaaagatcgcttgcgatttagtagacgagggacataagactccggaagaggcagttgctatgatcgatcctcgtaaccttgatacattattacatccacagttcgatgctgctgcacttaaagctgcaactccacttggaaagggtcttggagcatctccaggagctgcttgtggtaaggtcgtatttacagctgacgatgctgaaagctgggctgaaagaggagagaaggtcgttcttgtacgtcttgagacatctccagaagatatcacaggtatgaaggctgctcagggtatccttaccgtacgtggtggtatgacaagccacgcagctgtagttgcccgtggtatgggtacctgctgtgtatctggatgtggcgacatcaacatggacgaggagaacaagaagttcacactcgctggacagacattcacagagggatctgagatctctatcgatggtacaactggtaacatttacgctggactgattccaaccgtagacgcttctatcgctggtgagttcggacgtgttatggcctgggctgatgagttcagaactcttaaggttcgtacaaacgctgataccccggctgatgctaagaaggctcgtgagctcggtgcagaaggtatcggactctgccgtacagagcatatgttcttcgatccggagagaatcgctgctttccgtgagatgatctgttctgatacagaggaagagagagaagttgctcttaacaagattcttccatatcagcagtctgacttcaaggctctctatgaggctcttgagggatgcccggtaaccatccgtttcctggatccacctcttcatgagttcgttcctacagaggacgctgacattgagaagcttgctaaggctaagaataaatcagtagaagagatcaaggctatctgtgcatcacttcatgagttcaacccaatgatgggacacagaggatgccgtcttgctgttacttatccttctattgccaagatgcagacaaaggctgttatccgtgcagcgattgaagtacagaaggagcatgcagattggacagttaagccagagatcatgattccacttgtatgtgaagttaaggagcttaagtatgttaagaatatcgtagtagagaccgctgatgctgagatcgctgctgccggtgtaaaccttgagtacgaggttggtacaatgatcgagatcccaagagctgctcttacagccgatgagatcgctacagaggctgacttcttctgcttcggtacaaacgatttaacacagatgacattcggattctcccgtgatgatgcaggtaagttcttaaatgcttactatgataagaagatcttcgagagcgatccattcgctaagcttgaccagacaggtgttggtaagttaatggagacagctatcaaacttggtaagccggttaatcctaagcttcacgttggtatctgtggtgagcatggtggagatccttcatctgttgagttctgccacaagattggtctggattacgtttcatgttctccattccgtgtaccgatcgctcgtcttgcagcagcacaggcagctatcgctgagaaggcagctaaataatttattgtgagtcgttttgttgtgaggcatctcataacagaataaagcagatttacatgaaccagatctaggctcgtgttgcatatcagccccatcatttgatggggctgatattttctatatcaaatcacagagcaatactgcatttgagagtgttattatgttgtgtggggagccactttttgtggttgttacttttttgaataagcaatttcaaatgcttttggggatattgttcttattgatatccgtgtcggatgaaatctcagatgtaaaataaaaattgaatgattgtgtgagataaaggatgataaggtgagtttttggtgcccgagaaatagaaatatttgaagagggagcaaaagaattgttgtgtgtggggaacagctttttgaaaagctttcagaaaaggtggcatggaagaaatggtactaaaagcgcataaagagattgcaaagtactactttaagcaagaattttagatgatgtaaaggcaaagtagtactataagcaagaatgaagcaattaagtactactttttatatcaaatcatgatgggaaaaagaaaaaagtagtatgaatcaatgacagaagacaggcagtcgttgattataccattggaagagaattgtacacatcggattcgggcatgggaacaggaaacatatgaaccatgcaataaatacccggagacattgaggtatgagacaaacgcaggtgaatttgtgcgttctaagtcagaggtgattatagcaaatctattacatatgaaagcagatcagcttttatacaaatatgagcggccgctaaaattaagatatcaagggcgtaaaatcatagtttatccggattttacaattttaaatacacagacaggaaagtttacctattgggagcatgcgggactgatgagcaaaccagagtatgtttctgattttgtttggaaaaacagtttgtattatgagaaccatttattgccggggacagatgttttattcacttttgaaacggaagatcatccgttggaaatccgcacgcttaagaatatgatttcggatttgatgacgtaaaagagtagatacaggcatctataaaacagatgtatttgtagagcaactttttataagtgattgagataacagaaaaacaacggataataagaaaagatggatgtttgtgattccttatcttgtccaaattcagctctcattgagagtgtaatataaagtgtgtaagttgccggtaacaaaaacttacgcactttattttttcctaaagtgcggtatctttaagaaaggatttgaaaggattatgataacgcacttatggcaccaagaaaaaacaaacgcagcgaggccggcaaagctatcgcccaggcaattgatcagtataaaccaacttcggctgaggagatgcaggacgcattaaaagacatatttggtccaatgtttgaagcaatgcttcaaggggaaatggacagtcatctctggctatgaaagcaacgaccgcggttataaggacactagtaaccgcagaaatggatacacccataaaatattgaaaaccaccatgggagatgttgaaattgatactccgagagacagggagggctcctttgatccgcagcttattcccaaaaggactaaagatgtaagcggcgttgaagataaagtattatccatgtatgcaaaagggaagagccagcgtgatatttctgatacaattgaagatatttatggatttgagatttcacacgaaaccatttcaaatatcacagatcaggttatagaaacggcaaatgaatggcaaaacagaccattaaagaaattttacagttttatctttgttaactgcctgtatgtaaacatccgtaaggaaatggagacaaagaactgcgctatttatgttgtgctcggatatgatgtaaacggaatctcagccttgtgacagtattataaaacgtattgatagagatatcattctgctcacaccagacacggtcagaaaatccactgctgcgacattgctgaatcaatgacagccattcttcgtctgttcttctcttattacgcataagctgctcctcctgttagctaaagtagttaaacaccgtaaacggctacctttgcttaagaaaagaagaatgatacgtccgcatccagatctgaaataagatagatgtgtagagtgggtaattttgttttgattacaaaaggtattgacaagtgaatagagaaacattattataatatgcaatagaacaacagatttcaaaataggtagttgctcactactgaaatgaccgagttctgtgcgatgagatgtaaagctgataatggggcagtgtacccatttatttgagttatatatgtccatagcgtccagtttggtcgtttatggacttttttattgcaaaaaatacggaggtgaagtttatgagcatatataagaatttgcagccacatgtacatgtattaaaattgactggtggtacgggagatggtaagacagagattgcaacggtgtttgcatccaaagaagccagaaccgtattattacgaggtgtaggacggacaaattcaactttaaaggaacggttgttggtgtattctgaggagtatacagataaacttttagttgctgtaaagttaaatatggaaccatatgataagctaagtttgagtgatttgtttgtttcgtctgtggcaaaggtagttagaagtcaggggaaagtagtggattccattattggaagagacgaagaagaattggaaaaatatttaattcaagaaatgcaggcaaaaaataatgcaaaagctgtgctatcttttttgacagaggaacagaaaacaaagattgtgagtgacttggtagatatataccatagttatcatatgtcagagtacaattatgaaatatataatagtgttagaaataatctaccggaaggcgaagcaaaggataattctacgaaatttttatctgctctaaaaaatgaagtggagcgaatgattgatatgcagggagaaaaagtgcgtgaaagcctgtgggatgttcttgcagaaataaatcaatggctccatgaagtgttttttgagtatttcagtaaaagtgatatttcagaagatggctattattatagggaaatctatttagacgacccggatgaggcatttatcgatgctatgttcactgctaacgatattcaaaatggtcagagactttcgttggaagtgttttgtagtgatatagttatttatattccggtaagtcaggcgataactaaaataatcaggtcaaatgggaaaacaaatgctgtttttaaagataacagggacaaagttacatttggcatttttgatacgaggggacttttccatgcagaaaatacagaagacgataatgccgattatctaagtgatttgctatatcagggagatgcggatgcattattaatggtagttcctttatttggagattctaacgagaaaaaaatacaggaaatgtataaagcagcttttgctacttacagtaaacagatacctgcttttatgatacataataaggtggatctgtttgtagactctattcggaaagatagctatatggatgatcctctttcgatggatatggattttggacaagagctgtcaagtaaggaaattataagtgctatatcggcaagagaacaggagttacgggaagaaatacaaaatgctcagacaaaatccagacaaaatttgaagattaagtcattatcctgttatttaaaaagagatggttctatgcaggaagaaattgtcaaaagatataacatatcaaatgtcattatgaccatatttgcagatacagctgactatcttgaaaaatcagcagttaaaattccggtaaaaacagatagaccggaaagtgaagtggttgtaagaattgataaagaaagattagctgagattgttcatgagtatctgttgaaggatgttacgaataagaaagtgtttgcaccggggcttgccgatttggcattgagtattgggaaaacgccgcatggaaactcctataatgcattgcgtaggagattgaaatatggagatggttatacatgcaatattgacgagtcatattattataattgcaggtctttttccataaattttacagccaatttacgaaactttgtttctacagatatggttaaaaaaattgtgaaggaaaccatgaaattatctggtggatatttcacaaaggataaggatgaagaagaattctattatattgtagaaggcagaatatttccgaagatgtttgtgggacagatgttatatcataaagcaatgctaagtgcagagcaagaagcagtaggatttatggcgcgattccaaaagtttctgaagaattgtcagcgattttttgatagtggaaatctggacgagcaagcatatgtagatgctatgtatcatgtagtctatgaggcagctcagagagcattaaatatgaatgtaaccttgaggtagctttttatagagcctaatctttgtcacgagtacgaaactacccgtttcggaaagaaggggaagaaaacaaattaggattgacaagaacggatgttcgatatatcatatgggtatgacgtagtatataccgtcaattttacgatcagcactgccagggcatcgttggatgcgtcggaactcctgacagaatagcttgcgaaggtttattccctttcctttgacaagtacaaagatgtgaaaatttttgtatcaaaaggaggcaaatgaagattcttgatttagatatggactattttatggaggatatagctacaggaattgctgaaagtagagaagagcgttaggcagaggatgagtatggagattgtgtttggagtgagcagcgaataagaagttttttggaagataaccttggactttcaaaagatagaaaaatcaagggaagaattgtgaccggacacaacgaagcactattcttttggcaggagttgataacaaaagaaagtttggaaacgccatttgaagttgtgcatatagattcacatgcggatttaggtttgggttatctttcatggacatatattttagatgatttgcttcaatatccggttgaagaacgacgtatgcatacaaaatatttggattgctttggacagttgaatgatgttggaataggagattacctgttgtatgccattgcctttcgctggataaatagtttaacctattgtgctaatcccaatagcgacaaaaatgattatgtgtgggagacactgaaagattttgaagagaagttcatttgggacaaaccggttgagaatacaatacagcttgtgtgtaatccagatatggaatttccttcatatgatgcagataaacaagaaaagcaagcatatttaaagaatgctgtaaaagagccagaggttccgctattaattattccgtctattcaagatgtaaagtatgatggggattttgactttgctgtaatggcgcaatctcccaattatacaccagcaagtactgattttataatggatatagttagagagtatattgtggaaatctaaaaatgctacattggagattaaggatgaaaaagatagaaagaattgcaagacaatttcgaaatgcattagatgcggcatgggaagatgatatgtttagaaacttatatccgtttaataacttcccaaatgattgttgtgggcatacctgtgatttgttaagtcaatatttgctggaacacggaatagaaacgaggcaggtaaatggaacatgcaggaaagatagtcagtggcatcatgtgtggttggaaacagagaatggaattgtaatagatattactggagatcaatttataggaagactggtaacagcaaaagaggttgaggcagttcatgtgggggaggaaggtacagtacataaaatattttgcgtgaatagagttcctgaaataactactatctttacagatccaaatgaatatacggattttggaggacggccaagtgcgtatcagcagagattgatagatgtgtatgagattgtgctttcatatctgtaatcaaaggctgcaacgaaacgataaatttttatatagcaaggaagcattacgaaggagcgattacatgttgattacaagttggtattatgatgaaagaagtcaggaatttaagaaaacaagtttaaaggaattaaaacgactggaatatggtaacaaagaggaatttctttatataaaagaaagactgtatcggagtcaaaataagagtgttcctatgatattagtaagaaaaggaattaatcaaggttttcgtagaaaagggaatagtacaggtaatcatactagtaagtctagaggtgagtgtgaaagcttaacacatcaaggaaacaaagaagcattggctacagttgatgaattaataattatgtttaatgatgaaaaggtgaaactctttattaagagtgttgaagtggaaaaagaaattgtttgtaatggaacaatatacgaaattgatttattctttgaactggaaagaactgaaccaacagtgtactatgatcaatggaatggaaagctttggtttgaagtttttcatacatgtaaagttgattcaaagcaagcagaagattttgctattgcgaatgagactttatttgagtataaagtaccgaacttctttaattttgttaataatatttcgttagagggatatgaaaagcgaaaactttttattgcggagaaatacagaaaaaatggcgtatatggttgcttgatcagtaaaacaagacaagaaagtcttgcatattggaagaaaagtcaaaaaggaaattggacagcaaggattggggaacatagttttacaattgtaaaaagcaagtttggagaaaactatggtctggtatatggcaatggtaagtgtttatggcaatataacgggaagaagttcttaactatagatgatgcaaagcgtaatgcagattttatagcgtttaagttatataatggcgagaaaatataaaatacattacggtgtataaagaaggtaaaatgaaaagcttatttatttgtccgacggcgcattgtggtaggtgctaaccgcactttattttaggtatattcgcctacccgattgtgccatatcggaacttaccgcggattctaagcggaatgacagcacactgttgtagtcttatttcagaggcaaatcctctgcttttgaaataagactatgacacatgccatggtcttgaaaaggacattgaaaacttcattaataaagcccctggttatcgacggcagcacggatcacctcagcatcaatgacctttttatcctgctgggcacctttggtcagtgcatcggtcatgagattgtcgatgagacgtggattgccctgggtaaaactgtgggcagccgcaagtgcggacggatcaatgatggtgccggaagcaccggcaagctggattttatgaaggatgtattttgatacttccccatcagaaagaccgctgtagttgtagtggacggtgatcctctggcgcagggcttcatggaccggcttgcggagcgtatcattcagatgggattccccgcagaggatcagggcgaagcggaactgtgccacttcagcgttatgtttcattgtttcagtttctttgctcatgaaaaagtcctccttatggcgttttatccatcataaaacagggggaattccacagccatcccatggttgtgtggtcagaatacagagatatccggggaataaataagctgatggtattgtgcggttttcgagccggcaggtggcggattggcatgggactgcataaatgagttattacactgaatggcataccccatagagaaagaggaatacctgttgtatgacaaaaggtccttaaggaaaagccagtcagagacttctatatcggcaagcactccgagccattccggcttatggatgcgccagagagaaatccattgatagagctggttttgtgataccccaaatctttcacacagtttttcgacatgaaaaagacccgagaagtattcaccgagcagacggaggagaaagaacaggctgtaaccggagtaagggacaacgatatccggaaggatggcatgggtatgcccgcagcaaacccggaggacacaaatatccggtttcacaggttggctggatataaagtccatgaggtgtctgccataataagcatggatgcggcagttcccaaagctgccacagatgggacaggtttcctgaccgggcttaaaacgagacatgtaagagtcaaaaagagattttgatgaagtttttatacgagttatcttgcaaaaaagtaagttttttcttatcatggtaaatgtcatcaggatgactgctcataatacaggcaaccattaattaggacttgatcctgcaccggacctgtagtgcaactcctgtggtgtatgagagaaagaacgaactttgatcggggtgttctttctctttttttatgtttacgaaaaaactatagtgaaatgaaaaggaatggtcaagggcagataaaaacgtgtcgtagaaaacagcacgttaagacagacggtatgaaggggataccgaatttattctgcggtatatttgccgtagatgggaactataatttgacgcgtgacatattttggtagaaaaaacgaaagaaattttataagtaacaccacagctagatgtgacagtacgatagacgaacgcaaagagcgttcttttttatggaaaagagatcgaaattatggaatataaagtaccagtatattaagtagagggaaaagaaaatctgctaggatttgtaaatatggttttagaaaaacaatttgtagtaaacggttttggaattaaagagtttaacggcgggaaagtttatttggagctacctcggtaccaaagttattataatccgaaaatgagcggggcttttagcagaggtttgattaagatttcagaatggaacgatcgtagtaaatcaggtggcagtttatcggtattagaaaggggaaaggtttgtcagtatgccacacaaatcagaaaggatacaaaagaaatccagaatatatgttttctaattactttagagttttcagccgagttgaaagagtgtatcatgcagcaatatgaagaacatttagaactttaggagaaaggaaataaaagttaggtattggtaaggtgaattttaatttggattctatatagaaaagtggacttgatttgtgcaatttttgaatgaggtatgattatttgataaaatgttgagaaattgtttaagtaaatcttatagtgatgaagtgttacttacacttgagtatagtaaatgaaggcatggtgtaaacgttaaattaatatttttcattaaattaagttttagtttatctttgaaaaagtatagattttaagtagaaataaacgagaatatccaatatgatggatttactagaactgtaatatgtgtcacttggttatagttatgtaaatatattaggagtatagggatgaaaaaaatcaaatatatctttttcagatatataatgaacaatcggcaaagatgtaaaatttccacagatagaacaaatataatttcctatctcccaacaataaagcgatgaaactatagatgattctagcgtattgatttttgtaagatcgcaggctaaacctataccacatcgttttgtataggcctctttttgagtccaaatcttataaaagcgtttcgctttttggacttctgatggggtggtaatatattctatttcagtaggatggaatgctatattcataatttgatatggggcatcttcacatatttcaatatctgttccaactgtggaatcagtggatacgcagcataagattgcacctttggtatgtgaatagctaaaatcaatggaaggatctgtaagaagtatgggtttatggttttctttgtagtaaaattgcaaattattgatagtaagtgaagtgtgtgatagtataatcatgcgagtaagtaattcagaatacagtgcaagtttacgatcagcagcgtggacatagcgtaaaagacgaatataacgttcagatgatatgtaaggtaaaagtagatcttcggtattggaccaagtgtctggtgtaagtgataaaaaataggtgtacatagcttactcctctatcaaaaaataattgtgattataatatcacattgtataaaattagtgcaatactattaatggaggtatagattgcttaaatagattatttgagttccgttaaagagacaagaacttttcagagtctaatcatatataattatatcctgaaatagtagaaatgtatagtatatatgctagtataattagaactaaaagttactgttgttactgttcagacgcaagcttgacaccacgctgtcaagctatgcgccatagtattaattattgagtgattacagcccctgcctcgtagaggcattttaaatgggctgtaatcgttgctggtaacaccgttaggtgtgaacagtaacttactgttcacaccattgtaaaaactgacgaaatttaaaaaaatatatttgtggataaactcaaacaggatgggaagtctcgttaacgacttccgaatcctgctttttcttttgaaattataaacagtacctgcatgtttttctgcttttacatggctggaatacggatttccactcctgcttctttcatttttttgccggtaccggaattcgtccgatttcccattcgcccctgtttttgctatacttatcctatacttaaggaggcacaaatgaacgcagatgataaaagcaaactcaaagcatatgaagaactta

SEQ ID NO: 962 - DNA, 98977 bp, Unknown
  gut microbiota DNA sequence
ctctttataccgctcctgaaattcttttacgtgatcaaagcgcgtaccgagaaggtttaccagacaatccatacatccgccgatcagtcttccctccattgtaacattttcggctccctgtggaaatactttcagttccacaggctccgtcacatgatacggcgccagcggatgttcttcatctttgacagattctttctcccacagatcataattatgcacacgggtaatctttccgcagagcagatccagtgcgtcctgcacggccggatgccacggttccattccaaacgcggctgcgcacggtccgtaaacagctgccgtatccgcaatcgttgcagataagaacgtaaaattggtattatcggaaaaccccatataccactttggcttcgcctgcgcaatccctgcgaaatcaatatacggaacaacttcacacatcagctccccgccaccgcaggaaataatgacgtcattttcggttccgcaatagctttcattcagttctttgccacataatgccgggtcgttgctgatcccgattcccttatccaccagacaattcggccccatctgtgtatgatatcccatctgcccaaaccgttctcttgcatgtgcaaatgctgtataataaggttctgtcgcacagccgaatgacggcgcaacaaatccgatcgttccatgttcttttaaaaattccggaaatctcatattcactctcctttttcgtttcaggcttttcctgtttcctcattatataagaaaaaagaccgcagtgcaatccactgacggtctctcatacacagtaacaacaaatatttatcccgcatactgcgcaaactgataacggaatttctgtaaaaaatacagatagtaagatttcatattaaaccacagggaaaaatccttgcgataatgaaattttgtaacatataaaattccctgacgattgcaccatatataaatatcattcagcccaagccgcttgattccgcggatattgcgcagaaaggtctcaatttttgataactctccctcatcacgggcatacagatgaaaaatggtattcgggcattcgatcagaatatgtcctgccggcttttctgccatatcatatacctccctgattactcctcttatatgtatctatggtactacaatatctgtcaaaaaaccagtcaattttacacatttttccaattatttcacacgccttctgcatttgaaaaatccggaataaaactttcttttgccacccccggctcctgaatgaaagcctgggtaattccaagcgcaatcgcagcgtccacatagcggtcatatgtgcgccggctcacccggtgcgcaagttccggataatctctgacatgttctagcggcgtatactgactcatcagactcacatagattttgttctgatatgtttcatataaataccggacaatgtttctggcatctttcagacatccgggcaaaagcagctggcgcacaatcacacccctcttcatcacagctccctcgcaggcttcctcgggcacgtcttcgcctcttttttcttcccacgcaaacaccggccggggctgctgacgcaccatctctgcaattgcagcctttgctgtctgcggataatctgatgcatgggaatattttgccgcaagaaacgggtccatatacttaaaatccggaagataaatatccacgattccttccagtgccttgatggtatccacattctcatagcttcccgtattgtatacaataggaaccgcaagtccctgccgtctcgcctgttctaccgcccggatgatatgcggcacatactgccccggtgtaaccagattgatattgttcgccccctgttcctgcagttccagaaaaatctccaccagccgttccggtgtgatttcttttcccgcagtcccctgtgcaatcgactcattctgacaaaacacacagtgcagggcacagccggaaaaaaagacggctcccgaaccttttgttccgctgatacacggttcttcccagaaatgcagagccgcccgtgctacctttaatgtctctgtcaccccacagattccagtttttcccttactgcgctgcgccccgcatgtgcgcggacacagcatgcaattgtcatagaaattatgatttttcatttgtttcacttgcgattcctttccaaaacctctacaatgaagtacacatacattatatcattttaaggagctacatatgaatcagtcaaactgtatggtcgcacagtcaggcggcccaaccgcagcaatcaacgccagtctcgccggagtcatctccggaataaaaaagtccggcaagtacgacacctgctacggggcaatcaatggaatcctcggtattttaaatgagcgttatctgaatctttcccagatgatcccggatgaaaaaacccttaaccggttaaaagttacaccggccatgtatttaggttcctgccggcacaaacttccggactacaaagatgacgactctgcttatgtattcatcttcaaccagtttgcaaagttaaacatcaaagcctttttctatatcggtggcaatgactccatggatactgtacttaaattatccgattatgccgccaaaatcaagagcgacatccggattatcggagttccaaagaccattgacaacgatctatgcatgatcgaccacacacccggattcggttctgccgccaaatacattgcatccacaatgctggaaattgcacacgatacgtttatttacgcggtaaaaagcgtcactatcgtagaaattatggggcgcgatgccggatggctcactgctgccagcgccctggcgcgaaatgactacaacactgccccgcattttatttatctcccggaagttgcatttgacaaagagcagtttctgactgatatccggaacaaattaaaaacattaaacaatgtaattgttgccgtatccgagggaatccgtgacaaaaacggagactacatcacagcttccaaagcagtggctgaccagttcggacaccagcagctctccggagccggaaaagcacttgaatttctggtcaaggaaaacatcggcgtcaaagtccgttccatagaaatcaatgtattgcagcgctgtgcctcccatctggcatctgctaccgatcagtcagaggcatttgcactcggagaacatgctgttttgctcgctgaggaaggtgtaaccgcctccatggtaaccctgacgcgcacctcgaataccccatatgcggtagcctatgaccatgccccgatccgcggcattgccaatgaggcaaaatccatcccgcgtgaatggatcaatgcacacggaaacgatatccgtcaggagctttacaactatctttacccgttaatccagggagaggtttctctcacctatcaaaacggtgtaccggtgtatatgccggttcctcatttaaaaccagatcacgtctcataaaaaggagagttttatggcaaaacgaacaacctctttgagggtactccgcggcattctctgcggtacaggtgcagctgtcatcggcgtctatgcaggtttttgtgtttattaccacgggcattatttcccccatacaaccatcggtgggatttcctgtggcaaccagactgcggatgatctggaagcaaaaaacattgcttccgcgcaaaattaccagctgcacataacggatcgcaaagggaacaaatacacactttccggaagtgacttttcctatacttacaaacgttccggtgaagaacaatcgcttgtaaaacagcagaaaatcctgttgtggccggttgccctgtttcaaaaacaccaaatagatctgaaccgttcttttcactacgatgaaactgcattaaaccagctgaccgatgcgctggctatctttgatccttcctatatcgaagcaccggagaatgcacatctgcgtattacggatgatgattataccatcgtaaatgagacaccaggaaatacccccatccgcgatgagatcataaaggaaatccaaaaagccatagacgatcaggaaactacactcacgctttccgatgcctgctacgaaaaaccgtccgtaacggcagatgaccagcagattgcagatacggtttcacagcttgaccggtatatggccgcaaccgtcacctacgaaatcaaaggagctgatgaagggctggataaagccggtatcctgtctttacttgacctcaaaaaagacggttcggtttccatcaatgatacccggctgacttcctatgtccagcatctggcaagtacttacaacacctatggggatgtacggaaattcaagacaagcaaaggggacaccgtaaaaatcggcggtggcgattacggctgggtaattgacaaatccaaagaaaaaaaagagctcttaaaagacttaaaaggtggaaaacctgtaaaacgggaacctgtctatgaacagcgcgccatgcagagcggactggatgatatcggcaatacttatgtggaaattgactataccagccagcatctctggtattacaaggacggatcacttgtcacagacaccggcattgtttcgggaaacatcagccgcggaaacggctcaccggatggcatctttaagattgcatacaaacagaaagatgccacacttgtcggcgaaaattatgcgtccaatgtcagatatttcatgccgtttgcctacaatgtcggcatccacgatgcaagctggcgcagcacatttggcaaagagatctacaaaacttccggttctcacggctgtatcaatgtgcctccgaaaaaggcaaaaaaactgtttcagactctacaggtcggcactccggtaattgcctattaccgggaaccggttacgctgacggcagaaaacacacgcatctccaatgcatactcttataaagccgaaaccgggctttaaccctgatcaaactgactgttatacagcgttgcataaaagccgttctgtgccagcagggtatcatgatttccctgttcgataatctttccgtctttcatgaccagaatactgtctgcctcccggatcgtggaaagacgatgcgccacaatgaaacttgtacgtcccttcatcatcgtcagaaatgccttctgtatacggatttccgttcttgtatcaatagaggaagtagcctcgtcaagaatcagcatcggcggaaggcataacatgacacgggtaatacaaagaagctgcttttgtccctgtgacagattgcccccatcttctgtaatctcagtatcataccctttcgacagtctgcggataaagctgtgtgcatggcttgcttttgccgctgcaatcatttcttcctcggttgcatccggttttcccatacagatattctcccggatggttccctttttcagccacgtttcctgtaataccattccataatttttccgcaggctgtgtctggtcatgtgcatcacatcatgtccgctcacctggatatgcccggaatcagcatcataaaaacgcatcaaaagattaatcagtgtcgtttttccacatccggttgggccgacaatggcaatcctctgtcccggctgtacatgcagattaaaatcctcgatcagcttctgctccggcacataggaaaaatacacatggtcaatgtctaccgttccgtctgcctgttctaactgatacgcatctgctgcatccggctcttcttcttttgcctcaatcagttcaaagaaacgcgccgcacatgccagagcattctgcagttctgtcacaacccccgaaatctcattaaacggcttggtatactgatttgcataagacaaaaaacaggaaagatttccgacagaaaatgctccgcctgtcagaataacggcaagtgctcccgtaattcccacagctgcatataccagactgttaacaaaacgtgtactcgggttcaccagactcgaaaaaaaggttgcccgcagcgaatatttctgcagacggtcatttacatccgcaaactgtccgagtgcttccttttcatggcaaaatgcctgtacgaccttctgatttccgaccatctcttcaatcagcgctgtctgttctcctctcgtctgcgtctgcagctgaaacatggaatacgtcttttttgcaataaagccagccacaaacaaagaaatcggtgtcagaagcacaaccactaccgtaatcttaacattgacaaagagcataaacagcaaagtaccgatgatcgttgccagaccggtaaacagctgtgtgaatcccatcagcagaccatccgcaaacgtgtccacatccgcaatgatacggctgaccatgtccccatgggaatgactgtcaatataagacaacggcagatgctcgatcctctcaaacgcatcccttcggatatcacggacaatattgtatgtcatacggttattgcacatattcataatccactgtgccgcagccgtgatgccaattacaattacgccttcttttgcaattgcaagaatccccggaaaatccacatttcctttgtccagaatcaggtcaatcgcccgtccggtcagaatcgggaaatacagagtcagtgccactgtcaccgttgccagcacaacagacagaatcagtatgggaatatagtgtttcagataatgcatcactttttttagtgttgcaatctgtccggtcatgttcttctgcttagacatttcctgcacctccgttctttctcagatcttctttcttaaactgagattcataaatctcacgataaatttcacagttttcaagcaactcctcatgcgttcccagtcccactgcctgtccgtcatccatcaccagtatctggtctgcaaactggatggaggaagttctctgggaaacaataaatatggttttatttccctgcagattacgcagtgcggctctaaggcgcgcatcggtggcaaaatccagtgccgatgcactatcatcgagaatcagaatctccggatcttttacaacggcacgggcaatcgtcagacgctgcttttgtccgccggagagatttcgtccgccctgttcaatcacataatccagaccgccttcttttccctttaccacatccgctgcctgagccacttcaatcgcatgccacaactgttcctctgtcgcatccggatttccccagcgcagattctgtgcaatcgttccttgaaacaatacggctttctgcatgacaacaccaatgcgctgccgcagatccgcaagcggatactcacgcacatcggttcccgcaacttttatacttccctgggatacatcgtaaaaacgcgggatcaggttgaccaccgaacttttaccggaaccggttccaccgataattccgattgtctgtccttttttcactttcagattaatatctgtaagagaatcctgcgcatttcccgcatatttcatggaaacatgggaaaattccacctccagttcaccggatgcgcttttctttgtctctgtgacagaatccgtaatcgtcggtactacctcaagcacctcctgaatacggtttccacaggcaatcgccttattgatggtaatgatcagatttgcaagttttaccagctccaccagtatctgtgacatatagtttaccagtgcaatcacctcaccctgactgatccgtccgatgtcaacctgccggcctccgacccagatcaccgcaataattgcgaaattaataatcacataagtcagagggttcatcaatgtggaaattcttcctaccagcatctgaatctttgtcagataagcgttgctctcattaaaatccttcgtttcctcttcctgcttgttaaaggcacggatgacacgggcaccgtctaaattttcccgcgtgtgtccgagaacttcatcaagcccgcgctgtactttcttaaacagcggaatactgacaagcatcacggaaaaaacaacaaccgacaaaagtggaattgtaacgacgaaaatcagcgctgcctttacatccacggtaaatgccatgatcatggcaccaaatacaataaacggagaccttaaaaacagccggagtaccatattgacgcccgactgcgtctggttgatatcgctggtcatacgtgtgatcagcgtagaagtcccaatggtatccatttccgaaaaagacagtttctgaatatgggaaaacagtgcatagcggactttggtagaaaaccctaccgccgctttcgccgcaaagtactgtgccgtaatcgaacatgccagtccaatcagtgcaagcagcaccataacgcctcccatcttaaaaatataagacttgtttgatgccgcaattccatgatcgataatcgctgccacaacaagcggaacaatcagctcaaaagatgcttctaacagcttaaacagcggcgccagaatacattctttgcggtattcgttcagataaatcagtaattttctcataatcccttttcctttatatttatttgcctgaatcattataacactcacacccaggggattcaacagctttgcacgtcctctcccggaaccaggcaacgacaaaaagaccggcacaagccagtctctttgcaataaagtatgttgaacatttaattaatggcacccatgacagttcttgcagtcaccaccacaggttatggattttccattttttttgtctttgatgatgcttctaatcacaagagaaaccactactaacaagatgattaatacaattgcggtacccattactaccactccttccatcaaacaaagaggactatccatacgtttttctgattcaatgttagtatatcctaactcccattagttgtcaacaacttttgttaattttttgctagaccatttacgcagattatgttataatcctacttaatgaaacaaaaggtaacattgggaggaatcaatcatgcatagtacggaatcatccgagaattatttagagactattttaatattaagtaaaaaacttccggtggtgcgttccgttgacattgccaatgaacttggctttaaaaaatcaagtgtcagtatcgccatgaaaaatctccgtgaaaaaaatcagatcacggtcacagacgccggatttatatatctgacagacgaaggacgtgccatcgcagaaatgatctacgagcggcatgagctgctttccaaaggactggtcgcgctgggtgtcgatccgaaagtagctacagaagatgcatgccgtattgagcatgtgatcagtgccgaaagttttgcggctatcaagaaacatcttcatctgccaaaagacgcagaataatctttcctgccggaatatacgaatacataaatagaaccggataccgctttttgtttatcgcaaattacggtatccggttttttattctttgtttgggtttgcagcatcgtcataggtatccagaaaatgatgtcttaccccatcttttttatatccaatcacggtatttaaatttacattctccacactgcggaaaatatttttagctacataaggattctcctgttcaagactatggatcagacgcttcacatctgctctctttgaccctttttctgttcctccacaggatgcacacccttcggtaaaacgacaggcacactgaatgaaatgcaggtcattgtactgtgcccagtgaatgatatccgcttccctcacaagatacagcgggcggatcagttccattccctcaaaatttgtactgtgcagcttcggcatcatcgtctgaatctgcgcaccgtacaacattcccatcacaatggtctcgatgacatcgtcaaagtggtgtccaagcgcgatcttattgcatcctaattcccgtgctttactgtacagataccctctgcgcatccgtgcgcaaagatagcacggggaatccgtaatatccacaaccgtatcaaaaatttctgtccggaacaccgtaatcggaatattgagcattttcgcattatttaatattgtctggtaattcacctcattatatcccggattcataaccagaaaaacaacttcaaaatttttctttccgtgccgttccagctcctgaaataactttgccatgagcatggaatcctttcctccggatatgcacactgcaatcttatctccatcctgtatcatttcatacgcattgatcgcttttgtaaaaggtctccatacggtctttttaaattttttaataatgcttcgttccgcatcagcagccttgtctgctaatcgttctgcagtcccgtcatcttccttcataaaatcggccagtttcttgcgcagataggaacggtatcctccctcaatgctgtaaatctcatacccttgttctgacaaatcttccgcaatttcatcgcttctttgcccggtatagcaaaacagatacactggcagctccttcgggatctccccaatgtgctccataaattcttcccagaaaatatgttttgcgccgggataagtttcctttatataatcctgctcacttcttatatcgatgaccagcttttctctctggtccttttgcaattcctctacagtttttcggtacatgccatttctccaattcttgaattgttgcgtaaaatccattcctcattatagcattgtactctgccctgaacaagtctcaattcctataacttctatccggcttcatcatgctcccggatcattttaaacagttgtacacgattgcgtattcccagtttccggtatatgtttaaaatatgttttttgagcgtattggtgctgatggtcagttcctcgcagatcaccggattttcctttccctgcatcagatttcgaaggatcgtatcctcccgccgcgtcagtccatattgttccacggcctgcgttaccgtaagcttttctccttcctcccctgcccgtctttgatgcttttccatccgataggccagatggtctttgagcatatcgagaacaaaaatgtcatcgtatttaaaattttcctttccaatggtacgataaaacgtaattgtaccgaggaaatgatgatcttttgcgatcacaacctgcagcgaataatgccagttattgggcttatataccttcttataatattccatttccacacgcgactcatcactgataatatccgtctcccgataaatcagcgatttcccgctgagcataatccctctgctgtaatccagttcctcatattcttccgatagattactgtcgcaattatacatcaccggccggtccagtttcttttcatcctccacggatgccagataaaaatcagcactgtcaaaatccaccagcagttttaactgttctaacagttcttttcgcatttcatcaaaatcttccatcgtatagactttataaatgattgtgtttaaaataatccaatcgttggtttctaatgttttcatttgtgtttctcctataattttttatttcataggaatttaacaccaaacgacatttcctatgaaataaaaaacgacgcacctcactgaggtacgccgtctttggcttttatgctttcagtttaacactatttaattacaaaagcaaaccaattttacctatttttgatttttttgattttttccttttcccctgatgacttttttcaaaaatgtgctataataaaatacgaaacgcagatgtagttcatcggtagaataccagcttcccaagctggggaggcgggttcgattcccgtcatctgctttttttctatgagaaaggcgtccgttttttccggacgccttttctttttcaatgattaacgatagtaatacgcgccgccctttctggtgatcgtagcattacgcaaatcaaatttctttttcttcaaagaagactttttcaatgtgaacttaacatcttttgtcgaataagaagaaacggtaacattgtatctgctcgttttatacgtaccaatcgtttttccactggcatctttcacaacaatgttgacatccttcaatgcggtaatatagtctgtcgtattattgacaattctagctgtcataacaagatttccagacttatcaaaagaagctttataaacttccatcacacatttattgtaatccacatcgctactgcttaactttacggatgaaaatttattttcctttacggttaccttacaggtcagattctctccatcttctgtcacagcataaaccgttgtttttccagctttgacgccggttactttaccatccttatctactttggcaattttggaatctttagacttccatgcttttacctttgcaccggtaacagaaagcttcttggtgtatcctttggtaacaaccgcattggcattgctgatctttgcaccaccattgtactgatacatgtataaaagatattttgtactctgtgaaaatgtaattccataatagtaatccccggcatccacatttggaacaggatctacaaaataatacacaccttcttcatactcccagctggtagaagatgatgatacctgataaggattatctgcccgctgtactttatttcccacactgtcgtataccgtaattgtcatatcgacaggtgcttctgtcacgatctgtgcaacaaatccataacttttggtcagagaaaacggtgtctttacttctgttcctgctgtcgcctgttctgtctgtgtaggtgcaataattgtagtaaacttctctgctgcctcaacttctgttgtgccaacacataccgttgtgaacaccagcaccagtgccagcataaaagttacaattcttctggttccatttgttttcataatttttccctttctatctgtatgttgttctacctttatagtatcacatatcaaaaaggaaaccgcaagtcgttctttcttcctattttaacagtctttgacgagatctttaaccacttccccggcaatgatcagtccgactaccgatggcacaaaggccacacttcccggaatcgcccgacgctccgtacacttgtgctttgctcccggcggacagatacagtttgagcggcagctaatcgccatatcctctaccggtttgatcggttcttccctggaatacacaacctttaatttctttacgccccgtttctttaactctctgcgcataacttttgctaatggacatacactggtcttgtaaatatctgccacttcaaatttgcttgcatctaacttatttccagcccccatactgctgataatcggaatgttcatctcttttgctttcatcaccagcgcaatttttgcagtgaccgtatcgaccgcgtccacaatataatcatattcttcaaaaggaaagtcctttgcgttttccggcaggaaaaaacagtcatggatttccaccttcacatccggattgatttcgagcatgcgctctttcataacttctgttttatatttcccaaccgtctttcttgttgcgataatctgacggttcagatttgtcagacatactttatcatcgtcaatcagatcgaatgcgcctacgcctgtccggaccagtgcttcacagacgtatcctcccacgccgccgattccaaacactgccacacggacatttttcagccggtccatcgcttcttttccgagcagtaactccgttctagaaaactgtgttaacatatatgaactccttttatcccatttttcctatcgcaatacattatattatgggaagctttaaactgcaagcctgtatacttttttatttcttatgaacgaaaaaaagcggcctatctttcgacaaaccgcctttttcaactattcagaacccgccaattgaaatccgcgcatacacttaatggctccgatatcctccattgcgtttaccatgcggtaaacggttgcaacgccgatttttggatctacctttgatgccttgaaatagatttccttacagcaggaacaatcttcctcaaggataatatccagcagcatcagccgctgcttggtaatcctacagcctgattccttcagtttttgaataatcatttctctctgcatcatttggcatctcttctttttctattttgctgacacagttttctttgcgtcaaagtttaatgtgttactctccttataaggacggaacagcagataaataaatccgatgatcagtaagaatgctacaacggtaccaacaccgaatgtaccaactgtgatcagtgtaccgatctggtagatacacagggaaacaatgtaagctaagatacactgatatccgatcgcaaaccagaaccacttcacgttgttcatctcacgcttgatcgcacccatagctgcgaaacatggtgcacataacaggttgaataccaggaaaccataagcggcaaccggagtcataaccaaagacagtgacttccagatttcggaaccatcttctgcaacttctgcaaaaccgaataactgtccgaacgtagctactacgttctcttttgcgatcagaccggatacagcagcaactgccatcttccagccgttaccagccctggtccagccaagtggtgcgaagatccatgcgattgcagaaccaatttttgcaagaacacattctgcctgggcagcctcaagagcagcaccctctaatccatcgaaatcaagcattccaaaggttccgttgctccatccgaagttcattaagaaccataaaacaattgttgataacaggataattgtacctgctttcttgatgaaagaccatccacgctcccacatgctgcggagtacgtttccaacggttggccagtgatatgcaggaagctccataacgaatggtgcaggctctcctgcgaacatctttgttttctttaagataataccggaacagataattgctgcaacacctacaaagtaagcactccatgcaacccatccggaattatggaagaatgcacctgcgatcaaagcaataatcggaagctttgctccacaaggtacgaatgttgttgtcatgattgtcatcttgcggtcacggtcgttctcgatcgtacgggaagccataacaccaggaacaccgcatccactaccaatcagcattgggatgaatgattttccggataatccgaatttacggaaaatacggtccatgataaatgcgatacgtgacatatatccacaggactcaaggaatgccaggaaaatgaacagtaccagcatctgcggtacgaatccaagtacggcacccacaccggaaatgataccatctacgacaagtcctgtcagccagccggcacagtgaatattctcaagtaaggttcttgctcccggaacaatccactcgccaaacaatgtatcatttgtccaatcggtaaggaatccaccaactgttgtgatagatacataatatacgataaacataaccaatgcaaaaattggaagtgcaaggaaacggttcgtaacaatacggtcaatcttatccgaagtggaaagtttctcacccttctttgcttttgtaagacactctccaatgatggaagaaatgtatacataacgctcattggtaatgattgactcggtatcatcatcaaaatgatcctcaagttccttgatctctgcagatacatctggcatcagacttaagagttcagaaatcttatcgtctttttccagaagtttgattgcgaaaaaccgcttctgttcctgtggaatatccgagctgatcttatcctctacctttgcaatgatatcctcaacctctgatgcgaacgcatgtgcaggtgtgactttcttcttctgctgtgcgagagcaacggccttttctgctgcctttgtaattcctgttcctttcagagcggaaatctcaacaacttcgcagcccagtttctggctcagcttatcgatatgtatcacatcaccattcttggcaacgatatccatcatgtttactgccatgattaccgggataccaagttccatgatctgtgtagaaagatataagttacgctcaatatttgtaccatccacaatattgatgattgcgtccggtctgtctgcaacaagataatttcttgccaccacttcctccagggtgtatggggaaagagaataaatacccggaaggtccatgatggtaacatctttatgacccttcagacgtccttcctttttttctactgttacacccggccagttaccaacaaactgattggaaccggtcaatgcattgaacaatgtcgtttttccgcagtttggatttcctgccaatgcaattttcactgccataattctcctcttttctgtgctggcgcacctttgttttatcaaccttgctaaaatttgaaatcgctagtttctgtaagcacctgctagtttttgtaagtcgttactaaccttatggtaaaaaaaattactctacctggatcatttcagcatctgctttacgcagggacagttcataacctctgaccgtaacttccaccggatctccgagtggggctactttacggacataaatctctacgcccttggtaattcccatgtccatgatacgacgttttacaggtccttcgcctgtcagttttgtagctttgacagtctcgccaacttttgcatcttttaatgtcttcatcgctgctccctttctaaatcattattttatttgccatatccttaccgatagcaacacgcgcttctttcacattcacgatcatgtttccatccgtttcagatatcacagccacttttcccccgacaacaaaaccaagattctcaagatggcgtcttgtttcttcttttccaccgatctttttgatctcattctcttctcctgctttgcacattgttaaaggcatcataaaaacatcctcctgctttccgccgcgtgcaagcgactttattgagaatcatttccatctcttacgtcagttagtatatgctaacgagcataagttgtcaataacaaaataatattttttcagcttatccgacatttttctccctaaaatactcaggtgccagcacacaaaatttttctgttattaagcatttgcaagcgcttttccaagtgccttgcactgttcaatcgcatctgcatccggagcttcctgacagatgacaccttctcctcctacgatcgttgcaccagctccgctcatacgtgcttcccagtcacgcatccactgtccgtccccccatccgtaagaaccaaacagtccaatcttctttccggaagcaaatccttccacgtctgcaacaaacggctccatctcactctcttcgagtacttcggctcccatggcaggacatcctaatgcaaatacaccctctccctttaactcatcaatgttcatatcactgacaaatacagcttccgcctctttgcctgcctctttgattccttccacgacggcatttgccatgctttctgtgtttccaccctgtgtccaaaatacaactgaaatcttactcattttaaattctccttttctttttataatgttatgatgcatattgacagtcacaatcaaccagctgccagatttccgtattgctgcaaatcgcaataatctcttcaatgcgcattccatatgacaaaagctggatcagtttttctctggaatgttcatattttttaaacagccggattttttcatgtggtctgtcgtatactttccagtaccccgaatacaaatagtttttcccctgattgcggatgaatccttttacatcctctggcggatatccaagcaacagtcccatctcatgcggaaaaactttcttttccctcagatactgctggtaatgtgcacgaaacaccggtaatacctgttttaagtttgtgtcagtatagccaatctcatgcaacaatgcctgcacgctttctttggaaaaaaatgcttccagacgatccggatgatacaaaaacactgtaatcctgcctgcgtgaattcccagcggataaatcgtcagttcactttctctaaaaatatctttcatccgctggtaatcctgtttttcaatattcaacagattcgattctttcagtccggtgatcagcggtgcacactgaaatgctatctgaagttcgatttcatcgccacgcagtttccgtatgatctcccatgtttcgctgctcaagtccgtcacccctccctaaagttagttatatctaacccaagaaaagaatacacgaaaaaacaggctctcgtcaagagcctgttgtgatattttttatcaattatattttctgttgcgtataccgtaccaatgcctcccgataaatcgcccccagacggcttggcagaacttttttatgggtcaccatgccaatatgcatatctccctgcgcctgcagcggaaccgagacaatattctctccgtttaattcctcgtcaatcaccccgctgcagactgtataaccattcagaccaatcagcagattaaacagggttgcccggtctctgacacggatgtttttcggccggtccacggtactgaatatctcctcggagaagtaaaaagaattgtgttctccctgttcaaaagaaagatacggatacggctccagttcttcgattgtcacagactttttgcccgcaagcggatttttcgtgctcacaaaaatatgcggttttgccacaaaaagctcggtaaacacaaggtcatgttccttgagcagtttctcaagtacggtacggttaaaatcgttcagataaagaattccgatctcgcttttcatctgcgcgacatcctctatgatttcatacgtctgggtttcccgcagacagaaatcatacttttcgcttccataccgctcgatcaattccacaaatgcattgactgcaaacgaataatgctgggtggaaacactaaattcctgtttccgcccagcttttttcttgtatgtttcctccagcagtgccgcctgttccagaacctgtctggcataccctaaaaaagtctccccctctttggatatgacaattccgcggtttgtccgttcaaaaatggtaatccccatctctttttccagttccctgactgcctttgtcagactcggctgggaaataaataatttctttgccgcatcactgatcgtcccggtctgtgcaacggtcgtaacatatttcaactgctgtaaggtcataaagcatcctcctataagatgtcaatatactctccgtttaatgctttattcatgctgcgaacagcgcagaatttaccgcacatggaacaggtatcctcctgttccggtgcccggtccgcacgaatggctttggcggtctccgggtccatggcacatgcccactgtgcttcccagtccagtactcttctggcatccgccatcttattgtccatctccatggctcccggtacatgctttgcgatatctgccgcgtgcgctgcaatctttgatgccataattccctgctttacatcgtccacattcggaagtgccagatgctcagctggtgtcacatagcagaggaatgccgcaccgttggcagcagcgatcgcaccaccgatggcagaagtgatatgatcatatcccggcgcaatatcggtcaccagaggtcctaatacataaaacggtgcacccatgcagatggtctgctggatcttcatatttgcagcaatctgatccatcggcatatgtcccggtccttctaccataacctggacatccttttcccaggcacgtttggtcagttctcccagacggacaagttcctcaatctgacagacatccgaagcatctgcaagacatcccggacgacaggcatctcccagtgagattgtcacatcatattcccggcagatgtcaagaatttcatcataatattcataaaacggattttcttccccggtcattgtcatccacgcaaatactaaagaaccgccacgggatacaatgttcatcttccgcttgtggtttttgatctgatcgatggtttttctggtaatgccacagtgcagggtaacaaaatccacaccatcctctgcatgcagacgtacaacatcaataaaatcttttgccgtgagtgttgccaggtctctctgatagtgtatcacagaatcgtataccggtacagttccaatcatcgccggacattccgaagtcagttttctccggaatcctgtagtatctccatgggaagacagatccatgattgcgtccgctcccatatccaccgctgccataactttctgcatttcaatatcataatctttccagtctctggatactccaagattgacattgattttggtccggagcatggagcccacaccctgcgggtccagacatttatggtttttatttgcgcagatggcaacctttccggctgccaccagaggcatcaactcttccacacgcaagtgttccttctgtgcaactttctttaattcttctgttacgattccttttcttgcagcttccatctgcgttttgtattctctcattggtttctcccttccttgcataaaataaaaaaacacacgtataatgcttatacgtgtgtggtaactttcattttccctacgttggcattatccaaatcaggttataggtcaaagcaatacagcttactctcagccttctttttgaaagctccctttttcttattttaaatatagttcattattatacaatccatggatgctgtcaagattttccctgtaagttccgataaaaatacataaatttgccaggaagtagattgtcattttctgtgttttacgctatgatgaaattattaggcaaatttacaggaacctcttattacggagaatacatgttatgaaaaaacctgatttaaccaaatacaaaactacaagcacgctttatctgcttattcttatcattgcagctgttgcactggttttcggctggcagtgtacctcatacagtctcagcaaccacagcgcggatctgcacatccagatgctcccgtcccggcgtgttaaggtatccaaagcaactactgtttaccggatttccgatgtccgatggaccaaaaaggcttctaccctgatgttttacagccagcatcagaccgtggttgtggaagtagacggaaagctgctttatacgcgcagcctcaaaacggacagtattctgcatacaaccggacgtaattgtgaaatggtctctgtcccggaaaatacacgtagcatcctcgtcacactcaccaactgcaacctggacaaacaggtgtctgatccggttttctatcagggcgatggtgtccatatgtttcgccatgaacttttaaaagcagggatccccatgctcctcggcattatgaacgttgtacttggcattctgatgctcatctactggctgtttgtgcatcattgggcatatgtgagcaaatccatgctgtatctgggaattcttacaacggatcttggtgcatggttctgcctggaaacaagctcttccattcttctgtcacagaacccggtgttccattcctatgtgacccgcatgcttcttctgctgctgcccattccttttatgatgttcgtccggcattatttaaaagcaagggaccggtatctttgccggatttttgtctggctggatgtggcagagattgcagttgttttattcctgcagcttatggatatccgtgacctgacgcagacactctggatgacccatgtcatgatcggccttgcagttttatattttatctataccatctgcaacaaattttatcaccacacgacgacacatgccctgtggatctgtaccatagggatcattattctgatcggtgctcttttttccgacatgtacaattattatcaggggtcgcaggacatcgaaattgtcggccgcatcgccatgctgctttttatcgtaacccttgcctgcgacaccgcattcgtatccctaaaggaaatcgataccggccgtcgcgcggctctctaccgtgaacttgcggaaaaggatctcctgaccggctgctacaaccggaatgcttaccacgaagataccagccggtgcaaaaaactgacaaatcttctgttgtttgtatttgacctgaacaacctgaaatactacaatgataaattcggacatgactgtggggatcagtatattacggatgccgcacatattctccggaaaattttctcccgtcacggaaaactgtaccgcatcggcggggatgaattctgtgttttgattgacgaccataatacctgcgacatcagccatctgatctgctgtctgcgaaaagaggaggccgtttacaacgcctcctcccgaaacatccatctgcagattgcctgtggatatgctgtctttgattcacggacagatgcggatctggatgcccttcaaaagcgggcagatcagaatatgtacgaaaacaaaaaacagttaaaaacattttcttaccgctgaggcttaagcctgcagcggtatttttgcgacatccttttttcggagcttctttacctcatacaactgctcgtccgcaagcgaaagtgcatccgcaagactgtgctcatcgtccggctctaacgcacaggcaccgatggaaacagttacgttatacggtttgtcactctgttcattccgaacggtgaatgcatcgtataactcctgtaataacagttcttttttcttttccgtcatcagtgcacatgcatactcatccccgccgattctcgcaacaaccccatcccctgtctgctccttttggacaatctctgcaagaatttccgcgatggtgtgcagggaataatccccttcctcatgtccgtaccggtcattgatgattttcagattgttcatatccgcataaagcaccagaaatgttttttccgctgctcttgctttgtttagcataggctccgcatattcgaaaaatcccctccggttacagatcccggtcagtggatctttctttgaaagtgtttccagttccagattgttttcctttaagacatacagcgattcctctaactgtttctgaatatcctcattgtttttcagaagattcagcatcttgactgctgccgaaatctgattacttaaaaattctccatattccagcacttcatcggtcagatcacacactaaaattccatacagcatttcattggcatacagaggaagcgttaccatccatgcccggtcagacattcccagcctggaaaactggaaaatattttttgccttttttttctgatgaatggcgggtatattttctacatttccatgaagttccctggctttcagcagcagctgctccggcatctgaaataattcatgattcagatgaatgaccggctcctcatagatgtacaaaaatgcattatgtatctttaaccattccattgttgcaagaatttccccaaaactctgatcggttcctttttcaaaacaaagcagtttcaaaataaagtttttcatttcgaaatttacccgtttctgctttccgaacagttcatcggcccagtgattcatggactcgtacttttccagcacatcattgcgcgcatccacttcttcctgatttccccggcaaaacgaattccggaccaccagatcggtcggaaggcgcacagaagagactttttctccctgcatcatccggcataacagttcacatgctttgctgccaagttttgacacatccgcacgtaccgaagaaagtgtcggataaatctgggaacaccactccgtatcatcatacccgaaaaccgagatatcccttcccggcataagtccccgcgccttcagttcttcataaaatccggctgcagtttcatcattgacgcaaaaaacggcttccagatccggattgtcatccagaagtctggcataggtgctatgcgcatttcccgtcagatccccttccacataccgtttttcctgcggtaagataccgttcttccagagtgcactctcaaacgtagctttgcgctccattgcatcggaattttccttcggtccgcctaccattccgatttttgtgtaatgcagatcctgcacgagataatcgattccctgccggattccacggtcattgtcataactgacatttacatatccttccagatcagaggaaaccagaacgcatggaattccatcatagtgatgcataaattcaaccatacgttctttcgtcgtgtaacagccaatacagtttgccgctacgataatcccgtccagacggcttttttttacactcgaaaacagggtatcatactgatattcatacataatatccgtgttctgcgcgtaatcacggtctaaaaattttcccggaagcactaccatgttgacatcctgctcttttgctgccgccctcagacctttacacaaaaaacgtgtaaaatcgtctgtgatgcctccgaccatcacgcctatggttttccttgtttttgtcatatctatccgccccttagctcatttcaattaaagttaactcattttctattcttaataaaattattttaatataattttatgtttatatcaattatatttttagctaattttagtcggataaatttgtggaatgtgatctaaatctcttcacattctccggaatcctcgataatccgaagtccggctgtgctggtaaccggaagagaaaacgcaatggttcccgcttttgtcccgattccggctttttccatgatggatttcataatcgcatttttctgttccgttttcgtaacaattaatataatttctttttcggaaaccagcgatacgccgagaaactgttctgcccgtttcattccgacacctttcccgtgaaaaaccgttcccccggtggctccgccttcttctgccgcacgcatcacctgcgtattgtatccgtaattggcaattgcaatgatcagctcatgttttgtctccttcaacgttgtctcctcccctttctcgaattcctgttctcccagcataaatttcagctgatgttttccgccaatactgctaagcggtatcagaaagacaattcccgtcccgggcacatcaattttcagttccgtctgcaatccctttttcacggttttccaggtgggacgtgtgaccagacaaaaatgaatgcctttctcatcctcctcgagtccgaagtaatccagtacgtcgctggccgctgttcccatggcaagagaaatatttccagtatccacgtgattttgcttataaaacttcacaaatttctgcatctgttttcgattgcagatcgtaaccatcatatagatctcactcatttgtccgctcctctttcctgtttttctataattctataattgcatcatccgcatacccggcaaacacatcctctgcctgcaggaatggctgttctgccatttcttcctttttattactcttaatcttatagatcagcccgaggacctgcagcgtaatcagcggagtcatggcaaccatcgctaccacgccgaaggcatcctttaccacatcgcctcctactgccgtacaggcaccctgtgccagtggcagcagaaaagttgccgtcatcgggccggatgccacgcctccggagtcaaacgcaatcgcggtaaagattttcggaacaaataacgtcagaaacagtgcaatggcatagcccggaattaaaaaatacataatcggaattccggtaagcacccgcagcatggaaagcccgaccgaagcagccacaccaaccgaaaggctgatctgcatcgcttttccggaaatatccccatcggtcagttcttctacctgtttcatcaggacatagacggccggctctgccttgacaatgaaatatccgatcaccattccgaccgggactaaaatccacggacacggcagtgatgccataacggttccaagatagtttcctgcgggaataaatccgacattggcaccggtcaggaaaagtaccagtccgacatacgtgtaaagcagtcccacacagattttaatcaatgtctttttatgtagttgaatggaaacaagctggaaaattccaaaaaagaaaacgattggaagcagggaacctgcaatttctttgagataatagggaatttcggataaaaacagccggccaagttccacagaattgaaagcttccggcacgcccgctgccacataacttccctgggcaggatataccagtcccaggagcaataccgcaagaacaggaccgatcgaacacagtgcaaccagtccgaaactgtcgttttccgcatgcttatcatttcggattgcagaaataccaacaccaagtgccataataaacggaaccgtcatcggtccggtcgtcacacctccggaatcaaacgccaccgccagaaaattatccggaacaaaccttgcgatcacaaatatcacaccatagaacacaactaataacggggctaacgctattccaaataaaatacgaagcagtgctacaacaagaaatgcgccaaccccggctgccaccgaaagaatcagcaccatattcggcaccgacggcacctgagcggcaagcacctgcagatccggttctgaaatggtaatgatgaccccgagaaaaaagcccagaaggaggatcacccatagttttttggttttaagcatgctgcctcctacacgttcccccataggagacattgacatttcggcacccatggaaaaaaacagcatgcctataattacaaacaccgcaccgatcataaattccagcagaatactggcggacaccggtgccactgtaaaactcagtaacaatacaatgaacagaatcggcaatactgcctgtatggattcttttgttttttcttttctcttttccaaacaatccctccttcttcctgcatattttcatacaatttatatatgtatgccatattatcatacactagaaggaaaaaccagcaaattcttcctaagatttagttaaaatattattttttaaaaccggcatgcggaaaatctgtatcagcagaggaatgaccataataaaccatacgagtggttccgccacgattacacctgtgtagccaaaccacggaacgagtgttgctgcaatcacgattttgccgatcatttccagtgaacttgataccagcggtgtaatatggtctcccagcccctgcatggcattacggacgacacatatcactgccgtgacaaaataaaacagcgtatcaaacttcagataattggttgcattcttcagtacttcggcatttttgcttccagttaccatgtaaaccagccagtctccgattgtataacttgcaacaatggtaaagctgcaccagatacaggtatataaaattgcaagcccgattcccttttttatccggtcaatccgtcctgctccaagattctgtccgcagtatgttgccatcgtctgtccgaataccgtaaacataatcataaacatttccgatattttgcgggctgcggtatgtgcaacgataatgttctgtcccagtttattgattgccgtctgcagcgtcagggaaccgatattgatcagggaactcataaaccccatggacagacccgcgcttagcatgctttggatcatctgcggctgtggctctttgaaatcgtccccggacaaccggagcagttcataccgttttatcatatagatccagcagatcacaaacgccaacgcctgtgccgaaaccgtggcaaccgcggctccccttacccccgtttttaaaacgaccacaaaaaagagatcccccgcaatgttcaatatgacagagattgcaagaatcaccaaaggcgtaatggtatctccgagtgcacgcagtgcagcagcgcaggcatcataaagaaatgttgcaatcaatcccgcaataataattacaatataagaacccgccattgtccttaaattttccggtacatttaaaaagcgtaaaatcggctgcagaaaaagcagaccgagaaccgtcagtcccgcagcaacggcaattccgagtgtcagtgacatggcaaacgattttttcaccccgcgcagatcctttgctccgaaccgctgtgcagtgatgatggcaaacccattggaaagccccatcagaaagccgatgatcagattgctcagtgaacttgtggcaccgacagccgcaagtgcatcttcccccagaaacgttccgacaatccgggtatccaccaggctgtatgtaagctgcagcagattggccagaaaaatcggaagcgcaaaagcgagtattaatcgggaaggttttccttttgtaagatctttcattttattacctcgttaaaaaatttctcttttttcataaaataaacatatttttgtcgaaaataataatatcacaatttgtaaaggatagatactgtgaaaacaacaggaatcgtaatttgttattgtaagcaatcatcttccggaacttgccagccgcctgcaatttaaaattacagaggaaaatccggtcagggatttaacccctgttcccgctgcttccggaaataggtcatcatctccctagtgagacttaatccttccggatcatccggcacatcccggtaatccacccattcggcaagtgacagttcctcttcttcgagccggatctcaccttcttctgccagatcgcagaaaaatcccatcagaaggttactgtcaaagccccatggctggcttttataataacggatatttttcactttcagcccgacttcttccatcacctcccggtggacagtttcttccgcggtttccccgatttccgtaaacccggcaatgagcgcataccgtttgtattccctacctgcatactttgtcatcatgatctgatcgttatttgtcagtccgatgatgactgccggcgcaatcttcggaaaaaccatattgttacagaccggacactgcaacatgcgctccgtgcggctgtgtacaagcggatgtgcgcatctgccgcagaattgattatcccggtaccacacatacagatgccatgccgttgttgcggcaaatacacgctccttcggtttcatggaccggaccgcaaacagtttatgatacataaatcccggaatttccacatcttcataaagctctgtcagataaaaagatatgtcatccacggaaaacagatataccagtccgggcacttttttgtgatgtgtcttacagtattccacccacacgtgatacttaagaaatgtgatctccccctcgtttttcagataaaccgtccgatcacgaaatgccagtatcctgctgtcggcatccggttctttcatttcaaatgcattgtctaatttcattggataaatatcttgtatcatgattgattctctcttttcctgatcttgtcattgttttgtccgcgtctgactccggtaatgtcagatcaaccgcataaattatcgcataaagcctccaaaatatcaaattttcttgacgaaaatccgggatacggctatactgtatatttatctatctacacacaacagggggattttatatgaagatacaattatccgaacatttcacttacaaaaaattgctgcgcttcgtccttccttccatcgtcatgatgatctttacttccatctacggtgtagtggacgggctctttgtttccaattacgtcggaaagactgcatttgccgccgtcaatctgatcatgccgtttctcatggcaatctccgctttaggcttcatgatcggtaccggaggaagcgcgatcgttgcaaagacattgggcgaaggcaaaaaagagcaggcaaacgaatacttttccatgctggtatacctcacgctgatcggaggcattgtcctctccgcgctcggcatcctcttttccccgctgattgcccgcgggcttggtgccgacggtgcgctgttgacaaactgtgtgctttatgcccgcattacgctgctctccatgccggcctttatgctccagaacgtattccagagtttctttgtcaccgcagaaaaaccaaaacttggtcttggtgtcatcgtcatcgcgggtgtcaccaatatggttctggactttttactggtaggagtgttccagatcggtctggccggtgcggcatttgcaacggtcaccagcgaatgtatcggtggtctgtttccgatcctttattttgcacgcagaaattccagccttcttaaactcgggcgcacacactttaacgggaaaatttttctgtgcgcctgcggaaacggttcgtccgaactgatgaccaacctttccagttccattgtaaactctctgtacaatattcagcttatgaatcttgccggagaaaacggtgtggctgcgtttggaacgatcatgtatgtaaactttatttttattgcaatttttctgggatattccatcggaagtgcgccgcttgtcagctatcactacggagcgggcaaccatgacgaattaaaaaatctgttcggaaaaagtctgcggctcatcggaatctggggactcatgctgtttattctggcgcagctgatcgccagacctctggccgccatctttgtcggatatgatgcggatctgttttccatgacccaaaacggtttccgtatttactgcattgcctatctgatcaatggatttaatatttacggttcttcgttttttacggcattaaacaacggactgatatctgctgcaatctcttttctgcggacactggtgttccagctggctgccgtactccttctgccactgcttctcgacatcaacggaatttggagtgccgtggcagtagcagaacttctcacgttagggctcacggtaaccttctttgtcagaaaccgcaaaaaatatcattatgcctgatccttttttttgcgaagtctgattaccagttcgtatacctccggcctgcgctcccgcagatgctcatccagcagatgtctgcgttcccggaaacgttctgccagttccggatgttcctgtgcaatccggtcatgtacttcctgccggtgttcttccagcctttttgccagtgtctcctcatctttcccggaaatattgacaatttcctttaaatgttcttccagatgctccagccattcatcctcatccagcgcctccatatgggaccagcgtccgtgaatcagctcctccacatccttatccgatgtcagatgcgcaatctggcgggcaatctgtttttccatttcctgttctgcctccgaaccaaatgcccagacaaattcctgcacccggttatctgcccgcttccgggaggcgcttttttcaacattgtccacaccgccctccagcggatacggacgacgtatccccatatccttaagtgcaatatggatggttctgcgcacgcagccttcctccatcatatacccgagtccgagtctgcgcagctgttcgttcacctccacaatatgttccgtcatataaaaccggatacctttttctttcagggagccataaagccgctccagacagtctgccgccgtaatatcaatactcccgatgcctcccgcatctaaaatcaccgcacgggtatcctcgcggatggcatcctcaatatctttctgcaataccgaaacattggcaaaacacagattactgctgaaccggtaaatgaccacatgctccacggcatggatggaactgctctctttcaggtcccggaaatgactgtgtccggtctgtatgccaagaaaacaccgcgccggttttgccgtacggataatcatctcggtaaaggaaagcatgatgccgatcaaaacaccattgatggttccaagcagcagcactccaaaaaatgcaccaaaaaagatcagacattccgtgcggctgactttccacaaacggactgcaagttcaaattccgtggctccaagcaatgcggagatcacaatcgcggtaagcaccggaaccggaagaaatccgataaatcctgttccacacaaaagcagaatcatcatggaaattcccgccacaattcctgtcagctgggttttcccctgatactgttctcccattgcggtccttgatacggacccgttgatcggacagcatccggtcagagctgctgcaaaatttccaagggaaaatgccagcaattcctgattgtcgttgatccggtagcggtttttctgggcaaaattattttctgccagaagagtctctgccataatcactactgccaccgacagactgatcgttatggcatctttaagcggcacaactttaagtgctgcttctgaaccgctttctatgtgcagatcaatcagcgctcctccgatcagtgccgccggagctgcatccacaccaaaaatgaactgtggtgaagtcgaaaacagtgcaaacaacaggatcggaaacaccgatccatacagaccgtataccgccggaagaccggcaatctgcgcatatcccatggaaatcgggatggaaacggccataatgataattccggcacaaatatctttcggcaggtttttcttctcataatgctgcagtgtctgtgcgattgtcactttcatcctatccggtctccaatctccggaaacggaatcatcgccggctggtcatttctgtgctccccgatcatcttttccatccagaccatatcataccagcggccgaatttatatccacactgatgaaaggttcccaccatttcatatcccagcttttcgtgaaaccggacactgtcttttgtcagatattcgtcctcgatctgcggataggcaatacaggcattggcatttaaaatcccctgctgccgtaaaatctgttccagtctgtcatacaatctgcgtccaatgccctgctgctttgcctctttgcgtacatagatggacgtctccaccgaccagtcataagctgcccgctctttgaacggactgacataggcatatccgaccatctcatggtctttttccgccaccagatacggataccgttttaatgtattcgtgatcctttcctcaaactctccgacggtcggaacctcatattcaaatgtgatcgccgtatgttctacataaggccggtaaatttccagcaatcctgcggcatcttccgcagatgcagttcgtatacttaattcttttcccattttcatcctactttcttgcaatgcggtgcagctgcggccgcagcgtaatctctggcacaaccatgccctcccgctggtcaagcacataggcaaccgcctttgccacttcatccggcagcagataactttccggctcctccccacaggtaaaatccgcatcccggtacagattggtatctgtcatgtccggatgaatcgtcgtcaccttgacaccgtacttgcgtgcttcctcaaacagactctttccgaagctggacagtcccgccttggttgccgcataggcacagccatgcggactgctctgcttggccgtcacggacgagatattgatgatatatccatgatttttcttcagcacccgaagcagccggttcgtcagaagcaggggaatctctaggtttgtacggaccagggcctgtatctttttgggagtcagttcctcatgcagaccataatgtccgactcctgccgcattgacaagtacctcaatgtctgccgtttttgtgatctctttcaccgcatcgcataatttctgttcttctaataaatcgccttctaccggatgaaatgccgcggtctgctctacaaattcccttgtctgttcttttgcaaaatcccgtccaaatccgtagacttcataccctttctcacagagtacccggctgattgccagtccgattccggaactggcaccggttacaatcgctgccttactcatgatatatgttctccttgttcattctctgtgttaattccgtgatcataaaactttccatttcctttaataattccggtggatactgatataccccgttgcaattgacataaggatactgtaccgctggtgcaaaaggttctacccgccggagttttttcatatattcctgtgaaatccggaacgttcccacacttacatcaaccagtttctcccagccgtcatgcaacatacggtcaccaaaaatacggtcaatctgacttagcaattgcagataatcggtcttccaggacgacagatacagcatcggatcaaagcacaggcgcaccggaaatccttttttaagtccctccgcggcacagactatgcgtgcaaacgccgaaggtgtttctttctcaaacgcatctatcatcttctgcggagacagggtaaacgcatagatcacattggacagacagggcagatcccacatcgcatggccggcacattttgtccggatttccagctttaagttttcatgttttgcagcatatgcactccagagtctgacatatcctgtcacagcctccatggcaagcagatccgcatcataagaaatgcacacatacatattctgtgtcttcagaatatggtcaagttcttccaggtaatcttcgatatttacaaaaagcaccatatgaccggacggatacattcccttaagataacagtagctgcaatcatagatgcagttcatcattgtggaacagtaataaaaattggtattgccaaaatcctgacagaccggtgctccttcataaaaaaaatgatcggttttttctgccagaatgagagcctgtgcctgatgctgccggacaccgtcctgcccatgccggttaaatacatccttgtaatgttcaatctccacaatctgtgcctgtggaaaccgcaaaaggatctgttctgtacgcggatgattgcggatgcggcgttccacataaatatgggaaaaccgtgtattataacacacgtgctctaagttcttcaagaatcctctttccttcccgtttgtcttttgccggcagccggcctgcctgttcatattcccggtaccatccggacatggtttgcattccggatgcttcttttgcttcgcagagtgaatgatacaaaatcatctgccggatctgcgctttcattgtttcagaaccatgcaatgcctcctgccacagctttgcctgttcttctacctggcttctaaatgcttcctgcatgctctcctgcctgctgtttttttcctgcattgtcaaaagctgccggataaatgttaaaacctcttctgctgcccggtccatgatctgtgaaaaatgttctccactcccggcactctgcggctcctgtgttgttccatgatcggttactaccttgagaaacagcatctggtgcggcgcatagtaatagtttcctgcctgatatattgcagcagcctccatatccaccaggatctcttttcctctgtcccccgccccggcatctttattcagaaactgttggaaagatttctgatcctgtaccgttggaaaactgtatagttctgcttccccaaacggatgccggtataaaatatcgggataaaatgtacgtccgtctaccgtttgcgtcagtttgttacaaagcgaaacagtgccgacaggaatatttttcctgccggcacagctcccataattgatcagaaaatccccgctatccggttcttttctggtcgaacactctgccaccgccgtggccgccgcaatggcggatgccccggtaatgacaatctgtatttgattgttttcatccgaaaatacctgaaaatgattctgtgtcatatcttttttcaaagaaagcgcccggatcagttcctttgcctccggataaagagctgtaaatattgtgatcaaatagcttttccttcactttctaaaatgtgtcttgccacataaacaccactggcagatgcatgggacagtgaatgggtcacaccactgccatctccgatgatataaagtcccggataccggctctgcagattctcatccagctctacttccatattatagaattttacttccacaccatacagcagggtatcatcgtttgcggtacccggtgcaatcttatcgagcgcatagatcatctccatgataccgtctaagattcgcttcggaagaaccagacttaaatctcccggtgttgcggaaagtgtcggtgtcacaagcccctcctcgatacgtttctgattactgcgtcgtccgcgcaccagatcaccaaaacgctgtacgatcacaccaccgcctaacatgttcgataatcgcgcaatgctctctccgtatccattgctgtctttaaacggctcggaaaaatgtttggcaactaaaagtgcaaagttcgtattctctgtgcgaagatccgggctgtcatagctgtgtccgtttaccgtcacaataccattggtattttcatttaccactatgccatatggattcatgcagaacgtacggacattatcctcaaacttttccgtacggtaaacaatcttgctctcataaagttcatcggtcagatgggaaaagatcactgccggaagttctacccgcacaccgatatccacacggttggatttggtaggaatttccagatcctcacagacggtttccatccacttgcttccgctccgtccgactgacacgatacattttttgcacgcatattccgcatcttttgtcgaaactgtgtaaccgtcctctttgacctgaatcttctccaccggggtatcaaagaaaaagtccatgtgttccttcatctcgtcatagagatttttcagcaccacataattgacatccgtgcccagatgacgaaccgatgcatccagaagcttcagcttattctgcagacacactttttttaaatctgtgcccgccgtggagtacattttggtaccctccccaccgtgggacatattgatggtatccacatatttcatcaattctagtgctttctgtctgccgatatattcatataacgtaccgccgaaatcattggtgatgttgtatttaccatccgaaaaggctccggctccgccaaatccgttcatgattgcacaggtcttgcagctgatacagctctttaccttttccccatcaatcggacaatgtctctgttccaaagaatgtcctgcatcaaacactgcaatctttaaattttcatcctgcttcatgagctcataggcagaaaaaattccacccggtcccgctccgataataattacatcatacattcgatgccacctccggctttttattttttctcgcggctctcattgcgatactgcaatggagtcctgtcaaagcattttttaaacgtacggttaaaatgctctacactcggatatccgacaacatccgcaatattttcaaccgtcatattaccgtttttcaacaatgtcttggcacgcttcatacgaatatgcgctacatgttctccaaatgtcttgcctgatttatccttgatatatttggagatataaggctctgacaaatgaaactgtgctgccatgctctcaagtgttactccctgataattgttctggataaagttaagcatcgcagtcagacgctcatcctgtgcgccatcattttgtgcaatctgcggtaatttatttacagcaactgtcagtgcatggatggacgctttgataatatcctcatccataccgacaccccagtaattctttccttcacaggtaatgcccacataggcgattgccttagaagaagatccatgggacaatgcatgttcttcataggtagaaagttcgtagctgataccgaagaactgcttgattgtgttgctcacggcgtccagacgaccgtttccatttgcatcgacgatggtcttctttccgccaaagttaatttctgtctctgccataataccatcattctgcttgaaatggcaagaatcgattgtaaagtacggcattttgttcatatagttttcttcaaagatctcgtatacccactgtggagaaagttccttgtgttcttcatccgatacctgtttcactgcatatccgacttcttctttcattgcctgcggcagagaaatggagaaattctgctttaagatataactgattcctccctttccggactggctgttgatacggataacatcggcatcgtaagttcttcccacatccatcggatcgatcggcagatacggaaccgtccatgtctttaatttcttttcttctctccaggccattccctttgcaatcgcatcctgatgggaaccggagaacgcagaaaagacaagatctccggcatacggagaacgctcatggacatgcattctcgtcagacgctcatacgtctcacggatgcgtggcatatctgcaaagtccagtttcgggtcaatgccataagaaaacatgttcatggcaagcgtaatgatatcgacatttccggtacgctctccgtttccaaacagcgtgccttcgatacggtctgctcctgccagaagtcccagttcagcatcactgacaccgcagcctctgtcgttgtgcggatgaagactgagtaccacattttctctgtggtgcagatgcttgcttacatattcgatctgtgttgcaaaaacatgcggcattgcagtctcaacagttgccgggatattgataattgccttgtgtgcggcatccggctcccatacatccagaacggcattgcagacatctactgcgtaatccacttcggttccgtggaaactttccggactgtactcaaaagagaaatctccctctgtctcactggcaagtctctttaacagctttgcaccatccacagccagctgcatgatatgctctttgtcttttttaaacacctgctcccgctgtgccacagaagtggaattgtacagatgaataactgcatgcggagcccctttgactgcctcaaatgtttttttaatgatatgctcacgcgcctgtgtcagcacctgaacggtcacatcatccggaatcatatcccgctcaatcagcgtacgcataaaaataaactctgtttctgatgctgccgggaatccaacttcaatttccttaaatccgatatccacgagcatctggaaaaactccagcttctcgtcaaggctcatcggctcgatcagtgcctggttaccgtcacgcaggtccacggaacaccagattggtgctttctctatgtaatcttttttggcccagtcgtattcgcagactggaggaagaaaatactgtctttcatacttgtcaaaatttttcatgatgtttcctcttttccaatattaaatattatcaatttcaatgagtaattttaacacataatctcccatttggaaatgattaaatttaagcaattttattgatgtttttttattttgttaattgattttgcagccggtgtaccacagatgcctccgcctcagacgcatgcatcacctgttctgcgacctgtctggcaaccggagttacctcattttcttcttcccactcctgcagaccggcatccgggatctcctgttttttctgcagtacataccggttcaggttattgcagtactgcatcagattccggaatccacgcacacgggtcagaagatttttaccgtatgcctgctgctctaagcctgctatggcaatcacttccatacacagatgaagttctccggtgatatccgatgcttccatcagaagatccggccgttctttttttgcctgcaaaaaatatgcctttgctccatccacatctgcccggtcaaaatattccgccagccggcaccggacttctgcaatctctgctttttctcccagcatgcctaccatacacgcatacacccgcagcctgttgtgcctgatccagacatactgtaaaaactccgaaatgaatccgaaaattctccggtgataagaatcctcttcttccactttcacgcgccgatccacttcaaataaaatagaaaacagccattccatataaacatcataaacttctttttttgcaatcagcatatttccgaaataggtgtgcttttgctgcaccagctgctgaaaatccgccgcataatccggataaatctcctgtatcacacgggctgtttcgtccagatataaaatcttgtggtgagaagcaaatccctcataataagaaaaattcagctgcagttctttcgttgtgatcacatcatactgctgcagcagagaaagaatctgtgcctctgtaaacaattttccctgctcattcagaagataccggcggtaatggcaggtaccaactacctttgcatgggagtttttccatacccagtacattcccgtcagttcactgtaataacagtttttttcggaaatgtgatctccggtattatctcccacacaaaaagacagcggggacgatttctcatccctgctgtatgacgaagccgccgctcgtcccacatgaagtggaatatacaacgggtccggtggcggcgtaaatgccttatgcgtcatcacatagatggcagtctgttgatttttatcttctgcgccggtctccatatttttcatgatacattttcttttcttcatacattgcctcatctgcctgattcagatatacatccatattatattcactgtcccacggggcaagaatcacaccgatactgacctctaaagattcccggatcggagaggtttcctccccacataccacggcaatgctctgccggatggattccgcggtgatcccggactcttctctcgtcagcagtaaaaattcatcaccgccaaaccgaaatggcagactgtcttccgcggtaagccttccaagcgcttcccccgtctttcggatgacccagtcaccggctttatgtccatacgtatcgttgatgtattttaagcggttgatgtcgcagaatataaactttgtattgacatgatactcacaatttttctcataaaacttctgtcccagatcttccattccaaaacggttataaattcccgtcagctgatcgatccggtacaacttctgcagtttcagatttacttcctgatactgcttccgctggatataattttccagtgcataacagatattgcggaaaaaggtttccagaattcctgtcctaaacatctcatccacaccagccaccatacagtatcccatccggtgcagctgataatgcagtggcataaacacctgtaccccgccttcttctgtccggttcttttcattgcaccagttaagtacttctctcttacagcttcgataacttttggcttcctgggaaaacagatcatccgtcaaaaagatctgccctcttcctgccccgaccagatctaagaatctccccgtcgcatccatgatctcttctaaagagatccggctggttacccattcctgcatggaatcgagtttggattttgcgtcatattcctgcagatttttccagaaaatccggttacggaacgattccgtatcaaatgggacatgctttgtgcagccacaggtattcccgataaaaaaccggtaggaaagttccctgtgtaccagctttccatctgccttttcatgcagttcgtgcagaagcctgacagcttcatatgccacctggtctctcggccgttcaatggttgtcatcgtcgggctgaaacattccccgtcaaaataccggtcaaaccctgtgattggtatctttccctcgagcgcagttccttttatggtctgcaaaaaagctgccgccatcagatcatttgcgctgataaccgcctgtgggagttcctcccctgcctcatatgctgcaatcatttttctggcatatgtttccccggagcggtactcataatttccataatccacccattccggcataagacaaagccccagttcccgaattttggactctaccccctgttgacgcatctgcgcctcataggtatctttcatcccgttaataaaaccaaatgtccggattccatgaaccccggccagatgccgcacgatctgccgcatggctttgctctgattgattccgacaaaagaaagcccgggaatctcctcttccagagatacacagggctttttactttctatgatccgttcgagtaaccgctgcttgacatccccttctttgactgtggtactcggatacaaaaatccatcgtacgcctccatatctgccagttcaaaaaaatcaaattctgatttattaaaactgtctcctgatcccagtcttccaaaacttgcatacagatgtatagagtcatggaattctttctgtgaattttccagaccgtgatacatatcacgcaggtactcaccgttccatcctgtcgcaaatactgctatcttcatagtcgcacccctgttctttttccttccccatatctggtactattataccaccaatttcagagagcgtcatccgtttttcgacatttgccgacatattcttttcctgtttctgcccgctttacgcctgtttttttgttttccgtcttcttcgtctccgacgcagtttttgtccgttttcctttcgaaagttctggatcgtctcccagatttttgtataatcccgctcgaacagttcttccgagagctggactgccagcgtttctttcggaactgtctcgacaattttatcggccacaaaccgcttgcttttctgcttatatgcatgcatcgcgttcagttcctggatatgcgccagttccggccgccacaaaatctctattttacagttccagtccatctgtgggttactctgcggctcccgcagcatataaaaatcaacctgatcccctacctgttccaccgtaatgatcccccaccattccgggacatgttccttaatatgtgccgcatgccgggttccgaccacgaccagatcatagtcataatataagttgtaatctttcacctggcgatccagccgtgcataactgtccgcatcactcttgatctcaattccgtagagggcatcgtgtaccaccatgaccatatccgcccgtgactgccccatcacctgttcctcaaggattctgtttttcccgtaaatttcttccagataaaatgccagaggttcacggatatctttatcgtataacattatttttccagctttgcatcggcttttgcctggaatttttcattatatataataaaacgctcatgctcaccctctccgatcagtcctgcctcatcaaaagcttttacagaaaacgtcagtgctctgccatctactttcgtcagttcggtttcacaggtaattttcatgcccaccggggaagctgccacatgttttacattcattaacgttcctaccgttccgcttccctcctctaaatacggctgtacactctcccatgcagtcttttccatcaatgcgatcattgcaggggttgcaaatacatccagggcaccgcttcccataacttttgcggtgttttcctctgttaccataatttcctgtgttccttttacgccttcttttaacatatgtaatactccttttcttattttgcattaaataagcgatcgggaaagagtttcgcgatcacctgttctgcataaatagtaacatgatttaaaagaagtgtctacagtttagaaagtttttagaaatgcaccaacacgctattttccggcattttcgcgttcattgttagcactcgttcaaaaagagtgctgattttctattgactttttacaaaactggttttatcattttcattagcgaacatttgtgaatgaaaacaaaggagatgtataacatatggcaaataaacacggatcattatccatcgacagcgacaatctgtttccgattatcaagaaatggttatattcagatcatgatatcttttaccgtgagctgatttccaacggttgcgatgcgattaccaaattaaagaaactggacatgatgggagaatattcccttcctgctgattataaagcaaagattcaggtcatcgtaaacccggaagaaaaaaccttaacatttatcgataacggtcttggaatgactgccgatgaagtagaagaatatatcaaccagattgcattttccggtgcaacggatttcatcgagaaatacaaagataaatccaatgacgatcagatcatcggtcatttcggacttggtttttactccgcatttatggttgcagatgaagtaacgattgataccctttcttataaagaaggtgcttctgctgttcactggtcctgcgatggtggtaccgaatttgatatgaaagacggcgacaaaacaaccgttggtacagaaatcacactgttcttaaatgaggattgtctggaatttgccaacgaataccgtgcaagagaagtcattgaaaaatactgttctttcatgccaaccgagatctatctttccaaggccaatgccccggaagaatatgaaacgatcgacaaggaagatgtaaaagataccgataaagtaattgaagaaatccacgaagaggccaagactgaggaaaaagaaaacgacaagggcgaaaaagaaatcgtagaagtttctccggccaaggacaaggtaaagattgtaaaacgtccggtaccactcaacgataccaatcctctctgggccaaaaatccaagtgaatgtaccgatgaggattacaaggaattttaccgcaaggtatttatggattacaaagagcctctgttctggatccatctgaatatggattatccgttcaatttaaaaggtatcctctatttcccgaagatcaataccgagtatgattccatcgaaggaaccatcaaactttacaacaatcaggtatttatcgcagataatatcaaagaagtcattccggaattcttaatgctcttaaaaggcgttatcgactgtccggatctgcctctgaacgtatcacgttctgcgctgcagaatgacggttttgtcaagaaaatttccgagtacattaccaagaaagtggctgacaagctcatcggcatgtgcaagacagagaaagaaaactatgaaaaatactgggatgatatcagcccgtttatcaaatacggctgcttaaaagataccaagttctgtgacaagatgaatgattatatcctctttaaggatatcaatgacaagtatcagacacttccggaacttctcgttcctgttgaggacgaaaagaaagacgatgaaaagacgaccgaagatgcaaagacggaagaatccaagtcagacgatgcaaaagaggaagaaaaagagccggaacgcagcacgatctactatgtaacagacaaggctcagcagggacaatacatcaagatgttcaaggaacagggcatgaatgccgtaatcctcgatcacaacatcgatacttccttcatcacacagttagagcagcgcaacgagcactatcagttcaagcgtattgatgcagatgtcacagatgccttaaaatccgatgatgcagcagatctgaccgaggaaaccaataccctttccgatctgttcaaaaagacactgaacaacgataagcttacggtaaaagtagaaagcttaaaggatgcggatgttgcctctatcctcacactctccgaacagggcagacgtatgcaggatatgatgaagatgtacgcagccggcggtatgggcggtatggacccgaatatgtttgcagcagaccagactctgactttaaatgcaaacaacgctctggtaaaatatctgttcgaacacaaagattccgaacattccggcatgtttgcagaacagctctatgatctggccatgctttccaaccagccattgtccgcagaggctatgacgaagttcgtaaagcgaagcaacgatatcatgttactgttaaccaaataaaaaatggtacgaaaaactccgaagctgtatgcttcggagttttttgcttctatgatattaaaaattacgaaaaatgtctgcggctccctctcagataacccgcatgcaccagaattgccacggtcgtaccgattaaaattcccaccattacatcggtcggaaaatgaacaaagtgatacagtctggaaaacgcaatcagagatgctaaaatcactgccggaattccaagctttttatcattacataaaagtgcgatagatgcagcaaatccgttcatagaatgcccggacggaaaggaataatcctttgggctttttatgagcagggcaatctgtgtatccagccagcagggtctttgtcttgcgatcagatttttcaggatcagatttccaatgataaacgtaattgccatggatatcaccatctggattccaattttgcggtatttcttcggaatacaaagcgcaaggccaagtacaatccagaaaataccggcatttcctatcgtggagagtcctgtcatgatatggtcaagaaccggctgatgaatcttctgcagtgcatataaaatatcaaattcccatttcatgttgtctctgtattttctcctgttgtaaaatatttctcatatgtgctgaaaaaagaatccgtcccgatgccggacacatcttttaacgtcacatcgtcccacagattatcatttaaacaaaacgtggaattcttcacaaacgtctggtactcgttttcaaatcgttctttttttttctttacacggattttttccttgttttcctccgtcagatctttttcgaatttgttcagacagcggatgatataatacccgtcatctgccgcaatcacatcggaacacgctccgtcatcgagattaaacacgatctcctccatcgcatccggataagttccacgtgcaatggtgcgctcaaactctctcgactgatcgtatgcacttgcaaccgaagcaaaatcatctcccgctgcaagattttcctgcaccgcacgcagtgcttctttttcttttacatagatctgttgtacccggaccactctcgcttcatcatcactgacctcctcatcggttccctgtgtcagcgcatgatacagcttttctgccagtgcatactcttcatatgctgtacggatctctctctcatacagaccgatgaacgttttttcttcctccgtaagtgactggtaatattcttttgccgcgcgtgctgcctgtttcttttcctgctcactcagatgcatgtcctgattttctgccagaatatccatacatgcaatatgtgtcagttcctgaatcgtcacatccttgacatactgttctaaatccgcatcataggattcccagagatccgttccgtacgcttttccatacaggttgcggtaattgcacaaatacagttttgcatatctaatatcatatttatgatcattgatccgcacaatggcattatggtttctcagctgccctgacgacaggcgaatctgtgtatttccaaccttacagcctccgagtgacggtaccgtaagcgctgccataagaaaaatccccgccagtttccatctcttttttttcataccgttttatccttctacgacaagaaaacgaccatcaggaatagcaaaaacctcacttgcctctaacagttcttcctcactcattccggcgacatccatccccgcgtcatcaaaataatcccgcacttcttttatatttttacagacaaccgccatgcagtcctccagaaactcttctgcttcctccggactttccgctaccgcctccgggaaaagttgtgtctggtgttccagaaaataatgtaaaatctcctcatcgtattcgttcatacctttttcctccctgtgaatcactttctattattataacgaaggaatttctctgtgacaatcccttaattccactccatgacgcccagttttttcagttcctgatataaccgtcccaccggaagtcccaccacattgttataatcaccatggatttccttcacaaaagcagctgcctgtccctgaattccatagcttcccgccttatccatcggctctccgccggcaatatagcgccggatttccgcgtcatccaaaggatacatgcagacatctgttttctcataaaatgaagtttccccggttctgccgtttttatcaataaaaacaagcgttactcccgtgtatacgctgtgggtatgtcctgacagcatcgaaagcatatgggctgcatccgcttcatcccgcggtttcccgagaatatttccatcacaggcaaccaccgtatcggccccgatcaccagaatgtcctgcggcgtaaccagctccggatggatttcattgtaggaaagaattcctgcggccacttcttccgctttctgactggaaagttctaacactgccccatccacagaaccagcagtaatgacttcttcccccttcgccggacagatttcaaattccagtccgatctgttcgagcagctcttttctccgcggtgacgcagaggcaagtacaattcgactcataatgtgacaacctccttcaagtgaaacgaatagatgagtttttcttccgccaccattttttttgtatccgtagaaaatacacggcttaatgcatctgcatacagctgaagctgtgtctgatagcgcatcaaaagttcctgcgcctgttttacccggtccgtcttgtaatccagcaaaataattttatcattttccatccagaaaacatctatgattccctgtaccagcaccgtcccgccggatgcctccatctgatgctgcatcacaaacggtcgctcccggtacagatccccacgcacagctgctgctgccatccggggagcaatcggactttccacaaacgcttcgatcatttccggaataacaagtgcataccattcccccggcagttgtccgtttgcaagcatccggtccagttcctgtttcacaaatgcacaaactgctcccgcatcagaggtatctatatctgcaatcgcagcaaaatccagacattccatcacccggtgcaccgcggttccccgcatagcaccctgatttacgttttcagctgccggatactccctgtcctcttctcttgcaaagtccggaacatacacttcacggtcttcctgcagaaaatccggcaccacggcttctccctcggacctgtcatactgtaagacaagcgatgcatgcttcagttccgaaaccgaatatttactttttttgccggcctcactctgatatgggtaacggtaggaaaaccactggtcatactgctgaagcagttcgggtttcgcatgatcgatatgctgcagaagttcctcataattttccctgctgtctgccgcctgttccacctcttcccatacaattttctccggtggaaccacatcgagcgtatatttctgcggataagaaagcatggccggaagaatccagtccagataactgcctgcccggaccctctgccggtaactgaccggcttccccggaagtacatttccggtatatccggaaaacgttttttgggcatctttgatcattccggtcaaaaccagtttttcttttgccctcgtcagtgccacatacaatatgcgcagttcctctccgagattctctctccggatccggtctgcaatctccgaccggaacaaactgttttttttcactctgggctgcccggaaatctcacagattccaaggcctaaatccggatgtaccaccagccggtcactggcatccatctgattcatttttcttcccagaccggacacaaaaacgaccggaaactccagtcccttactcttatgaatggtcatcacgcggacaacattggcattttctcctgtggtatctgcctccccgaaatccacttcatatttctgaagcttatcgatataacgcagaaaatgaaacaatccccggtagcttgttttctcgtaatcaaccgctttttccaccagcattgcaagatttgccgcacggcgctcccctgctggcagtgccgccgcataatttccatatccgctaagttgcagaatcttctgaatcagttcatggatcggcagatcctgtttttcccgcagcttacaatacatccggtaaaagtcataaagtgtgccttccgtggcttcctgcatggcatgcattgcagcttccgcaaacgaacactccggattttccacacgaatctgtgccatttcttcctcatccagtcccaccaggggagaccgaagaaccgccgccatcggaatatcctgatagggattatccagaatccgcagcattgccagcaccgtctgtacctccgatgccgaaaaatatccggtcgaagattccacatatgccggtatccccgctccctgcagaacctgcacaaaatctgttccgtagtcttttaaacttcgaagcaggatgacaatatcggaataacgcagcggccgaagttgtccactctccttatccgtcacctgcatgtgctgcttcatatccgcaatacgcgtggcaatcatatgcgcttccatctgtccttttgtcagattctttgtctctgaaagcaattcgtctttttcatccaaaagcaaaagctccggtttaaatcctttagcattctcatcataattttttgccccgtaatacaatgccgcatcccggtcatacgcaacccgtcccagatccggactcataattttgtagaagatatcattacagaaatcaagcacctgtgcacggcttcgaaaattcatatgcagatcaattctctgctgcagactctcttccgtcgaaaaagatgcatatttatccataaaaagttcggggcgtgcaagccggaaccgatagatgctctgcttgacatctcccaccataaacagattatgcccgccttccggctccatggaaatcgcacgcatgatctcttcctgtacctggttgctgtcctgatactcatcaatcatgatttctgcaaaatgtctgcggaattcttctgcggtatgccgtggctgctttgttttttcgtccacgagaatccgcagagcaaaatgctcaatatcggcaaagtcaacaattctcttctttcgttttgccgtttccattgcctgtgtatattcaagtgccagccttaccagctcttcgagaaacggacacaagcgtttctgctgcaaaagaagtgtctccagatccatcgcaaaatattttttctgcagcgtttccacttcttttttcacatccgaccggatctccatgaccgtttccttttttttgacatccccggagaatttgcggatcggtgacaattttccaaagaccagaccatttaaaaatgtctgtacctgcagatatccctgcagattttctgcctgctgcagctgcgtcagatccgcttccagtgtctttgcatatgcctgcggtccatccggctcattacacaactgcagtgcatgtgtcatctgtgtgcacatgtcacacaacaaaagcctggcatgttccgcaatgtcctcaagcatctctgtctgcaccagttcctgtgcatgttccacctgatacggttcggtgagttttttcatccacgcctgcggccacggactgctcaaagacatccggtaaatctttgccaccatctcccgcaccccgtggtcgtttctttttccggcataggcatcgatcagtgaaagaaacgtcttttcctgccgcgcatagttatcttcaaacacctgctccagcacgtcctgctccagcagccggatctctccttcatctgcaatcctgaaattcgggtccagactgatctcttcaaaatgattccgtaccacaaaaaggcagaaactgtcaatcgttgtgatcatggcattgtgaatcagtgccgactgtctgcgcaaatgcgtgttttggggatctttttcacattctgcctcaatggcagccccgatacgctcccgcatctccgccgccgctgccttcgtaaatgtcacaaccaaaagccggtcgatatcaaccggattctgcgggtcgagaatcctttggataatacgtgccacaagcaccgctgtttttcccgatcctgctgccgccgagacgagaatatcccggtttctgaaatcaatgacgttctgctgttccttcgtccatttcatctgatcgctcctcctttcccctgtttctggcaagctctgtctgcatctggtcaagcacttcttcttttttcatggatgcaaactgccggtattcatatcccggaatttttgcatccatcccgcacaccgaaccataaggacaataggtacagctggtttctatatcactccggtaaggattcaccgcaatatttcccgcatagatggcttccccacactgccggatctcgtgctctacatagcgggtaatcaccgcaaactcttccgtcgatgccacttttgaacgcgctgtggaaatttcaccgtttttcttgatttccacggggatcatctgcgattttccctcaaaattctgatccatggcacgatagatttcctctccggaattcaccagtccatccggacgcagtgcgaaaagcagcgcctgctcggcctcttcgtctgacaatggagtatccgattcgagtaccggatcatcaatgtgataatagagaattcccccgggaaggatttcttttttcggatgctgtccccgcagcatttccatcgccgcatccatataaaccaccagctgcagctgcagtccacggtacacacggatcagatcgaactttgtatttccggatttatagtctattactttaatcgaaattttattttcatcttcaaaggtatccagacggtcaatccttccttccaaccgcatggtcacatcatgcgataaccggtactcgagactttcctttccctccagttcgtcaaatgtcacctcaaatttttccggtacaaactgccccgcacgcacctgtctggtcaatgcccagaccgtctggtcaaaaatagcaagcatccgttttctctgataggcattttctgccgtatcgcagaccgccatacccggatacccggcaattgcctcctgcatggcattctctgccatctgccggcgcacggcatccggcaccacaaaccagtcatattccgattgttccagcttccggctgtagcgttctaaggccgtatgatagatatttcccatatccacactctcaaatgcactggtctcacgctccgtaagttttaacccgtattgcagaaaatgtgcatatgcacaggcggcaaaccgttccagccgcgtaatacttccgtacggatgtcttccgtacagtgcaagtgcaaccgcccggctgattggctctccctcataccgtgtatacggcgcatgcagaagtttgcggatcttctcctgcttttgcatatcattctcctgcaggaaccagcgggcaagcgcataccaagcttcttcgtgcggtccgaagacgagataatcttcggcagcctctttggtataaaaatctgtatgcgcctccatatgctccggttcctgcaatttcagtgtcggaaacagtttcctcaaaactccggtcagataagaaggacggatggcttttccctcactgtcaacctttgcataactgacatataatttttctgaaggtttggtaagattgcggtacaaataaaagcgctgaataaatgcctgctcccttgcccccggtgctaactccactttttctgccagaagttctctttcgtattcggaaataattcctccggcatttgccgctttcggaataataccgtcgttcacaccgataaaaaataaaatcctgatatgatttaatcgtgtacgttcgatatctcctatcgtaacactgtcatagcccggtggaatcacagccacgtctgcagcggaaagtcctgcctccagcacttcggtaaaatcccggatctgcaatggctcctcccccagtaatagattatatttttccagaagttgcatcacgattgtataaatctgtgcatattcccgggatctggtttcctctccctgcgccagaagctgctgttccctgttccataactgatgctgggtgtccagctgtgtcagcagctcatacaatgcccggatgccatccgaaacacgggcatcttttcgggcaaatactgctgcaaacggctcaagatacccatatattttttcccggagtttttcgagctgttccagatcgtaaagcgttttctgccgtggcatatgcccccatcgtctgctccacgccgctttgccgcggataccggttgcaaccagataactgtccagccggtccagatcgtcctccgcaatatcacagaatccacaccgcaaaaagcgcatgactgcctcataactaaaattcgtatccacaatttcaagcgcggcacgaatacattcaatgaacggatgaaataacacttctttggtcgtatccataaaatatggaatctcatatttcgtaaaaaccggatccatataactctgataagcttccactgcgcccgtcaccacagcaatttcccgatagcggtatccctgtctgatcagcgcattgatctgcctggccacaagaatcagttcttcctgtggattttttactgcggcaagatggatttcttctaccggcttggtatattttgccggacggggacgaaacagattctgttccataaatgccagtgccggagccagcttaaaacgcttgtgtgcactgtctgtcattaccaccggttccatcacctgcacatgaagttcttctgccatcttcatcaaagacagaatcgtttttttggacagtgcaaataattcttcatttccactgcaatgataaaaatcttctgcagcatcgattgtaagcgtaatgtaaatatgctctgtcacctgcagcaattcccgcatgagatcattctgtatcggtgtaaaaccggtaaactcatcaaataccagcaccgcatcccgcaaagtttccgactgcggcacaagatttttcagaacatttaatatctcttctgccgtcacaaaactatctttcataaaatcacaaaaagcgcgatacatggttgccacgtcgcgcagttttgcagaaagtaccggtgagattgttttgtcctccgtcagatccaccagctgttccggtgaaatccggtactgcaccagctctgagatcattgattttacttccccgatatatcccatccggttcatatttgcccgaagaacggtaagcgtctcctcctgttcctgtgcaagcttgcgcagcaccaggttttttccggtttcttccagaacctgtatgtcctgcatccccatatcatcaaacacacggtatgccagacgcttaaaacttaacacatcaatgttcataattgcatgatttggtgcaagttccaccagtttctgctgggtctgcatcgtaaactgctccggtacaatcaccagataattttttttcggatgttcccctgcctgccgcaccagacgctcatagatgtattctgttttcccgctccccgaacttcccagtacaaattgtaaagccataaccccctcttttttctcccttaataaatatgtgaaaaaatcagcgataccacaaccgtcatcagaccggagactgcaattgacagactgctcattgccccttcaatctctcccatctccattgcctttgatgttcccatggcatgcgaagcagacccgattccaacgccctttgccaccggatcgctaatgtgaaacagtttacagatactctcggcaaacatatttccaatcacccctgtgacaatgataactgcaaccgtaatggttacaattccgcccagttcttcagacaatcccataccgatcgccgttgtgatggactttggaagcagtgtgacatactgtttgtgtgataatttaaaaatcagtgacaataccagcacacacagcgcagaggtcatggcacccgcaaaaattcctgcaagaatcgccttccagtttttcttaagaggctcaatctgctcatacaaaggtaccgccagcgcaaccgttgccggtgtcaggaaatacgaaaggtatttcgccccactttcgtatgtgtcataatccacatgaaaaatcagcagaaaaataatgatcagtgccatggaaatcaacagtggattaaaaatagcgatctttaattttttcttgatcaataccccgatctcataggtaataatactgataaatactccgaaaaatacagagttctgtaaaaagttattcattcttgtcctctttctttccatgatgcatcatctgctgtgtaacctgtcctgacacgcccataaccagtacggtagaaacgagcagcagaacaatgaccggaagcagaatcggccgcagttctccccagctgtcaatcagcccgacacccgccggaataaacatcagcggcataatctcaatcagaaaccgcgcggcttcatgcacctgcggcaatttgaccagtcctgtcatcagtgcaataaataaaagcaccagaccataaatgcttgccggcatctgaatcggaatcaccgcgtgcaggacttccccgataaacgagaaaataagaatcatcaatagttgtcttaaatacttcattttttaactccttctttcgcttttcccattttagcacctttcaggatctttggggcaaaaataaggattgtattaataaaatacaatccccatttttaaatccttctccctatttttcctgtgcgttgcaatcttttacatactgcataatgagatctgccgtaccttcaattccaaaacgcgtatcattaatgcaaagatcataatttgcagcgtacccccagtcctccccggtataatacatatgatactgcttacgccggccttccgtcttctcaatgatggcctccgcctcatgtcttttcaccttatgcttctccatcaggtgatgaatccgggattccctgtcaccacttaaaaacacccgtaccacatcgttttccttctggtacgcataatttccagctctgccgatcagaatacacgatgtctccccaatcagttcatccagaactttcctcggtgtccggtgcacaacactgtcttccccatcgtcttccgcaatgactgccagaagcgttcccgccggattctcaccgaaataatccggataatgctccagaattccctttttctttgcgagttctgttaatgtctttttattgtaaagtggaacattcagtctgtctgccagaacctgtccgacttcatctccataacagccgcactctcttgcaattgtaatcttcatgccgtaatccccttctttcctgttaccgcaatgttagcacaattttatccagaattccagtcaaatgtgcaattgtaatcccataatttgtcattggaatgttctgtgcctttgcacggtcgattctcgatactacatatctgcggttaaacatacacgcgccacactgaatgatcaggtcatacccttccagatcctgtggaaaatctgtgccgctcacatgatcaatccttaaccgttctccaaaccgtttccggagcatacgcggaatttttaccctgccgatatcctcgctcaaaggggcatgcgtacagcattccgctatcagcacatgagagttttcgttcagtgcatcaatctgtctggcaccttccatatagtacggcagatcccctttgtatgcggcaaacagcacagaaaaagatgtcagcatactttccgccggtttattctggtatacataatcaaacacctgggaatcggtaataatcagctttggtgcctgctgcagcatgttgagtgccggaagcagtttgtccgtggtcacactcataaccatacactttttatccagtaattcccgcagcgtctgcacctgcggcagaatcagacgtcctttcggtgcctgaatatcctgtggcataacaagaagcacaagatcttcctccgtgaccagatcccccgtaatcaaacggtttccaaaattctccggcactctgcggctcattgcctcccggacattttccataccagctccggtcaatgcactgactaccagtgcatcttcctttgttttttctttcagatagtttttcagaggtgctgcatccgccacgtccgccttgttaatgaccagaagaaccggaattttacgctccttaaaccaggtgtaccatttcagttcttcctcataggattcgccgcaaaccggacatgcagaaaatacaataattgccagatcagctttttgggctgcaagccgcgtccgttccacgcgctgttctcccagcgtactttcatcatcgaatcccgccgtgtccataatcgtgcacggtcccatcggataaatttccattgccttgtataccggatcggttgtcgttcccgccacatctgcaacgatggaaacctcctgcccggtaaaagcattgataaatgaagattttccgctgtttgtttttccaaatacaccgatatgcagacgatttgcagacggtgtttcattccatgttgcacccatatgcgttctccttcttgtgcgttttgctgaatcagtgataatctccacggtttacgaccactttgtatccgacactttccatgcggcgcgccatacagtgccggcactctgccgcctcatctcccgtacagattttattatcatataatttatatttttcccgcactgctaccggggaaagattcggcatcacaacatttgcccctgcctgaattcctttttccctgcccagcggatgaatggttcccagtgcagttgttgatggcagcagcacatgcggctgcaacagccggataatggataaaagccgaagcgtatcttccattgttcctgcctttttttcgccaaacggggtatccttctggggaataaacggaccgatgcctaccatatgcggctgcaatttccggataaactgcagatcttcatacagcgtatccaccgtctgctccggcgaaccgaccataaatccacatcccacctgataaccgatttcttttaaatcccacagacagtccatgcggtgtttccagaacatttctgccggatgcagttttccataatgcgcctcgtccgcggtctcatgacgcagcagataccggtccgcaccggcatcaaaaaatgcctggtagctgtcgtgctctttctccccgatggaaagcgtcaccgcacaatcgggatactgtgccttgatctgccgtatcagggcacagattttatcgtccgtaaaatacggatcttcccctccctgcagcacaaaggtccgaaatcccagttcatacccatttgcacaacaggaaagaatttctttctccgtcaggcgatagcgttctgccttgcgattgctctttcgaatgccacagtaaatacagtcattcttacagtaattggtgaattcaatcaatccacggataaacacctgctttccgtaaatggcatctgctgtcttacgtgcccgctcgtgaagaaatgcaatgtccccggtatccgttgtctccagcagcagagccagctgatcacgggttatattctgtctgttttcaatttccgttatgatctgctttaacatttgcatacaccgttctggcacttgcgccatccaatctttgaatttttattttgtggattctttaagtactacttcatacgacaacagtgtccgatccggtaccgtctccccttcaatctgcgccagcagattcttacaggcttccattccgagttctctcgcattgaaagacaacgaagtgatcgatggtatattgttctcgagcacggaactgttgtaaaacgatgccacacggatatcctgcggcacttttatgtgttcctgccgcagcttgcgaagtacctgtatgcagatggcatcatccatgcagacaatacaatccgcccctttttccagcacttcttccactgcacgatccataaaggcacggctctccaaattccggtaaacaagcgtttcttccacttctcttcccgcttcccgatatgcctgctggtatcctttataccggttctggttgactacgaaagattcacttcctccgagcagagcgatatgcttcatctggcgcatcagtaaaatagatgtcagttcgcggcaggcgctctgctggtcattgtccacctgtttgactttgcggtaggtagtactaccggttgtaacaaacggaatctttttttctaaaagcagttcaatctgcgggtcttttaaaaaggtccgcagcagcacaattccgtccaccttgcggtttctcacgacgcgttcaagacctgtaatatcattttcctgacagatacacaacagaatgtcgtactcattcattcctgcaatttcctgaattcctgtaatgacttcctgaaaaaacggaagatctaccagtgcataatcctccggcataaccacgcagagattgaatgtttttgactgtgcaagtcctcttgcaattacattcggtttataatcatgctcctctatataagccaagactttttgccttgttgcctcaccgattcttccttttccggatattgcccggctgactgtcgttttggaaacgccaagtgcttccgcaacatccgaaatggtgattacatttccctttttcatattcttctcctaactgcacacctatgcatccattgcatgttaaacggttgcgcagttacattttgcagttttttatcaattttgtcaagtatcccctattcctttgaatttttctgcaatttttgtaatttttcttctgctttctttaatttatcataatttgtgacatacaccttatcattggcagtcagtttatcatacgcatttcttgccttttgcaccgcttctttggaatcctttgtaatggttccgagtgcgtcaatcagttttacgaccttttttgcttctcccttatctgttgcatcggtactttccgttccaggaagttcatacaccagcaccggataattcttcttaacattttcaaatactacctttgcgacttccggcggaagattgatgcagccatgtgatcctgcatatttataaatacttcctccgaacttgctgcgccagtaggcatcatgcataccgacatttcccgcaaaaggcatccagtatgtaaccggcgtctcatagttttctccgcgcaaagttgcatttttctcggtatatgtcacgccatatgcaccggtcggtgtcgcattatttttcgatacatttcccgatacaaaatccgaatcaatcaccagttttccatctttatataagaacatatgctgtgccgtcagattgatctcaacgtaagaatcgccataatcattttttccatgggaattggctgtcatggaataattcagttctctttccactgctttcccggctttgatctcactcgtaatctgggcgatttccttttccgtatcaatcttccatccataatggctctccggaatcgtaaccgtctttccgtaagaagtctttaacgttttggcactgtaacaggtattatatttttttgcaagatcactgacgtatgcttttacacactcctggtccagtaccggttttaactttttatttaaccggaaccagtcaccaaatacggaagcatcgagtacctctttggaatctcccacggtaaatgtaatctttgtctttgcatacccgttcattttctttacggcttttaccagattctcatcatcatctaaaaccgtcggatcttcataaacgccggctttttccagagagaggttctcttttaatccttccaccgcctcctgcactgcctgatacattttctctgcatcaatggtcgttcccatgacgcacccaaccacggtaaatccttccgtcttatcataagaagaaaccgaagcattctccggtgccgtctgtttgtctgcatccatacagtccaatgcatcgatctgtgtctgcagcttatctttgtcatagtcgacaagtgttgtatttttcaatgtctgtttctggaaaatttttaccggccatgcaaacatattctgtgcgtgtaccagctctgttatttcgtctccccactgtggttccagcgaaatatcctgtccggaaattttttctgtatgcttgtctcttgttgctatctttaactggtaggaatggatttcttccgtaatctcatccatcactttctgcgcggtataccctcccgcttttcttccatttaatgtcgttttcgggaaaaagtgattgtggaaataaacggccagtcccagatacaaaagaacagccagtcctgccaccatccatatcagttttcttctctgttttcttttcattcgtgcttttttcaaaattcttatcctccgtcactattgtattatacaaaagcacaagaggttgtcaatgtgccaaatttttaaagttttatgaacattgcgggttttatattgtcgtgcttttttccccgtgctataatcagtttcagaacaaaagaaaaaagatctgcacacaaatataaaaggagtatttatgttgccggaaacccaaagtaagcggacgtttgtgttccgaaaatattatgaaaaatataaacatttatggattttgttatattttttcgtgtacatggcatggtttaactatgtagaaaaaaccgtcacgacacattttcatgtcatccatgtaccgattgatgattatattccgttttgtgaatactttgtcatcccttatctgctctggtttccttttgtcggatggggcatcgcctatatggcattacataataaaacagattactataaattgtgtgcgtttttgtttaccggaatgacaatctttttaatcatctccacggtatacccgaacgggcagtatctgcgtccgacctatttcacacaccacaatctgtgcaccatgctctgtgaacgcctatatgccggtgatactccgacgaatctgtttccgagtatccatgtatataattcgctcggcatttatcttgcggtgacacacaataaaaagctgcgcaaaaacaagctggtctgtctcctgacactgattctgacggtcagcatcattctggcaacgatgtttatcaagcagcattctttctttgatgtatgttgtgcatttgttcttgccgcagtcatgtaccatgtggtttaccgccacaactgggcgcgtgctaaagctgccgccacctcatccaaaaccgataacaatttttctgtggaataataaaagagctggcctctctggtcagctccttttcttttttctttttccttttattttttgcgttctgccgcatgccggtacacggtttccatggattgaagaagttcatcaaaatttttcttctgactctccatttcttctgtaaaatcctccatctgcatccggttgcgttcctcggatttggcaatttcctcatctgcattgcgaagcacaacaatctggttttccatctctttgaaatttggacatggttttaaacgattccattcctgtgcctgacgcgcagcctcctgacaggatttcatcagtttggtcattgccacattgttttctttcagcaatgtaaccatccggtgtacctgctcttccagctctgcaattctttcatccgaatctgccagcctcttatgtgcctgatcaatcagctcatcatacgttcccgcagatacacggatcgtttctgccgccgtaacaaactgttttcctccctctcccatacgcccggcttcaatcgccgcattgagggcaagcactcccatctgctttccgcaatcctgcatcttttccagttcctctcgggtcttttcattttccgccttgagtgcaaccggaaattcgttcaggaatttggatggcgtggtgaaatgtttgttttcctccaccagctgtgccatctcctgttcgatctgtgcaaaattctgcagcatctgctctcttttttccgatgactgtacttcctgctcctgatatgacgccagctgtccggtcagctcctgctccttttctccgttgtctgccgccatttgtgatgcttcttttatattttcctgtatctgggtgattccggctcccagctgctgatatgtttctctgatttcccttgcggttgcatcaaacatatcttttccgtccttcatatgggcaaaaaagccttcatccagctgtgccaggtttctcatccgtaccagtgtttcctgtttttgtttcttttttccgaacattacttgccctccattgcatttattttacaatttctttcccgttttttcaatggaatcagcgataatatttcatctcaagctgcagattttcatttccctgataaaaatcaatctttgctgtatacaccatagaaaataaaatccggttttttctgccatgcagcgcattctccacctcttcctgaccaaacttttcggtaaaatatgcaaacaacgtctccacatccccaaagaaaataaccggaaccggctgtccgtattccgaaagaacactcatccgaagaacattccggttctttcctatcaaccacatgcggctgatggacagattccggtctgcaaacagtggagatggattgtcttttccaaacggctccaaaagtgcaaactgatggaccagttccgtactcgcatatcccaccggcatggccatgtcaatgtgaatatccgggcagacttcctccaccgtaagcggacagttttcattgatttttctgcggaatttttccacattttcttctggaagggataaccctgccgccatcggatgtccgccaaattttgtaaacagttccgcacatccacacatattttcatacatggaataattttcagtcgatcttccgctgcctttgactccctcttctccccgcgtcagcacaaataccggccggttatacatttcccggattcttccggcaatcagtcctgcaatgctttcgtggacatccggcagaaacagaacaagtaccggatcattctcatatccaccttcctcacagagtttctttgccatttccacgccctgcagtgtcagctccttgcgttcctgattcagatcaaccagatcccgggcaatctcttctgcctccgtttcctgcccggtctcaaacagccgaagggcatgccttgccgtgtcaagtctgccggttgcattgacacatggtcctaagacataaccaaaatggtatgcactgatattctccggctgtacattgcatgcctgcataagtgcctgcaatccgatgtttttcgtatgacggattctctttaatccctcttttaccagaatacggttttccccggtgagcgacatgacatcacagacagttgccatagcaacaaaatccagcagatcttccgcttctcttttgtccatatcataattttcatacaatacacggatgacattccatgccacaccggcgccgcacagctctttatacggatacccgcagtcctgctgatgcggatttaccacggcatctgccagactctttttctctgttcttctgccctcatgttcttcaaacgggactgcatggtggtcggtcacaagtactgtcattttctgtgcttttgcccacgcaatctcatcgatagcggcaataccgttatcacaggtcagaattgtatccacaccatcttctttcgcctgttgtaataaatgcaggcttagcccatatccgtcctgtatccggtgtggaataatcacgtccacttttgctcccacacgccgcaaagccgtcagaaacagatgggaggaagtcacaccatccacatcataatcgccgataatccggatatgcacctgtttccggatcttttgtgcaagaatctccaccagccggtccatatctttcatctgatgaggatctgacaggtccgaaaggttcccacccagataaatccggatatttttttctccgattacctcgcggtttctgataatccttgccacaaccggatccacatgaaatttctctgcaatcacataaaaatccgcttttttagcagcgaccatccattgtctcatatgtcactttctccaatcgtaatccctgcggcggtgccgtatagcccgcctgcttccgttcctttgccttaagaagtgccggcatactttccggagcccgttcgcctcttcccacttcaatcaatgttcccgtgagaatccttaccatgttctgtaaaaatccattgccacaatacaggatctcaatctcaccgtctctttccaccagatcaatggaaaaaatggtacggaccgttgattttttcatatggcggtttccgcaaaaagaagcaaaatcatgcgttcccacaagtgcctgtgccgcttttttcattttatccacatcaagcgtttgtccatactgatacaaaaattttcgttcaaatacattcggcaccggacttgtccgtatccggtaacggtaggtcttttccacagcctgatatctgctgtgaaaccggtcatcgacctcctttatttttgtcactgcgatatcttccggaaggtgccggttcagatcttcaaaaatttcctctgccgaaaaatgttcgtccagatggaaattagccacctgcccgattgcatgaactccggcatcggttcttccggaaccgatcacttccaccggatgcccggcaagcgccgaaagcaccatctgcagctttccctgtatggttgcatcggtgctttttaatacctgccatcctttatatctggtgccatcatatgacacggtaattttataatttttcatccgtatttttcctctcttttatacaagttctgcgatacgggaaaccgcaacataaatatctgaaattttataccaggtcggatagtccacaataccggttaccggaagtccgaaaaccgactgaaacttttccaccgcttccctcgtccttgatccgtaaactccgtccgccgtaatcgtcggtatcgccggataagcacgcgaaattcttgccagctgttcctgcagctgacgtacctttggtccgcttgctcccacgcccagatcatatcccggccaggatgccggaattccggaaattccgtccgcggaattaatatacatatcatttccgtaataactgcgcagaatatcaatggcagaatatccctgatcacccagatatttgcttccccactgcgacatccaatccggacaggtcactctctgtccgtcacagtactgtgtcagaattggctgacggacatttggacgggacagataattttcaaacatttcatccaccacccgtgaaatactctggaagaaattccttccataaataaatttgtgatcgtatgccgtggaagatgtgatggtaaacacataccctttgccccggtaccattccgtataaacccggtttaaagtaaatgacataatagccagcacattggcgcggatcgcagcatccggccaggtcgcatagatttcactggaagctacatttttaatataatcccgatagcgcacataataattcgcagctgtggaatctcccggtgctccgtcatgtaccacaacatattccggaattactacacggcttaagacaatttctccggtttcttccaccgtcttaatctcactctccggaattttcggtggatattctccatacagggtatgtgcatcaatcacgatcgtatcaatcggattgcccggtgcatcctgcgcctccatcaccacttcctgcgttgcatcttccccggacaggatattgatcgccgaaaccgtaatgtcccgatagcctgtggcatgcaccttaatcgtatattccgcatacggctggttttcccccggctccatggagtactccagtggaggagcatcaagcgtaatcttctcagtgtttccagaatcgtcggtatccacctcctctagcacctgctgcggacctcccgtataagatatactgatctttgcccctttcaccggaattcctgttgaagcatttgtcaggtgaatctgaagcgttccctcatccacctgattttccactctattctgatccatacatgatctccctctcttcctgccagaaaacctgccacgtttctttgcagtggcatcaaacagttccagacagctgcatttgattcatagtatgcatcttgtaaaaaaaaggttacactgttatactgttgatacataaaataaatcaggaggcttgttatgcacacatttcaaccatatccaatcgataagatggaattcaatccatttaccaaaataggaaaagaatgggctttagtttccgccggagacaaaaccagatgcaacactatgaccgtcagctggggaggcgtgggcgtcctctggggaaaaaacgttgtatttatttttatccgtgattcccgctataccaaagaatttttagacaacggagatctgttctctttgtctttcctgaatgaagactaccgcgatgcgttaaattactgcggcagtcacagtggccgcggagaagaagacaaattcgccgctgccggactgacaaaggcattccggcatgacattccttatccggatgaagccaatctggtatttttatgcaaaaagatggctgccgtaccggtcagcgaagacagttttaccgattccacactgatggataaatggtacagcgatcacgatatgcatatgatgtatgtcggagagattgtcgaagtaactgcccgttaatcttatcggtcctatcatttaaaaacgctgtccgcagtggccaaagaccactacgggcagcatttttatctgcactctgtgctgattgattcgatagcaaccgaacctccgcgcacaacggaaatatgcttaaactttttctttaagatggcaatcagatcgtcatgtttctgctctgttcttctgcactcaagcataacactgccaattccgatatccaccacatccacacgcatggcctgtgcaatctgaaacacttccgtcatctgtgtctcattcagttccataatcttgacaaacatcagctcttttaaccgaagcggaacatttgtcaggtcgatcaccttgattacctcaaccatacgatttaactgctttttgatctgctcaaacgtgatatcatcactctccacactgatcgtcatacgggaaaccgtctcatcttccgtcgtaccaaccgtcagtgactgtaaattgtaggattttccggaaaacagtccggaaaccttcgcaagtacacctacatcattttctacatacaatgcaatccagcgctttttcatttcagacattgctttcctcctattttaaaatcatttcactcatcggatttccgctctttaccatcggaagtaccagttcatcggtggcaatcataaattcaatgatcgtcggtgcatccgtatgcttctttgcctccgcaaacgctgcatcaatgtcttcttccttctctacacggattccgtatgctccatagctttctgccagtttcacgaaatccggaacatattccggacactggtcatttggtcccttgcatccacccggacaggatgggcgccggcgcagacaggtcgcactgtaacgctttccataaaacagttcctgcatctggcggaccataccaagataattattgttcagcagacagatcgtaattccggtaccctgtgttaccgccgttgccatctcctgaatattcatctgaaatccgccatctcccgtgatacacacgaccggtttctttggatttgcaatttttgctccgattgcggccggaaatccgaatcccatcgttcccagtccgccggatgtgatgagctgactctgttcgtccagttccagatactgggttgcccacatctgatgctgcccgacatccgtcacataaatactgtgtggaaactgtgcattaatgtgctccatgatcatctgtggactgatcccacggtccctgcgcatggcaagcggattctctttctcccacctgtgaatctgttcctgccactttgccgtatcctttttctctgcccactctaacagcttttcaagcgccacacctgcatctgcaaccactggcacatccacaaccacattacgcgagatggaagccgtatccacatcaatatgtacaatctgtgcatgcggtgcaaattcatttaaatctccggtaatccggtcattgaaacgggtaccgatggaaaagagcagatcacattccataactgccatattggctgcgtactttccatgcattccacaattgccgatatacagcggatgggtggtcggcactgcgcctttgcccatgattgttgtgacaaccggaacattttctttttccataaatttcttcagcttctctcccgcatggctgatattgacacctccgccggcaagaatcagaggcttttttgcagacttaagcattttataagctttcttcagctgtccgatatgtaccccgtgaatcggcttatatccacggatatccacatgggaaggatactctgccgatccggatgccgtctggatatcctttggaatatcaatcagtaccggtcccggtttcccggtctgggcgatataaaatgccatcttaataatctttccgaggtcttcccgtcttcgcaccgtcacaccatacttggtaatgcttcttgtcatgccaacgatatccacttcctgaaatgcatcgttcccgatcagtccaagtggcacctgtccggtaaaacaaaccagcggaatgctgtcataatgggcatctgccagtccggtaatgatattggttgctcccggtccgctcgttaccagacatacacccacccgtccggtagacttggcatatccttccgcctcatgaatcagtccctgctcatgccgcggcaggatcaggttgatactgtcggtcttatataattcatcaaataaatccgtaacggttccgcccggatacccaaagatggtgtctaccccttcttcctccagagcctttacgaataattttcttcctgtaatatccataaaaatgatatcctcctatatcagtccaaatgtgcgaagtaaaaagatccagaacgtcagcgtaaatgccgcaaacaacgtcgttgcaacaataacactcgccgtcagaaccccatcatttttcatactctttgccatgatgtaacagcttggcgttgtcggggatgccagcataattaaaattgcaataatcttttccccggaaaatcccatataagctgctaccggtaaaaagatcagtggctggattaccagtttgatggcagctgcccagcacgtcggtttgatctttgcgatagctttgcgcccctcaaatcccgcaccgatcacaatcagtgccagcggtgttgcaagctgtgcgacagagttaatcgtcttattgacaatggtcggaaaatgaatccccagaagggaaacgataagtcccagaaaaatcgaatcaataatcggatttttcacgatattgaccaatgcctgcttaatttttcccttatcccgttttccttgctcgtcctgcgcctcaaatgtcagtacaataacggaatacacattgtacagcggaaccgctcccacgatcatcagcggacccatggcagaagatccgtaaatattgttgataaatgccattcccatgacggctgcactgcttcggaacgaagactgtacaaacgcaccacggatactgtcatctttgaccgcaaatttactgatcccccagatgccccagaaacagatactgctgacaattgcacagtacaatacaaatttcagatcaaatacttttgatatttctacggaagcaatatcccgaaacagcataaacggcagtgtcaccttaaaattgaaacggtttgccacggtgacaaaatgctcatcgagcataccgatctgatgcagtacccagcctataaccatcaccagaaaaataggaaatgtgacattgacgctaaagataaaatcacgcattacttctgcactctttcatatttatagaaataaaattccagatcaaaatatgtctgttcttcactgtctgctgtaattttccactccggtttttcatccagattcgggaaatacgcatccgcgtcatatgcatagtcgatttttgtaatatgtgcaacatcacactcatccaaaagctgctcatatattttctgtccgccaatcacatagacgtcattggtatcatacttttccagttccctgtgcagctcttccatggaatgcacgacaatcgcatctttaacctgatacgccggattatgtgtcaacacaatattggtgcggtttttcagcggaagaccatttggaaaactctccagcgtctttcgtcccatcacgacaactttcccggttgttgtctcccggaaaaatttctgatccatcggaatccgtaccagaagctcattatttttcccaattgcccaatttttatctactgctgcaatgatattcatgattttctccctcctgactgctatattgccaccggaatgtttttgatctgcggaccggtcacataatcggtcactttgatatcatccggtgtaaactgataaaaatctttaatctccggattcagccagaattttggtgccggatgctgcttacgcgtaatcagctcttttaccagttccacatgccggtcataaatatgtgcgtccgcaatgacatgtaccagttctcccactttcatgtcacacacctgtgccagcatatgcatcagcaccgcatactggcatacattccagttatttgcagtaagcacatcctgcgaacgctgattcaaaattgcatttaaagtcagtttgtcatctccctgtttctgtgtcacattaaaggtcatactgtatgcacacggatacagattcatctcatgcagatcctgatgcacataaatattggtcagaatccggcggctgaacggattatttttcagatcataaatcacccggtccacctgatccatcattccctcacgatactgatgtttctgtgccagctgatagccatacgcttttccgatggaaccgttttcatctgcccattcatcccagacggtactgtttaaatcatggatattgttggatttccgctgccagatccacagcatttcctccgtacaggtcttgattgccgtcttgcgcagtgtgattgccggaaactctttcgacagatcataacggttcaccacaccgaattttttgatcgtataggcacttgtaccatcctcccagtgcggccgtaccttttcgccctcggtacttgtcccgttctccagaatatcctgacacatagttacaaatattttatctgctaaactcattgttaatcccctatctcttgtcctggacttttacttttcattataccttattctatcaaaatgtctatgagaaaatctgctgtactatcagtttatactccggcagagactggcatttccggatccgctttaaatatttctctctgtccggaaatgcctttgtcagataaaaccagatttctttcaaatgaaaaacgacatctttttccgcacggaaagtatccagacatccctctaaaatttcatcatggaacgcccgcagcctggctttatctgccggtggatttcctttgatttctccaaccagtccgggattttccagtaatcccctgccgatcatgatgcgatcaatagctgggaaagcagctgtcactttcttataatcttccacactgcatatatctccattgtaacagagcggcacatggatctgctccagagcacgggcaaatgtttccatccgcggtgttccgctgtaataatctttctgcaggcgcggatgaataatcagttcttccagcggaaactttgcataggcagtgcagagagcttcccactcatccgggtctttgattccgactctggtctttaccgataccgcaagcggactgttctccagcacttcttccagcaacatttccagttcttccggctcttccagaaatccggccccttttcttttcgagacaacggttccggacggacagccaaaattaagattgacactggtaaatcccagatcttccagctgccgaatcatcatcagaaattcatcggcacggtttccgatcagctgtggcaccagccggatctgctcattattttccgctgccagatcccgctttatttttttgctcattttttttgctgccgggataaacggtgtaaaatatttatctatatatggaaaataatgtgcataagcattgcgcacaatatatcccgtaattccctccatcggagcaagataaaacaacataattttccctccatttttctattataagaattttaccggtaaaagcaaatgatttcccgataagaattgacaagttttcaccaaaagcctatagttacggttagaacgaacttaaaataggaggtgttcgacttggataatcacaacgagaaaaagacaaaacaaatcaaacggatactggctatcattaccattgtttttgtaatcctgatcggatattttatcgggcgtcccctggttcattttgtatcggatcccaaacaattccgtgtctgggtcaatgacaaaggaatatggggagtccttggttttattggaatgaacatcctgcaggtactccttgcggtaattcccggtggtccttttgaaattggtgccggatacgctttcggagtaatccgtggtacactgatctgtgattttgccatgacaactgcaagcgtcatcatctttctgtttgtgcgccgtttcggcatgaagtttgtggaattgtttgtaagccgtgaaaaaatagaatctgtaaaaatattaaaaagttccaggcgttcggagagcatcatttttctgctcttcctcatacccggaactcccaaagacctgttatcttatctcgtcggactgaccgatataaagctctcccactggatcattatctgcgcagtaggccgtatgccggcaatctttctttccgtcttaagcggcaacgcattaaacaaagcggattacacatttgtcattctgatgtttgctgtcatgattgccctgtccatctgcggatttctcttttaccgctcccgcaataaaacagacagcggctccgagaacgacaagaaataaattcagtacggagcacggcagactctctgctgttctccacaactgctgcattcgtccagaactttattaatgcagatgtgacacacatctccatctttgtctttcacacggatcacatgtgtggatacccactgatagtaatctccccgtcccttctgatacagcttgacgcagacttctttccgtccctgccccagcatctgtaacagacgttccctggagaaattgtccagaaacgcacgctggtaattcgggtgtatgttttccaacccgacatcaatcagatcatcgtattttccactgctcggcatgtcatttgccagaaatccgtcgtccttgatcatggtatatgtattttttgtaagatttgctgccacaatcatcggaaatgcttctgacactgcctcaaacactgtcagtacctcctccatgctgattccattcagtgcttcgaactctttaaacgatcttgcactcttcatctgatgcacctcccaaacttcgttttcatttgtttttgcccctcttttacccctgcctttattataaataaaacgcgtcctttttacaatagacaaaacctgcggaatgataaaagaaaaacagccgaacccatatcctctatgtttccagctgctttttcaagagcgatagacggggctcgaacccgcggtctcgaccttggcaaggtcgcgcgttaccaactacgccactatcgcatatgcaaatatttacttttgagagcgatagacggggctcgaacccgcggtctcgaccttggcaaggtcgcgcgttaccaactacgccactatcgcatatgtaagctctctcgtgagcacagataagataataacagatacatgctcttctgtcaaccactttttgaattttttatacattttgaaaaatttataccaatgggaagtttaaaattaaacgcatgaatgtgtattccctgcatagaatataccaaagctggaaatggaggtaacaaatgagtgcaaaaaccagaattgtcgttcttcatatgaaaaaacttgtgtttgcaggtgtcatcacaggacttggtgtcctgcttgtgatcttccttggaatcctgcttggcagttcccacaaacagtccgcagacaatgaagcggtagaaaccatgtacgttccgggtgtctatacctcttctgtcatgattgatggaaatccgttcgatgtacaggtatctgtagacgaagaccatatcaacgaaatcaccatggttcatctggatgaaactgtagaaaccatgtacccattggtccgtcctacgctcgatgaactggcaaaacagattatttccagccagtcccttacggatcttacatattccaaaaacaaccagtatacctgtcgtctgctcatcggtgcagtatccgaggcattggaaaaggcatcacccgatcggtgatgccccacatgcaaatatctgataagcagatcttattgtgcctctgtgtttaatccactcacgtagctggacaatgcagaagtattggtataatacgtctgtgccggcttattatcctcataataattgtatccggtataaccggcccatccaacgatggcaactaaaattgcacatccacagatgataccaatgattttttccgttttctgctttgccatctcttttttacgattggctttttctttcttatatttatctacctttgcctgactcatatttccttctctcctaaatctgttgatggttctattctacacattttcaacagaaaaagcaagtaaacggttttacatattgcgggagatatccaggcacttcatcattgcctcgatcacgctgctgcgcatgcctttttcctccagcacacgcactgcctgaatggtggttcctgccggagagcataccatatctttgagttctcccggatgttttcccgtctcaagaaccatctttgcacttccaagtaccgcctgtgctgcaaatttgtacgcctgctgtctcggcattccaccagccactgctgcatctgccatggcttcaataaacataaatacataggccggagagcttccgctgacggcagtaaccacatccatcagatgctccgggatgacttccgtctgtgaaaatccactgcagagatcccgcaccagagccatatccgcatccgtcacacgtgctcccgcacacatacccatcatgccttctttgaccatagatggggtattcggcatcgtacgaatcacttttaaatttcgtccgagcacttcatcaaaccataccagtgtctttcccggcgcgatggataccagaatctgctcttctgtaagaagatccttgatttcctctaacacttcggcataaaactgtggctttactgccacaaacaaaatgtctgcaaatgctgccacatcccggttgtccgtactgatctgcactccgaactgtgctttcttttcttccagcgttttcttcgtacgacaggaaatcatcatctcctgcggagggcattttccggattccaaaattccctgtatcatggctgttcccatatttccacagccgataaaaccgattttcttttccatgttctatctagctcctataatctccattaatttttacataatcatacgtcagatcacatccccaggctttggcagatgcctctccctgatgcagatcaatattgatataaatttcatcttcctctaagatttcttttgctttctcctcagagaaatctacaccggcagcatttctgcatacggcaatggttcccttggacgatgccagatccacatccactttgttgatatcaaactccgcatccgcataaccgattgcacataaaatacgtccccagttggcatcttccccaaacattgcacacttaaacagtggggaacggatcacactctttgcaataatgattgcggtatcctgatccggcgcaccgctacaggtacactccagcatcttcgatgctccctcaccgtccttggcaagcatcttggtcagcgtcatgagtacctgatacagcgcctgacggaacgtatcataatcctctccctctgctgtgactggcgtattttctgccatgccgtttgccagaatactgaccatatcattggtagaagtatctccatcaatgctcagacaattgtacgtcacctttacaatctcagaaagtgctttctggatcatttctgaggaaatcgcaacatcggttgtaacaaaatttaacgtggtagccatattcggatggatcatgccacttccctttgccataccgccaaccgtacaggtcttcccgtcaagcgtaaaagaaaccgcggtctccttggcataggtatcggttgtcatgatggcatttgctgcttttccatgattctgtggagaaagtccgcgtgccagctcctgcacatgatcacggatcggttctatcggaagcttctgtccaatgacaccggttgatgccacgatcacctcgtctgcctttattcccagctctgctgcagccagatcacacatcatctgtgccttttcttctccgtctgcattacaggtattggcattcttactgttgacaataacagccctcgccttatttccggttgctgccagatgtttctttgtcacaaggattggtgcaccctttactttattcgttgtatagacagccgctgccgtacactctttctctgaccatatcagtgccagatcatttttgttccgatccggatttaacccacagtttaatccgtttgcggaaaatcctgcagccgcacatacaccgccctcgacctgtttcattgttatattcataatttttatctccttctaagttatagtagtaaaaatcctcagcagaatttctcctgctgaggcacctttatctcattccatctgtttattttatgtacttatccagttcatgagataccgcaagcacattgtcaagtttctgttttgcctgctcggcattgtttaaattctcaactgacagatccgctacctgtacggaagaggccgtcacttcttccgttgttgcagaaagattactgatattgtctacaatctgattgtttgcatccgacagacggtttaacatgccgtcaatgccttcgatctcctgaaccagtgtattgacattctcattcattcccgaaaaactctcagatgctttcgcaatcatggaatcctgcgcattggtagcctcaatcgaacggctcaccgccgttgctgcatcctctgcatttttaaacaattcatccagaatctgtgcgatgctttctgtctcacttctggttttctctgccagctgacggatttcatcagccactacagcaaacccttttccggcttcccctgcacgggcactctcaatagaagcattgagcgccagcagattggtctgactggaaatggaaaagatggtatctgcaatactctttactgcctcggtacgctcctgtaacgctttcatggaatctgccactccggagtttgtctctgcgattactgcggactgtttcttcagatgttccataatctccatactctcctgattcagttccccggactgctttgccacttttaccatattctcggaactttccagtgtctgctcaattgaatgctggatatcctgtgtcatggttgtctgtgtctggatattttccgccgtgctttgcgtgctggaagaaatatctttcatcgcaccattgaccacctctgtcgatccattcagatcattgacaatcttcatcacggattccgtacccttacgcacttcttccgccacaccgatcacatcgtctaaaattgcctgctgcttccgctgctcctgctgttcactgtgccgggtatcatggttgaatttctgtgccacatttgttgtaaagatcacagcaaataccagtacccccagtgccagcagatccagtacaagattggttgtcccggctacgccttccggctgctgacggatctgaccaaagacagtcagcgcattcaatacaagataaccgatgccgccgattctggaatatttcggatcaaaaaacaaaatacagccgataaaaggagccagtcccagaaaacggataaagctctccgtataagcaaaagtcatgaaaaatgatacgagatataacccgatcagtgccagatatctcagccgctccgattccggacgccgcttccatccgatgagcaatgcacctccggagactactgcaatcacactgacaaatgccgtaaagcccaaagaacgtactccttttgctcttgatgcccagagcataaacagaataaacgcataaaaaatcagatattctgttacaagaaaacggtttactctctgtatctgctgccctttttccgcaaagcgataatatttttcttttattttcataatcagtcctctccccttttatagttataacacacgaaagtttctgtttccatactagcacagagcaaaataaaatgcaattctgtccgctgtaataatcttattccagttcttccatgacactcttatatgccggacgaataattttgttgcatcccaccagctcctccagccggtgtgcactccatcctgcaattcttgcaatggcaaacaatggtgtatacaattccgacggaatgccaagcatttcatatacgaaaccactgtaaaaatccacattcgggctgacacccttgaaaatatgacgcttttctgcgatcagttccggagccacttcttctatcatattgtaaaggttcatgtctttctggcgtccttttgcctccgcgagatgctccacatagctgcggaacacacgctctctcggatcagacagggaatacacggcatgtcccataccatagatcaatcccttcttatcaaagacctgtccatccagcatctttccaagataggacttcacctcgtcacgatcgctccagtcatgcacattttcccggatatcattcatcatctgcataactttgatgttggcaccgccatgctttggtcctttcagggaagacattgccgcagcgatggcagaatatgtatccgtaccggcagaagtaaccacacgggtggtaaacgtactgttattaccgccgccatgctccatatgaagcatcagtgccacatcaagcacctgtgcctccagctgtgtatactgcttattcggccgcagcatacgaaggaaattctctgccgtggaaagcttcgggtccggtcggtgaatatacatactcgaatcattttcataatgattatatgcgtgatatccatatgccgcgatcatcgggaaattggcaatcagctgcatacactgacggatattgttctcaatggaagaatctgtcgtatacggatcataggccgcaagtgtcagaatacttcgtgtcatggaattcatgatatccttagaaggcgccttcataataacgtctctggtaaaattggtcggaagtgtccggctgttgccgagcacctcacagaattcatccagctgcgcctgatccggaagttctccaaacagcagcagatatgctgctttctcgaagccgaattcgttcggtccaatggatttgatcagtgtttttacattatatccgcgataccataactcaccgtcacatggcacctgttttccattttcatctttgaaggacacaatctttgaaatacgggtcagacctgtcaatacaccctttccgttgacatcgcgaagtcctctgtttaccccatactcctgaaacaatcggtccgagatcgtatcattcgtaatacacatattctgttttgatgctgcgtaatttgctaataaatcttttttctccatacttcactctccaatctgtatagtcttaattatatcgtacttggttctcaaaaaaaagcatttcataaattttttatatctttttacgctttgtatataaattttataccccataaaatttcatcagtgcatcgtaaacattcatttttccatagccccaggcggtattcggataggatacatccgggttcctttcgcacccgcggatcagaatatttccgatctgcaccgaatttaaaagcagtcttctcccacggctgtttccccactccatgatctgtgcacatgctcctgccgcaattgcagaagctgcactcgttcccgtcagtgtcacataatttccaagccttcctatcgcctgcacgcccacagccggagccacaaaatccggttttacaaccgacgcaatggtattccccctcccggaatccagatataaaataccactcttttgatccattccacccaccccaatcggaatttttgccgaagacggcacggtaagtgtcacatccggatccggacgcaaaaacaccacgtctttttctaacattccactcattggcagccagatatgaaattgtcctgtgatcgtggtactcggattaacatacagcgtccagatccctgccgccgggttttcaaaccggataaacaccagctgatccccccgcgtgcgtcccacctgtgcataatcaatttccactcttgtcccttcaaatataaattcctgttcctgatgcgaatttccgggcacattctgcgccggcataagagtgcctcccggcgaacgcaccgccaccacaaacaattccggtgcactggcccacaactcaagataaaatccccgcatccgctgttccacattcacctctaccgcaaccattgaatttccatcacttttcccgtaaaaatgatgtctggcattcgcctcatttccggttgccacaaccgcacaccggcgccatctgcccgcaatatcatcaagaagttccgaaagattgctgccaccggaatggcttccgttgtttgtcccgagaccaaggcacagaataaggggccgccccagttttctggcagtctcttcgagatattcaattgccgccataatgtcattttcctgataggcaggcatctcttgcggaatataaaaaaagtctttcagatatggttttgccggttttaactttacaaccagaagttccgcataaggagccgccccagtaaaaccagcctgcagatcttcacttccgcaggcaatacttgccagcatggttccgtgcccatcttcatccgtcactggaaccagttcccgcggatgttcctgttccagtgcctcattgatctctttttgtgtatattccgttccgtacaaaaatccctgaggggtatttttctcccccgtcggaatactctgatcccagattgagcggattcttgtacttccatcggcattccggaaacagggcagttcataggaaattcccgtatcaacaaatccaataaaaataccctgtccccgaagggacagggctggctgattctgcagctgcaggataccggttgtctccagtgcaagcgtatccagcagtccgaaacattttgggataatcgaatatccgtatgtcttaatgctcagctgcggcacctcgtcccggtcaaaatattctgccacaaatttttcaccgatattttgtatacattctgcccggtcgtcagaaatctccaaagactctctggcaatcaggatatcgtaggtattgttggagcggataaatgcatcacaatttctatccataagaagctcccacacttcttttccgtaactatatgcacaaaactttcagaatagaacttattcttttacacatgccacgccatacggttccagtgtaagaattcccttgatcacctctcccgtcagaagatcaattccctctaccccggaaacaatctgcggtccggtcgtatcattcagataaaatacataccgcataccatccgcttcgcgtgtgtgacgttccacgccatatggaagtttatacatcgaaactcccgcttttttcagtgtacgcgcatacaggtgctgcatggaagcatcatccagccgggccgcgatatacatggcactgccgttttgacatgtgcgctccgtcactgctgccattcctttgtaataatcctgttcataggtaccaagcacgtttgtgccatctgccacacgcagaacttccgcataatcccgtacttccccttctggcatttcggcaaaatgtacgcggttgcggtcggacggatacagtgtatcaatttcctcactgatcacgccaaagagatcctttaatccgtctcccggaaatccgcccagataattgagctggttttcatccacatatccggtcacataggttgcaatcagatgacctccctgctccacaaactgtttcatgcgctccccgacatgcgtatgcagcagatacagcattggtgccacaatcacagaataaccgctataatcctcttcactggaaatcacatccacatccactccgagtgccgacagattgcggtatgctttcctgcaggtcttaatatagttgcgggtggactctgccagccccttcattccatccgttgcccagaggctgtcccaatcgtataacacggctaccggtgcttttacgactgtccctgccagatctttgagtttctttaattcttccccaagatctgccacttcacgaaaaactctggtatcatccgttccgagatgatccacaaccgccccatggtactgctcaaacgatccccttcctttccgccactggaaatactgcaccgtatcggaaccgagagccactgcctgcagcgaagccagccggtgtacgcccggacgtttcattttattaaacggatgccagttgaccagccccggcgcgctctccatgagcataaacggctgctcttttttcagacaacggatcatggcatgatcaaacgcattttctgtcatcgtatctgaaaacgactcctcatcattgtgaaaccgcggataagaatcccaggacaccacgtccagcggctgctgcattttatgatagtccagtccgtcatattctttcataaaattcgttgtcaccggaatctgcggggtacgttcttttaaaatggcaatctctgccttcatgtaatccgtcatattccaggtggtaaaccgtttccactccagattcaatcccataatgctgaattctccgttgcggtacggcggttcaatctgggaaaaatcattgtaagtatgactccagaacgttgtccaccatgccttgttcagtttttcaatatcatggtcaaacttttctgccagataatcctggaaccgctttacacagtgcggacagtaacattccccgccaaattcattggaaatatgccacatcagaagtcccggatgatttccgaattcatctaccagcttattgacgatcacagaaacctttttacgataaaccggtgcactcatacagtggttgtgccgcaccccgtgatgttcacgcaccccgtaagaatccacgcgtctgcactccggatatgcctcatccagccatgccgggcgcgctccggacggtgtcgccagtatcgtataaatgccattggcatataacttatccatgatgtcatgcagccatgcgaaatgaaattccccttcccgcggctcataggttgaccaggaaaataccccaagtgttgcacaattcatccctgctttcttcatcatgcggatatcttcttccagaatgtccggccggtccagccactgttccggattataatcccctccgtgcataattccgccgatctgcggaaataaaatctttttctccatgtttcctctccctttattttgtgttttctatattccggcttgcatgacaggtaaaatacaaaatctgatactccccggaaatttttccaaacagttcattgccatgtgccatcttttcttcatccagattgacaaacggatcgtccagcaccagaaacggtttttccttcggatacatcgcatccaccagcgccagacgcatacagattcccagcagatcctgatatccggcagacagccacttggtttcccgcatctcgccctgctctttcatctgcacctcgatgttggcatccaccatccagtctttttctttatcccctgtcagaagcgtgtaatactttccaaacccgttctcgatcggacccaaatatctcgcagaaaactgctcctttgcattctgtaggaactctcccgtcagacgcagggtttcatataaatgctgttcttcttcctgttcctgtctgcagatggaaagctgctgttctttttcatcccggatatccagctgatcctgcagatcttcgagctgatgatggtactgctcgatggcttcccggatatcctcgctccgctcatccacatcacggatcatggaattgagttcatcaagggaatatggacatttttccaccgctgccagttctttcatattgtgttcctgctcaaacagttctctcttttttcttgcctctgcgtatgctttctgtgcgatccggtactcggttgccttcatctgtaactggctgattcctgctgcaagatcttctccgaaatccattcccgcttcttttccaaatgcaagcaaagagttctgtttccgctcaaattcctgtcttgccgcatcgctttttccggcacggctgcgcagacgctcatattcctgcagctggctgcggagttcatacaggcaggttctggcatccttttctcccggaaccatctgatactgctccagaaaatgcttggtctcctgttcgatgcgcgaagcttctttcgaagcctcttccatggttttttgaatttcttccaccggtccgcggagcttacgctcctcttccagatgctgtacccggagtgcacgcaccttttcttcttcctttgatacctgcaacttgcgcaccacaagaagcacaatacctgccactgccgcaaccaccgataccgccagaagcggaaggaaaaacttatgtacctgtggcaacagaaacgacaacacaccaccaacaacaccgatcaccagcaggataatgccgcagatcatcatcggaagacgattttttaccgtataatccggttcttcccgcttcattgccatcgcttcaaaataggacattttcgtttccagctgcgttttttcctctttcagttttgcaaaacgctcctgttctttttccatttccgttattttttcttcagaaggaatctggtttttgaacttatcaccaagttcctgcaggcggttttcttcttcttcggtcagccccagattaaacaaagtggtttttaacaccccaagcatctgtacatcctggttctgctttgcaaactcctcatcctgcggcacctgtcccggaaatacatccgcaaaagcatccagtgccgctttcttttcctgttcctcctgtttggtggccgcataggcctgcttgattccttccctgcggctctcttcactcgccacctgcaatgcttttgcatactgatcccgaatcccggccagttcttttctctgctcctgtttttcggtaagtttttcggtaatctttttgtaagacgcctctgccgcatcatagccacgcagttcttccgttaacagcgtgatcatattcgtccgctttttcatggaacctgttgcacggtccggtgaaagtttattcatccggtcatgaatctttttctgagcggtctcaaaattattgatatcgtttgtattctctacaagatttcccagcttggcattgatcgcatcagtcgagcagcattcgcagtcattttgtgcaataaatgcgctccttttaaacgacgcactgtccagtccgaaaatttcacttccgatctcggaagagaaatcatgacattccagattggtggaaagatcatataaatgaaaaacatctgttttttctgtttttccaaatgtacggctgatccggtactcttttccctgataggaaaaatccagttcgcccccatacgttcccccctgccacgggcggaataccacacgttctttatcaaacagtccggattctctcttagagtcaaacccgtaaaacatcacccgcaaaaaagcggccagtgtactttttccccatgcattcggttcgtgaaacagattaaccccgtcctgaaattccagatgcagatccgatagttttccaaaattgtcgatatgacaggaacgtaatttcatcctatatctcctccccggacaatgccaaaattccacagcggatcacttctgccttctgctcctgtgacagttcagatccaagtaccatacggataaactccccctttaacgaggcatctttttcataatcactgtagtcgacccgaagggttgtccggtctttcaccttttcaaaataaaaataatccgagaacagattctgcagatactcgcaattgatctccgcatccacttccacctcaccggtcagtacaaatttgacaaggcttcccgacggatactgcgcctgttttacagcttcttccatccgctctgccgcttcccttgtcgtcatgacattgctcacatccacttcaagcgtgtacagcgtgcgggctgccatctgaacaaactgcatctgggcacggcaggtctgctcgtccacatccagtaaaacaaatcctttcggtccacactcgtcaaatccgcgtccttccagacatccacagtaacaccaggtaccgcggttatccagcttgtcctgcatgaaggtatgtacatgtcccagcgccagataatcaatatttttatttttcagctggttcaggctgatattctctgcctgtgtgcggcatgcataatctcccgcctgtccgtgcatcatgacaatattgaaatcttcatgccccagcacaagggaattgtaaacggtcgcccggttgttctccgagagttcgattccgctgatcactatatttccataccggtatgcagtccatgtatcggaaaacaaaagcagattgtccggtacttcctccagcttggaaagaaaattgtcactgtcatggtttcctctcagatataagaaatcaatctggggatgtgtacagatcatgtcccttacggtgttgcgcgccaatgctgatacatttcgtgtatcaaacagatctcccgatatcatgatcagacgcacccctgtcttttctgcatattcgaccatccgtgtaaacgtacggatgatttctcttttgcgctctcttgcctgctcttttgtcaggtttgctgtcatctgggaatccagatgcagatccgcacaatgaatgattttcatacatcctccttatgaattacgaacaaaacaatactgtttctatcatatcatacaatagggaaaagaaaaagacctgatgcccttcgacatcagatcttttatttcggtttttctacattttatgcgtttgcttcctgttccggaagtgccgcaactccacgcatttcaatgagcggtccgccctttttctccacataatcctctgtgatcgtcacttttccgatattgtcatcctttggaatctcatacatgatatccagcatgaactcttcaataatggctcgcagtgcacgggcaccgactttcttttctttcgcctgctttgcaattgcatgcaaagcgtcctccgtaaactccagatccacttcatccatcgccagaagctttttgtactgacgtacaatcgcattcttcggctctgtcagaatacgcacaagcatatcttccgtcagtgcttccagtgaaaacagaatcggcagacgtcccagaaactccggaatcattccgaatttacggacatcctccactgtcactttacagagaagattttcttccttgtcgtatttatctttcagatctgccttaaagccgatggacgcctccttgtttaagcgctccttgataacctcttccagttccggaaaggcaccgccacagataaacagaatattcttcgtatctaccgtggtcatcggaaccatcgcatttttgctgcttgctccaaccggaacttcaatctctgcgccttcgagaagctttaacattccctgctgcaccgactctccgcttacatcccgctgattggcattgcgcttctttgcaatcttgtcgatctcatcaatgaaaataataccgtgctctgcacgctccacatcattgtcagctgcagccagaagtttgctgactacgctttcgatatcatcaccgatatatccggcttcggtcagggatgtcgcatctgtgattgccagcggcacatccaaaagccgtgccagtgtctttaccagatacgtctttcccgatccggtcggtccgatcatgagcatattggacttttcgatttccacgccgtcattggtgtcttccatcacgcgtttatagtgattgtaaacggcaacggacatcacttttttggcatgttcctgtccgacaacatactcatccagacgcgccttgattttgtgcggtgccggaatggaatgaatatccagttccggtttcggctgctcatcctttggtttctttttctttaacttctgtttgttcggaaccgcattctgtagatccgccagattgatcatactgatattcggcatttttcccatgttcatattcatgaaatcgcccatgttaaaggtgccgttgttcatggtatcaaatgttttctgcatacagtcctgacaaatgcagatatcattctggatatgtatcatctttcccgcaacactctccggtctgcggcagatgtaacagacatcttcatattcacttgtattgtttgtatcggatgtcgtggtattttctttattattctggtcttccgccatcgtataaactccttttttacatataacattgccgccgcagtaagcgacggcaaaattattatacgatattcagcctgtaaagacaagttttcccctgttttttcatttttctttaagatttaaagcagttcctttaagattttatttacgattcccggatttgccttgcctttggttgctttcatcgtctgtccgaccaaaaatccgattgctttctcttttccgttgtggtaatcctccacagactgcggattgtctttaacgatctgttcaattgttgcgcgaagtgcatcctcatcgttatcactctttaagccatgctcttccacataacgctccggatcaatgtcctcatcaaatactttttcaaatacttccttggcaacggaattattgatcgttcctgcctctgtcaattcgataatttttgccagatgctctggtgaaaaacggagatcttcagcatccatttcccggtcctttaacagacgcatcgtttctcccataagccagttggaaaccttctttggtttattgcaaatcgcagaagtcgcctcaaagagatctgccagctttttctccgatgtaagaatctgtgcatcatactccggcagaccaaactctgcaatataacgggccagtttttcatcatgaagttccggctgattgtcccggatctgctgcagccattcgtcactgacaacgatcggtaccagatccggctccgggaaataacgataatcctgtgcatcctctttggaacgcatcgcataggaatatccctgatcatcgttccagcggcgggtctcctgtacaaccttttccccggattcaatcagatcaatctggcgggctgtctcggcttcaatggcatgtgcgattgccttaaacgaaccgatatttttcatctcggtacgggtaccaaactctttggcgcccttttcacgaactgataaattgacatccgcacgcatggaaccctcctgcatcttgcagtcactggcacccaggtactggatcgtcatacgcagtttctccagatatgcaatgacttcctctgcggagcgcatatccggctcggacacgatctcgatcagcggtacaccggaacggttgtaatccaccagagataccccttcccagtcatcgtgtactaactttccggcatcctcttccatatggatttcatggataccgatggtctttttcccgccggattccgtctcgatctctacccctccgtcatggcagattggcagataaagctgggaaatctgatagttctgcgggttatccggatagaaataatttttccggtcaaatttgctgtactgattgatctgacagtttgttgccagaccaactgccatggcatactctaccacctttttgtttaagaccggaagcgatcccggcataccggtacataccggacaggtgtgggtatttggtgcacttccgaatgcagtggagcaggcacagaagatttttgtcttggttgctaattctacatggacttccagtccaatgacggtttcatattcttttgacatctcttctctcctttctacgcttctgctgccggactgtgctgatacgttcttgtctgttcaaaactgtaggccgcacggatgatgtttttctccttgaaacaatccccgatcagctgcagaccgatcggaagtcctttgctgtccacaccgcacggcacggaaattcccggcagacctgccagattgaccgaaacggtatatacatctccaagatacatcttcagcggatcactcaaagattctcccagtttcggagcggtggtcggtgccgccggtccgagaatcacatcatactttgcaaatgccttgtcaaatgcctgcttgatcagggctttggtgcgcagtgctttcagataataagcatcataatatccggaacttaacacgaaagatccaagcataatacggcgctttacttccggtccgaatccttcggagcgggacttcttgtacatattgtgcagtccctcgtactcttttgtgcggtatccgtattttactccatcaaaacgtgccagattggagcttgcctctgctgccgcaatgacataataagccggaatcgcatactctacgagacttaaatcaaattcctctacgattgcgcctttttcttctaacgtctttgccgctgcaagaatggcttcctttacttccgggtccagtccctcgcccagatagtcacgcggaataccaatcttcattccctttacatcatccaccagtgccgatgtaaaatcggtttcttctcgttttaccgatgtggaatccttcttatcataagaagtaattgcctccagaattgtggcacagtcggtcacatcctttgcaatcggtccgatctgatccagagaggaaccgtatgcgatcagtccgtaacgggaaacggtaccataagttggtttgattccggtcacaccacaaaatgaacttggctgacggatagatcctccggtatccgatccgagtgcatagtaacattcctctgctgccactgccgcacagcttccaccggaagaaccgcccggtacatgtgcggtattccatggattctttgtctccccataggcagaagtctctgtggtacttcccatggcaaattcatccatgttcgtctttccgagaatgactgcgcccgctttttccagattgatcactgcttccgctgtataagttggaataaaattatataaaatcttagaactgcaggtcgttaacattccctttgtacacatattatctttgatggcaaccggaacacctgccagaggcccggtcagtgtcccgtcatcaatcattttctgtacttcttttgcgcggatcatcgcagactcttcatctacggtgacaaagctgttgatatccttttcttttgcacgaatcgcgtcaagagcagctcttgttgcttcctcaacggtcacttcatgcgcttttattttctttcccagctctaccgctgtgagcgataataaattcatagctgcccctccttactctaccgtctttggaactacaaatgcgcggtcgcggcgctccggtgcgttcgcaagtgtgtcctctccaccatcgccgttttccaccacatcttcccggaacacattctgtaccggaaatacatgggacatcggttccacattggaggtatccagttcgtttaatttatcaatataatccagcatgctctccatgtcttttttcgcagcttctttttccgcgtcagacaattccagctttgcaaggattccaacatattccattgtctcgtctgagattacgtttgccatattttgttcccttctccttaatctctaaccttaatatgcacttcacgcagctgctgctcggtgacttcgtttggtgcaccgcacatcagatcctgtgcgtttccgttcatcgggaatgcgatgacttcacggatattttcttcgttgcgtaaaagcatgatcatgcggtcaactccaggagccatacctgcgtgtggcggtgctccgtactggaatgcggtgtataatgcgccgaacttgttctttaacacttctttgtcgtaacctacaatctcaaatgctttttccatgatctgcatatcgtggttacgcacagctccggaagataattccacaccgttgcagacgatatcgtactggtaagccaggatatccagcggatccatggtattaagtgcttctaagccgccctgtggcatggagaatggattatgggtaaatccgatcttctttgtctccagatctttctcaaacatcgggaaatcgttgacataacagaaacggtatgcattcttctcgatcagatccagcttctcaccgagttcatttctgatcattccggcgtaatatgcagcgcgttcttccttatctgccataaagaaaattgtatcgccaacttcaagtcctgccagtgtgcggaattcttccttacagtcatccggaataaacttatcgattggtcccttgtaagagccgtcttccaatacttccagatatcctaaaccacccatgccaagtccggttgcaaatttaaggagtttctcgtggaaacctttggacatatcggcgtgtacgcggattgcccgaaccgtttttccgatgaacggcttgaacgtacatttctggaaaaagtcggtcacatcgataatacgaagcgggttacgcagatccggcttatcggaaccaaactccagcattgcctgcttataactgataatcggatatggagccttggtcacaacgcttccttccggtgcgaacttttcaaatacagacgaaagaacttcttcaccaactgcaaatacatcttcctgtgtggcaaaactcatctcaaaatccagctgatagaactctcccggtgaacggtcggctctggcatcctcatcacggaaacaaggtgcgatctggaaatatttatcaaatccggataccatcagaagctgcttgtactgctgtggtgcctgtggcagtgcataaaattttcccttgaattttctggatggtacgatataatctcttgcaccctccggcgaagatgcgcacaggatcggtgtctgtaactccagaaatcccatacttgtcattttctcacgcagataagaaatcactttagaacggaaaatgatattgtcttttactttctggtttctcagatccagataccgatatttcagacgtacatcttcgtgtaccacactcttgctggtcattacttcaaacggaagctgggaatatacttctccgagtaccgtcacttcctttgcatccagctcgatggttccggtcgggatctttggattgtaggtttcctcatctctcttttcgatcagaccttccacggtaatagcctgctctttacggattccttctaacagctttccatcgcggataacgatctgcatcactgcatacatatctcttaaatcaataaaagatactccgccatggtcacggatattttctacccagccagcgacacggatcgtctttccgatgtcctgctcgcttacctgattcagtgtgacatctctgtaaatgttactcatcttttctactcctttttctggtccggggctcctcttatgaaaaaagaaaagccccggaatactataattgtattccggggcgaataattcagattatccgcggtaccacccgcattgaaaaatgagacattctcatcttccctctcttacgcgtaacgtgcgctcacgtacgaacctacttccacattccggtttttcaaaaccatcctgcccgtgttcaatccgtctgctccggcagtgttcccataatcatctctttcaaacagcgctctcagtcggtgacgctgtattcctgtcgatgtctgatgatcagagtctccatctatgcattttctgtcgtacatccctgatgtacgttccttttgtaatctgttttatcacacaattccagtgattgcaagaaaaaatttaaaaatactcctttagtgctacaagtgattccacttttttgtatataaatttctccagttcagcatccggctgtgtcagatccggcaccataaacaccttacatcctgcactgtatgcactgtgaattccatttggagaatcttccaccgcatagcattcctgtggctgcacatgaagctggctgcaggcgtacagataaacatccggcgccggtttgccatgggcgacctgccgggcagaaacaatgtggtcgagatagtcatacaatcccactctcttcagcagactgctgctgcgctccacacctcctgcggtggcaatcgctgtacgcacaccttttttgcgcaaatattttaacagttcctctgctcccggttttgcctcaatcggtccctcatcaagcacctgatccgtcagttttctgcgatatgtatgcactttatcatagtcaaaatcttctccatacagctttttaaaatgttccggtgcataaggcatcccaagggaacgcacactgtatgcctcctcatcggtcatatgatatccgaaatgcgccatagcctctttccatttcgcgaaatagtatttttctgtatccaaaagggttccgtccagatcaaaaataacggtctgtatcatgtctttttcctcctgtgtttctgttcaaaggctacccggcgaacaaaagctttcccgactctatacctcaagaaaccggttccactcctgcgtatcgccgcttccggttactttcagcgcgtaggtacggtcgttggttccgtcaatgataaacgtataaacaccgctctgtaacgtcagttcatatatggttccctccaaaagaacctgtgccacctcatcatactttgctttttccacttcctcgtccggatacgtgtgctttaaattcccatcggcatcgtattcgttgtatccttcctcaacaagcgaaatgatttctgcatctgaaatcttaaataaaagttcattggtacgcatcatccggatgtcgcggttgcaggaattttccggacagatttttacattgtccagtaccagatgaaacatgcgctctgtcagctggatgtccccaaccacagcctcgccaaattcaaaatgatttacctcgttaattgtgctgtatttgtattccatgttgttctcctgtgtttttatgattcattatctacaatgaatcctgttatttttcttccctttttatctccacatttccttctgtgtgagaatttttttcgcacataatttctccttgcagtttctgtgccactttttcatatgcgggcaccggaacctgatatctgtgcgccatgcgcaccacttcgtataccagaccatccacttccgacggtctgtgtgccatcacatccctttgcattgacgtggttgcctccggcggaaggttggataacatctgctgatttacggaaataatatctttttacaaccagctccaatgatcagatatttcacccaatgtcactccttacttaccggggaatttcgatttcttttgaaatgtcccctttctgctgtaaataatacaggaatcctttgcatcctgcaaccacatcttcataggtttcatcaaaattgccggtgtaccatggatctgccacatcccttgccccggtaaatttctgcgtgtcttcatagcccgcaaatgaaagcatcttgtatattttatccgggctgtccgtgcctcccgcgattcttgtcatgttccggatatttgcggaatccatgccgatcagataatcaaaatacagatagtcatcccttgtcatctggcgcgcccggtgcggaacaagcggaatgttttcttcgtataatttattttttgtgccgtagtgcggcgggttgccgatctcttcacggctggtcgcagcggagtcgatctcgaactggttgtcgaggtgcagctggtggaccaggtgggtgaggacgctttcggccatggtgctgcggcagatgttgccgtggcagatgaataatactttaatcatctttttatatctccatttaagtcttgtatttcttctcaaacgcttgatatttcagggttttccgacttttgagttttcctttcttttcaaggtatcttctcaaatcttctcgtattttcttgtgtttttccctgcaatcttggtaaatccgttggtaaagcaaacgtccttaccaacgggcttttttaactattcgctatccgatatacttcttcctttgcatcatcaaaattcacatgggtgtaagtgttcaaggttacactgatgtctgcgtgacccatgatatactgcaaggttttcggattcatcccggattttgccatattagagcaaaaggtgtgcctgcatacatgaggggtaactttcggcatctggatacggtaaattttattgtatttctgaataatatgctccagatacttttcccagtgaagggcaaccatcggcatatcgtttttatccagaaacaagaatcctgcatatccttccaccatcggttcaacttttggtgtcttgcggttggcaatgattctgcgaaaacacgctgcgacagcttccgtcatcggcacatagcggatgcctttatctgtttttggttcttcaattacatactgcatctgtgcagtacgctgtaactgatggtctaccttgatacgcatttctccaaactcgatttctgaaaccgtcagcccacagaactctgagatacgaagccctgtgtgaaaaagaatatagattgcatcatagtatctgctgaaatgtttatcttcctgaataaa

SEQ ID NO: 963 - DNA, 55142 bp, Unknown
  gut microbiota DNA sequence
cctatgttatgatttgtatgtgccagttccttatgctccgtttctacaagtatggacacatagtattttccactggaaacctgcgaaacggtcgctgacttaatctgcccactatattccctgtgtaaccttgcttttaccgcttttaattttggcaattttatcttccctgtctcaaaatctaccgcaatatttccatttgtgaagtttgttgtgtatgatttatggttatcgtgtttgctcttgaatttcggatatcctgcatgctccttaaagaatttttgatatgcagcgtccatgttatagattgcgttggtcagagcaaatttatctatttcttttaaccattcatagtctttctttaattctctgttacagtaattattacaatccgttttactaactgactttttctctttcccgtatatttctttccgatatgccaatgtctgattgtaaacaaaacggcaacagccaaatgtttttgcaatctgaattctttgttcgctattaggatatatcctgtatttatatgcttttaacacctactgtcgccaccttcctacccttgattttctatatattttctcaacatctcttctgaaacatttcctacactgcagacaaaatatgatatgttgtataactcttcatcagatttactattttactgatagacattgttggttctgtttctatcatgtaatgaatatgatctttatctgtctccatatatctgataatgactttatgcttttgacatatctcataagaaaactgctttatatcatctgatatttgttttgacatcagcaatttctttctatacttgcatacgaaaataatatgatactgtaacaaatatttgtgtctgttttttgatttccacgttcccataacgcaagtatagcacaaacctccgcttccggctaccttaacccaccgtctaaagccagtgggattgcggtagccctatttcaagggggaaaaagacatcatctatgcatgcttgcatgcaattcgatgtatgtcttattgacccgcactacactgagaaagtagcaatttactgcttaaaggcagtaaattagcggattaaatatgtatctatatccatcagctctctctcatctgcaatatctacatatacacagtcatgcttctttgccacacttctgccacccttatcaccctccagtgataaaagctgtggtataagcgatgaattaaatacacacgggttgcctacagcatctccacaacgaagtgaaaacgccaatcgcttaccccctgtatttttaagcactctgtctattaatttaatcacgctttgactttttaaatatggctggtcagctactgcaaacatgtaatattcctctttttcggcagtatgatgcgtcacttcactgcttttcttaagctttttctgctcctgcaccgccataattcctgcctttatagtgtaggatatgcctttttcgctgtccggacttatgactgcatggcaatctgggatacatgcgcagtagtccaatatttcccggtaacgggtgacaactgttatatctatggtccggctgtctaattttgatttattatatctatttttaatttccgccaagcgatcaagcaaatgcctgtacataggttttccatccagctcataaaacagtttgttacttccaaaacggcggctgtttccagccgccatgtatatgatatgaatcatttcactctaaggtccttttcgtgccagtttgggtctaccattcccataagtattttttcaggggtaaacggaactgtcctgtgccatacgcctgttgcgcgataaatggcatgtgccagcgcaggagccggtgtattgataactatctcaccgattgacttaactccgaatgggcctgacggctcatagcttgtctcaaattcgacattgatattgcccacatcctgtcgtgtcggtatcttgtactgcatgaggtcattttctgcgatttttccaccggcattgtaggtgacattctcataaagcgccatgcctattccctgacctatgccgccctcggtctgtacacgcgcgaggtttggattgaccggaattccgcagtccacaacagcctgataatcaagtattttaactgctcctgtctccttatcaagctctatctcgaccattcctaccatgtatggaggaggtgaaacaggtgatgaatatgtcgctgtgacatctacaggtatcgtgttgttgacctgtgattttgttgctatatcggaaagacttacgcaaacctccctattgtctgcaccgtccggatttatgatatacacctctttgccgtcaaaatccacctctgatgcagcatggcccagcatctgtgccccgattttctttatgttttcacgaagctcaagtgctgcattctgtgtggccattcctgtaatgtaggtggttgatgaggcatatgaacctgaatcataaggagaagcatccgtatccgctccaaacacggttatatcatccggctcgcagtcgagtacctcagccgccatctgcgcaagtatggtatcacagcctgttcccatgtctgccgcgcctatcatcatattgtaggtgccacagtctgaaagctttaaggtacacgatccgacatctacatttgatatgcaggagccctgcattgcaagtgccatgcctgccgcacgaaccttgccatttcccatatcgcggacaggatacttatctgcccaatggaaattatccgcacagtgcattatgcatctgtcgagtgcacatgcattggctgtctcgccaaaatatgccggcataaacatgccctcacggacgatatttttcaaacgaagctcaaccgggtctatatgcagcttttcagcgagctcattgacagttgattcaagtgcaaagataccctgtgtagctccgtagcctctatatgctcctgccgcctgcacgtttgtgtacacaacatcgcacgaaaatctggttgcctcgcagcctcctgtataaagagggagcgatttatgacctgagagtcctactgttgtagtgctatgctctccgtatgctccaccatttgacagcgtataaagatctatcgcccttatatgaccatccctcattgctccaagacgcacggtgacctccatctcatgacgcggtgacgcgatagtctggcactcttttctgctgtagattatcttgctcggacgctttgtcttccaggtaacaaatgccggatatacctcacagaccgctgtctgcttggcaccaaagcctcctccgatacgcggcttttcagcacgcaccatggacttaggaatatcgagtgcattggacagtattcggcgcaggtggaaaacaatctgtgtcgagctgatgcagtgaagcctgccgtatctgtctatctcacagtatgctctgcaggtctccatatatgcctgctgcgctgcctttatgcgataggtgtgctcaataatctcatcgcactccgacagaattttctctacatttccatgctcatcctcctcatgatgaatgagattgcgctttacatcgcctgtatttatgctggatgaccagtcatcctcaggatgcacaagcaccttgttgtccagcgactttctgaagtcaagcaccggctcaagaatcgtgtactttacttttatcatgttaagagccttgtctacagccttttccgattcacctaccacaatagcgacagcgtcacctacacttctaacatgacggtcaaggattagtctgtcgtacggtgacggctccggaaaggtctggcctgcgatagaaaaacgctttttcggaacatcctcccaggtgtatactgcgaccatgcccggtaccttaagagcaatatctgtctttacatcctcgacaattgcattcgcataggggcttctaagaagctttatgacaagcgcatcacgcggtgtgatatcatcagtaaataccggctttccgagtaaaagctggctcgaatccttcttcggtatacattttccaactgcgtgataatcccttctcgcgcggttgaagctgtttacattagtttgatttgtgctcatcctgccactcctttccgatatcctctccgtagacgcctgcctcgagattaagaggtgcgccctccttcttactgtttaagaaatttctgattgagcggagctgactctgatatcctgtacaacgacacagatttcctgaaagatactcaagaacttcctcatcagtcgggtcaggattttctcttaaaagtgccacaatatttacaatataacctggattacagaagccgcactgatccgctccctgtgcagcaaaaaatcctgtaaactgcttagcttcctcctcaagtccctcaagggtatccacggctctgccgtctgccctgcctatcggcatgctgcatgacagcacaggctttccatccagaagcactgtacaaagaccacagttgcctgactcacagcccctcttcactgaaaagcagttgtgcttgcggcagaagtccaaaagcaccatatcctggtcaaccgagtcgattattaactttccatttaattttattttaacatccatatacatgaattccttcctacttaatgctcgtgcattgatgtcatcacactaataaagcttccaaagtttcctgcataacttccatgcatccggtagcgattaccttatatcatcgcagaggtcaagcgactgtgtgacagcgcggcgtgtaagcacccggcagatcatctctctgtactcggctcctgctctgatattgcttccaaaacggatatgctctgcaacatattctgcaaatttatctatttttgcattgttctcggagttctccgtcaaagctacattaccgtgcgtctttgcatctactataccatcgagtatgccgtccttatcccacacaggctctgccatatatggtgatgctccgatgaccgccacatacctgccgtttctatttgccactgcacatgtgagcacaggaaagtctgttgactggtttctctggcttaagtatactacgccctttgcatttttcggcactattactgatacgagcacatcgcgcgtggttcttggaagtgccgcaaactcgtccaaatccataattcctgccttgtgaagctgcacctttgctccaagcgctctgaaaatcgtcatgacatctgaaaatccaaatctgccccagatgcttcctccgacagtcgccacatttctaaactgcactccgacgatatgtctgaccgactctgcgattgcaccgtgtgtatatgcattcagggcttcatgtgtctctatctgcctgagggttgcatatgcaccgattctaaactcgttttcatcctcatcaatccggtcaagtccgagatcgcacaaatcaattgccgtgccaagtgtcttatttttcattttgagccagagcatgccgcccagcacaaaattcggttttttctgataaagctcataggcttcatcaaggctttgcgccctcacatactgattgtaataaaacatatttttctcctatatcaatacatttcaagctcatacatggcttcccacctaatgtcctgctccttcataaaggctatgaggctctccctgtctgagagctctgcacgccatgccagaccacagcccgccgatatagcagacggaagaggaatcgtgcgccccggaataccacatgccttgcccttgatatccagctttaacggcgctgtggtagtctcgaaggtaatgattagccgctttttcttttctcttaccaaattattatccatcacatcacacttaatataacactaaggactcacaataagagaggctgcagccattttctcggcgatatcatacatgttcgtcacctctccgactgcaagcttatctgacagctcatagtaattcagacatgttccgcaggtaaagattttcacgccacgattcttaagctcctttaaatcctcaaggcactctgagccatcacaggtcagctttgctcctccattgtagaaaagcatggtttcaggcggattgtcctgctgcgaaagtgcatagatgaagccctttatgagtacactgcccagctcctcgctgccctctcccatataggaagagcggattacaacgactctgttatctgtagccggcctgcatgtgtactgtgaagcttcgtctgtatccgaaaacgctcctgtgttaagagtctcaattgtcagctttacactgtagcttccgtcgtcgagcttattgctgtcgcagctatagcccttctgtgcagccatcttttttaaattttctactgcaatttcattgtccacaagtgtctccactgtgtccggctgtgtgagagcctcaattgccttctttgtctttactaccgggattggacatgtatccccgattgcatttactgtaatcatatttataatcctccctatgttatttaacttgtcaaccctcaaaatgcagagcatgcagcctgtcagcatatttacataagctatgatagcttaaaatcagttcacatatatcggcacatcgcagcgcttaacaaatcgtcccacctttgcagccggaagccctgcggctttaagctcatgcaaaaaggtatctgcctcaaaggcttttactgcaaacagcagtcctcctgaggtctgcggatcgaagagcacctcctccattgagaaaggtatattttttgcaaaacgcaccttgtcacctacatggtttctgttgcgctgcgccgctgccgtgaggaaaaactcatctgcgcatcgcagtgctccggtaatgaccgggatggaaatcgagtcgataagtgctgttatatcatcatttaacatctcgctcagatgtcctaaaaaactaaagcccgtgacatctgtgcatgcatgtatttcgaagctgtgactgatctctgatgccgcgcggtttagtgtggtcatggagcttaccgcatcctcaattgcacctaacggagcttccccgacacggtttgcgttgcacacaagcccaactccgagcttcttggtcagtataagcacatctgacggctgccctgtattgttgctgtagatgtgtttgggatgaactgtgcccatgacagaaagtccgtatttcacatcgctgtctgctatggaatgaccacctgcaagtgtaccgcctgcctctatcaccttgtcagcgcctccctgcattattttaccgagtatattcaaatccattttctcagggaaacaaacgatgttcaacgcactcttaactgtgccgcccatcgcatagatatcactgagcgcatttgcggccgctatctgtccaaacgtatatggatcatcaaccatcggtggaaaaaaatcaagcgtctggactatcgccgtgtcatctgaaattctgtacactgccgcatcatcgctgctatcatatccgacgagcagattgctgtctttttcgccctttggcaactttgctaaaacatgacttaacaaatccggaccaagctttgcagtacagccaccgcctttgcaaaacactatttcctgtggcatgtttgctcctttcaattgtttaatactgtttatctcaatgccgcaatctgcataagcgcttcagcggcctcatttatctcatcatttgtattataatatgaaaatgaaaatctcaccataccctgtttttgtgttccaaagaatttatgcatcagtggtgcgcagtgtatgccgcttcttgttgcaatgccatactcattcataagtatatccgacacctcagcagaatccatatcagctatatttactgaaacaatcgcacaatgtgctccattatcgggcagcatgtcgaaatccccatatatcctgattcccgggattatctttattttctttagaaaagccttcatcaacatatactctttagcatatatgttatccacaccaatttcttcaatcgcctttattcctgccaaaagccctgcaattcccgggccatttaaggtaccggcctcaagtcttgtcggaagctccataggctggctctcaagaaagctgagcacgccggtgccaccgcttttaaccggctttatatctgctctttctcccacataaagtcctccggtcccctgtggacccatcagccccttgtgccctgtgaagcagagcacatcaatattcatgtcttttacatttatcggaagcacaccggctgtctgcgatgcgtcaactataaataaaaggtcatgctttcgtgcgatttgccctattgacttaatgtccaccacattgcctgtgagatttgaagcatgtgtgcagacgatggcttttgtttccggacaaattgcagcctctatatcccgcggggaaattatccctctttttattccttcatcactgcatggcacaatatccacgcacactcccctctccctttgcatataaagaggtctgagcaccgaattgtgctcgagctgtgtcgtaatcacatgctcccccggctcaagcagtccgtggattgcaatgttgagcgactcagtggaatttgccgtaaaaacaagtctatccgcatcctccccgccgaaaaattctgtaaggcacattctggcctcatatattttccttgacgcatcaagcgatgcatccgacattccccgacctgaattgccgcagtgcttcattgcatcaagcacagcatcatataccgcatccggctttttaattgttgtggcagcgttgtccaggtaaatcatagtatgtcctcatttacttctcatccaagcagataaaatttctttatataaagctcatcatttatatttttgctaagcatatttgcttctgtatgctttggaagatttgcataaattgttgaatcattatttaattcgcacgatacttcccatgtttttagttcttcaactattttataatctttaatcctgattatatttttattgttatatgcaagtaccgattttgctttacttgcagatattactatatcctgagggaaaacacctatgtgtgatatgttgtccgtatccatcgcaagctgttcaatctgctcatcagtgacctcaaatacgctatcccattccacggcaagaacatgatgcttatcctgccatttcacctgtgatatattgttgcagcccacaagcagtgcctgctccacagacataggccgcatgaagaaatcttttttgtcgcggactgcactcagcatgccgctctcaatacttccgatacgctctgccagacgatacacctcatcgcgattgtgtgacacaaagataacaggattgtgaaaatcggaaagcatctccataagctctgattccatacttcttttcacatgctcatccagtgccgaaaaaggctcatcgagcagtatacactccggtttagccgcaagcatgcgaagcattgccacgcgctgcctctggcctcccgagagatgatccggatatgtgtctgccatgccatcaagcccataccgcttcagccagaccttcacctttttttcatcgcgatgtcccattgctatgcatatattttccatcacggtcattgtaggaaaaagtgcatagtcctgaaacagatagcctaccctgcgcttaccggggtgcagatttatgcgattttttgagtcatacagcacccggtcatttaatgatataaagcctgaatcaggagtctctatccctgctatacacttgagtgtcatactctttcctgagcccgacataccaattacggacacaatctcgtccgtaagctccatgtcaaccgaaagcatgaaattatccaactgtttttttatttttactatgagcgacattattttttctctttctctttatgcccttgcttttgccgcatatcatatttatcgatacaaggcatgcaaacgaaatcgctatgattactatgcaccagaagcccgctgtggcatagtcaccactttggatgaccattgctatctgctgtgatatggtcgatgtctttcccgctatatttccggcaagcattgatgtggcgccgtactcaccgatagctctggcaaaggccagtgtgacacccgatatgatgccgggctttgccatcggcaaacgtattttccagaaaaccttccactcacttatgccgagagtgcgcgccgcatatatgacattttcgtctatctgctcaaatgccgctctcgcatttctgtacatgagagggagtgcaatgatggtcgctgcaaccacacagccaagccacgtgtgtactacctgtatacccatgctattgcttaaaaaacttccaaagggacttcttgtactgaaaatccttaaaaggatgtatccagccacggtaggcggcaataccatcggaagtgtcagcagtccatcccagaatgccctcactctgccctttgtgtttataacaagctcagcaaaggctattccaataaagaatgaaaaaaccgacgctactattcctgtttttaatgttatccaaagcggtgcgaaatcaatcgttcccattattcatttaccgtaaaatgatatttctcaaatactgacattgcctcatctgtctgaagatatgcaataaattcctttgcggcttcaagctcgtctgctgtagtgttgtcaccctttaaggctgctatcggatatataacatcacctgttaagctgtttggaagcttttctataatgtcaagctgattctcgtatccgaatgtatctgagtaataaactgttcctatttcgtttgcaccctcagctacggcagatgcaactgcacctacatttgcacagctgttgatttccagaccgccaagtgcctttgagatatcagaatctgaaatatcctgtggctttgaagcatctccttcaaccatttttgaatttacaagtgctactctggtgtactgtcctacaggaactgttccgtcagcaagtgccatatttttagcctttgagatgtctgcaaagctggtaactgccgtgccactattcttatatgtaacaaggcacacctgattatttaaaaggtcaacacgagtatcatcaaccacgcttcctgcttcataaccattctgaagctcatccatctgtgccactcctgctgagaaaaagatattgcacttcgcgccctctttaatctgtgccatcagagttcccgaactgtcatagttgttctggaagtttacatttggatgctccttggtgtaggctgcacaaatttcatccataacactgtttaagctctttgccgcaaaaatcgataaatctacatctacattaccgttctctgtctgcgcgctgcttgtcacaattttatcagtagcattaccgctctctgcagtatccttctttccgcagcctgcaaaaagtcctgctgtaagaataagtccaagcgtaagtcctgcatatgctgcaaattttctctttaaacccttgcgctcctttactgatttatcagtgcctgttgctcttcttaaaatcacacttttaatctctcttttctttttatttattcatcatttgatctgctccagcagcactgaaatgctacctccgcacaccattccctcattctcggcatcgtcagtattcatgctgacatcaatcagctcacatttgaactcctgattgcgaaacagcctcctgcagcggcttataactaaagcctccgcacagcctccgcctattgttccaacaatacggttgtctgagctcacaagcatctgtgtgccaactccgcgcggtgcactgccgttcttttttatgatggtacacagtatgtacttctcatccggggagtgtgtaactgatgcacaatgcccagccacctcagtaagtgcgtcaagcacttcgttatctatctgagtgcagcttgtacgctcatttttacactttactatctcgcttatcaccgaaagagcaatttcctccggtgtctgtccacctattgcaagacctatcggagaatgtaatcctgatataatttcctgtgaaaatcccgattcttcaaggtcttttttcactatcacagctcttttctttgagcccatcatacccacataggcataggactttgtgaatatctctgtgaggcattccatatcgaagcgatgtcctcttgtcatgcatacatagtaatcatccgcctgcggctgtagcttggcgagagtttctttataatcgccgcaaatcacatggtctgcgccttggcgctttgcattgtctgcaaacaaaggtctgtcctctatcacccatatgtcaaatgccaaaagcgatgccatgcgtacaagtgccgccgatacatgccctccaccgcagattatgagacgtggtctgctgcctatctgctgtctgaacatcacaatggaattatcattgtcatctatttcatctgcccacacattgccgtatgccactcttattctgccatctatatagagtgcctttgccccggcatgtgctccttctatgactgtcaaaagctcacagcggctgtccacaggtctgtcctttatcgaagcatatatgttggccggaatcaacttcacctcgtcaccggcatgaatctgaccacctcttacgactaccgcaaacacaccctcctttggcataatgcactcgcccatcctcttgtatatggcacaatgcgaatggcactgcttgcctatctgcgtcatctcaaggatggtatctcctatgcaaaagcgtgtaccaagaggcagatttcctaaatcaaatcctgaaataattaaattttcaccgaatgcaccgttgtctatctgtgcccctcttgccctgaagtcatctattttctccgcggaaagcaggctgacctgcctgtgccactttccggcatgtgcatctcccatgatgccgtagtctgcaacaagctccgcctgtggcacctctctcttttcagttcctctctctttgcttatattgattgcaagaagctttcccattattttctatcagccccctatccggctcatatttcttgctgcatttacttccgcagcttctatctctgtagtctttgtctctgtagtttttgtatatgtcactgcattatcattaaaattgtgacaccttggctttgcctttatggcagcccttagtgcccggactattgcaaaatctttttccacatcatctgcaaaatcccatgaatcaggtactaaatccatcgtcacgctgcttcccaggcatggcataagcctgccgtcagccgtaacacgtatgcggttgcaggtggcgcagaacttcccatgaattgcctgaatcagacctactctgataccaagttccggaaaaatgtaatactctgccgggccgttatccggaattttccgtttgtcatttcccgaattaatttcttttgttttttcagtatttatacggcaaggttctccatacagttttgaaagtgtaccaataaccttcttatatggctcgactccgttggtgtgtccttcacctaccggcatcatctctataaagcggatatctgtacctttttttgcaacatatcgtgtgagcgccaccacatctgtctgcggtgtgagcaccacattgattttcactcttattccgcactctatagcggcattgattccatgctttacttcttcaagcagcggtttttttgtgatgcgttcatattctgacgcatctatagtgtccaggctcacatttatgctgtctatgcctgcttcctttaaccactttgcatgctgcgcaagcagtactgcatttgtagtaagcgatacgctgctgacacccggtatctttttgatttgtaaaaccatttcatcaagctgcggatgcaaaagcggctcaccgcctgtcagacgaaaatgcttaattccaagccttgtggctgcgcggactatgcaaagcacctcttttacgctaagtatatttagtgcatgacagtgctcattattgtcacagggattgcagtaatagcagtttaaattacagctatctatcaccgatatgcgcatatagtcaatctctctgccacatccatcgcgcatgttaaaagccctttccaaaaccacagttaggaaacgtgcagacatcacaattcaggcagaggccgccttctccaagtccggcaagctcatctgcataaatcatatcacgtgccataagcctaggcaacacaatatcaaatatcgtgcgcttattgtacatggcacagccgggcagcccacatatcggcaccagcctgtcacctgcatcatagtacgacagcaaaaacatggctcccggaagcaccggcgagccgtatgacacaatccgtgcgcctgtatttttgatggcaagtggcgttttatcatcaggatccacgctcattccacctgtgcagaatacaatttccgctccggcttctatcgcgcgtaagcatccgtctgtgatttttttgtcatcatcatcaaacacctcatgaaacatcatctgtgcgccaaactctgctatttttttttctataacaggtgtaaatgcatcctgtatcctgccatggtacacttcgtttccggttgtaattattgctgcttttctgaccacaaacggcttaatatcaaggattggaccatcctcacatatattagaagcttcctttagcttatctttttttatgacaagcggtatgattcttgttccggcgagcttatcaccctttttcacagtggtattgccgtgccttgtggctatcatcagctctccaaaggagttgaccttttcaagctttttgctatccaccttaagcagtccatcacagtctgcgattacctctatcttgccctcctttacggaggacggatgcattttacttacagtgccgcaagaaacgcctgattgtgtgtctgcttcaattttctttgtgccacatgcgctcatacgataaagcacctccgcagcctcattctcgtgcatcatggtctcatcattttcccatatatatatggtatcttttccgacactaagcagcaccggtatgtcctcttttgttatgatatgccccttgcgaaaaactgcatcctttttcacgccgggaataatctgtgtgatatcgtggcagagcacctgtccgactgcctcagttgtcttcataagcttcatataatcccatactccaattattatctctgtaaatattaactattccaaaccacacctagtacaccgaccgcactcactgtcatactgcagtaaaatatcaagcccatgctctatatttcccatcagaaaatccatgctctccgacactgccttcacactgccgggcagattaactatcagtgtgtttttcctgatgacgcaaacgcctctgccaagcatggcgcgcggtgtaagactcatgctgtacgctctcagtgcctcagcgatacccggtgcattgcgctgtgcaacatccattgtagcttccggcgtgatatccctaggtgaaaaacctgtgccgccggttgtaagcaccagattgcatttcatgtcatcactcaacctgacaagctcgtctgcaatctgttttctctcgtccggtatgattttatatgaaaccacctcgtactcatctttgggaagcatctgtcttattttcgggccgcttttatcctcgcgccgacccgctgcgcctttatcacttattgttataatccctacagtatacattacatcaccctgttatccttgattaaatgtgtatttttaactattcagctgtatagtgtccactctttccaccggatttttcaagcagatgtatctgcccgatttccattccacggtctagcgccttacacatatcatatatggtaagaagcgccacactgacccctgtcatggcctccatctctacaccggttttgcccacacaggctgtcgtgcaaattgccatgatactgctgtttttttcatccagctcaaactcaacatcacactttgtcatagcaatagggtgacagagcggaataagcatggaattgttctttgctcccatgattcctgcaatccttgccactcccagcacatcaccctttttagccgtgcccgtagatacagccctgtatacagcgtcatttacctttatcgtgccgcaggctttcgccacgcggtatgtgtcatcctttgcgtgcacatccaccatgtgggcttcccctgcctcattaaaatgtgtgagcttttctttattttgttcctgattattgatatctaatccgttttgctgcgtcaattaattaatcctcattgtaactgttcagttaccataatttattatctattagtaactgcacatttaataaacccttatgccgtgctcaaatgccgataccgcctcaagcacactgcctgctatactccttgccttgtcagagatcgtaaaacaatttgaaagctccccttcgcgtggatcgatatccgctatcttgaagccttccttgaaataataaccctcacggataagacctcgtatgatgcctgtaattgtagcatttaccggaacatattcagacaatttattgtcatagcttcctttatccggatatatccgcgctatctcatcgcccttttgcacaatatctccgatttttctgacatcataaatatatcctgctgccggagcgtgtatcacacgctcacttgtgaagcctgcgatatttcccggaacccctgtgttgggctgtgccatgccatcggtaatgatgcgcgccagattgtgcccacgcatggactcaatcaccagatgcacgtccttgcctgccgtaaagcccggacctactcctatcacaagcggtgccatatttattgtggtgcccagatttttctttgctattatggcatctaccacaacatccggtctaaaaagtgcaattgattcaccggttgggtctatgagaagcggaacctctccggcctcaagcacagcttcgatagctgagctcttccacttttgcgatgcaatatgagcttgcggtgtgtcatttatcccggaaattgtctctgcatcattcaaggcaggaagcagtctggctgtcagaccctctacagttgcgctcccatcatacactgcctcgcaaaaggacacctgacgccgtatggctgccggatagtctgtctcaagcgctatcacccgatgtcctgcacggtgcagtctgtggatgatgcctgtcgcaagatcgcctgcaccacggcatatgattaacaaatttttcttttttatttgattattgctcatataattagttaccctgttaacttattatttccatgtttatctgtaatatgtcgaaatccgtcctttaaacccgctgtcgcgaagctttttgacatagacctgacgcagcgtgtctataaccgagtcatcaaccactacatcctctgccattcctagctcgttttgcataagctcatatctgaacacaacgtctttacacagcttgcccttttcccacgtgccaagcactatgataacatctgtggtgagcggatatatgacaggctcatccgctgccggatatttgagagaatggtgctttgctccatctgcttcgattataacataatctaacgcctgtggcatgtctttaatcagtttatcgagcaaatcatacggcagtccgcacatctttggctttgactgttctgatattttctgttcagatattttctgccccgccatacaatatccatcttttattattttatcccttaacgcaaaaaaatcgcaggataggtcagtgtcagcttcgacatacatgtgcgttgttgttgtgacaagcacaccttttccactcctgtgatattcccttgcaagcttatgaacgagtgtggtctttccacctgcgcccactattgaaatcaatttttccatatatttccatactttcccacaaataataaagccgccggtgtacttaatgcaccggacgactttaaaatcctaagcgttaatcatccacacgcttcacatcatctttttcttccatatcccacatatatggtgcgttcttagatttcttcggcaaaataatattgagaagaatagcgcaaagtgagcaaggcacgatacctgaaccgccaaatataagctgtacatagtatggcaggtgtgatgtagcacctgttgtagcgccaagtccgtagcctaaaccgattgcaactgagataattgtaatctcacggctgccgattggctcctttgtgatgagctcaattccggaaatcaggatagaggcaaacatcataaccgcagctccgccgagcaccgactgaggcatgattgacatgagagctccaatttttgggcagaagccgcaaatgatgaggaatatagctcccattgaaatagcaaatctattgacaacctttgtcattgaaacaagacctacattctgtgagaatgaggtatttggcagtactccgaaaagcgctgcaaatgatgaaccaagaccgtcacagataacaccgccggaaagctctgaatctgtagcctctctgtccattccaccctccacacaggctgagatatcgccaactgtctctattgcagtaacgataaacatgatgccgattgggatgattgcattggcatggaaggaaattcccacatctgaaagctttccaaagcctataaagcttggaactgctatccatgctgcatttttaacctcgtcaaagtttactacccatgaatatgtgtatttgacaccgtcagcagtcacacctgtatgtgacatggtaagtgtcataatgattgctacaacatatcctgccagaataccaaaaaggatggcagatgatgaaaaaatactgcgcgacggtgcaaaatgcttaagaagcacgattactataagtacaaccattccaagaaaaaggtttggcagtgagccgtaatcatttttgcctgtgccaccgcagaagtagttgattcccactccaaggagtgaaagtcctattgctataacaactgagcctgtaacgattgcagggaaaaacttgcgtaaaggctttaagaaggctccgagtatgccttcgaaaatacctcctacaaggcaggctcccataatagctccatatgctataactccgccgccacacgctgcaactgtattatttaatactccaagaaagcccgaagaagttcccataacgataggtacctttccgccgatcggtccgatggaaaacatctgtactaatgtgacaatacctgcgataatcatggcattctgtaagagagctgttctaagctccgcaaagcctgcgtccgctgtgagtccacatgctcccataactatgataagaggtgtaaggtttccgatgaacatagccataacatgctgcagtccaagcggaatagcctgagacagaggtattctgccctcaaactggtaaggtgaagagtttgttgtctttttcattggttcctccaaatatttatactcttatttaataaaaaaatcacaaaattattttacgatcataaggctatgcggtcaatttagtattacttataatataatatccatctacttataaatacatgctattgaaatccagacatatccatatcttcgagagacatctcaacctttactttctgcgagtcgattatacccttggaaagtaaaacaacagtttcatctgtactctcgttgtcccaatccacgcctaatacatttctgccattcatatatataggaaatttaaaccggagaccttttaatattctgccatccttttgctcttcctcatagataaacacatccgacaggaagctcttcaaaaatgtcttcttttccagatctgtaaatttatcatacagcttatcaaagaataaaaggaactggtaaacattatcttctgagattttgtcctgcctgatattatatagtcttgtttcgacttcttccatggcatcctcaatatcagtgatttcatcatatagcttgtccaaacgttcctgcatgtcattatattttttgtcataattcttatcggatacagataaatgatccatctggtcagcaagcctgttttttgccccggttgtctggctcagtctatcttttaatccatcatattccttgtcaagctccgaagtatcaatgctgcttcctatctgcttacggatttcctgctcaaactttgggttctttacaaatttacggataatttcctcaactgccgcattgattctgtcctcattccactgtcttttataagtacagcggtgtccgtccacaagcttcctgtgtttgcaggcataatagaaataatccttgtaatagcctccgtccggatgcttcttacgattcacattgccatacataccgcttccacatacagggcacttaataatccctgataaaatatgttcatgctcaagactatgtgtttttacctgtaaaacacctgtctcctgccgctttctgtgtgcctggttccacatttcttctgatatgattgcctcatggattccatcacttaacaagtaatccttttgttttacgatatgatattcattccttgttcccggaatcttctcattttttcttcgaccaaatgcgagcttgccgcaatatatcggattatccagcacacctttgacgaatgatgtagagaaaccttcgattgtgttattctggcgaagctttttcttataaccactgttatttaaaaatgcagctatcgcagccattcccatcgttgtattggcgaatttatcatatataatacggataatctctgcctcatcctctgcaatgataagctcaccatttaccagctgatagccatatggtgcaaatccaccgttccatctgccttctctcgctttctgtctgcggccttccattgtctggacaaggatattctcacgctctatctctgctaccgcagataacacagatatcatcagtttcccggcatctttggagctgtcaattccatcctctacacagataagattaaccccataatcctgcattttctgcaatgatgataaaacatctgcggcatttcttccaaatcgtgacagcttaaataccagcacataatcaacattgtctttgccgttttctatatccgataacatctgtttaaactgtggtctgccttccacacttttgccagatttaccctcatcagaatattccccgacgatagacatttcctgatactctgcgtattttctaagcttgtccttctgtgcatcaagactgtaaccatctacctgcatggaagtggaaactcttgtatatatgtaacatttctgctgttttttcatcagatgttatctcctttttacttccttggaaacctctttaatgctttcaagatatgctttttcgactggtgtcaaagtaatctcctgatattttctgtattctgactttgctttctccaacgcctgtttatgacttacagaaccagctccagttaaaagttttctattcactgatttaattcggtatccaagagatataatcatatctaaattgtaataagtaacattatatgtttttccatcatctgcagttgttcggaatttccgaacaactgaatccttatccaattccccttcttcgaatatatgctttatatgttcacttatatttgatttactgcattgatataattcagtaagctgctattgtgtcagccacactgtatcatcttctattttaacttctatatttgtctgcccatcatccgtctgatatataagtatttccccatattcatcggttccaattttatctgccataagcacctctccattccattacttcttagttataaaatgtgaacacatgtgttcactattgtcccaactaaatcttatcatcattccaacctctgttcaactaatactttttctattatacaatgcaaaataaaagagactccactcgccatgaatgaagtctcctgatatatgtatacatcctacagcatattatctgcaggatgccggctgcctacgcagccttttcgtccagaagctgttttacgccacctaagtaataacagaaccggtcaaattgtttctgtctgttaactttctcgtcatcgattgaagctcatctttttggtcaattccttttactctttaaagtatacaggatgctttcaaaatcttttttcatcataaacaaaatttctttttaattaatgtggctaaatattctgctgtaccatctactcccagcagactggagtttatcattaaatccttgtggttgtaatcatctggcttaaaccccgcatattgcaaatgataagcttctcttgcttcgtcaacctttttaatcattcgttttccttcgtcaaccgaaagccctaattcatcagtacaatgctgtaaccgaatgttataaggtgcataaatataaatatgcatcgtattttccatttccgaaagtataaaatcaccacaccgtccaacaataatgcaactttctttttccgccatgaaattaatgatattcttctgggcctcaaagattttatcctgtacttctgtggatttttgacggccgagtggaaattgcattcttgaataattgttcttaagttcctttgctgtttcttcattttcatctacaatagatacaggcaaattcaatttttcagccgcttgatccacaatgtctctatcatagaattcaatccctaatatctccgacaatttcatagcaatcggtcttcccatacttccaaattgtctagcaatcgtaacaacgtatttttttttattcatactcattcctcttttctactacacactatttctatcacaattcatagtaaatttaattatataacgataccggcaactataaacgcaactaaactaattgctgctgctataatgacatacggcaactgactagtcgcatgttccaaattatcgattcccgctattcgcgacgacacaagcgttgcatcagaatagaaacaagcatgagagccaaatcctgcacctgacataattgcagccatgacaagcaatgtatttacacctaagatagcacctagtggaaatgcaatcggtgcaaccaaggcacacacgccaacaagcgaggctgtgcaaaaacacaatacggcaaccaacacaaaaatcatcaccggaaacaaggaaccaatcatatatggctgaactttttcgataatatagtctgtcattcccatttttcccgttataatttggagcacaaacgttaataaaagtacaatatcaacaactaacatatccgaaaaacctctcgagagtatcggaaataaatcttctgacgaaataatttttctaggaatatacataattgcacaaacaactatcgctcctattacagccgtaattaaatctcccgtaataaccgttaatgcaatcaagactcctaccggaattataaagtcaatgattttaccatctactacgttctctgaaatcgtctgattatattttttgcttttctcactatacaccattccggtatcttccacacgtttatatgctttcttcattcctccaagtttgggcataattcccatacagaaaagaaatacaataatcaatgtagcaatgggataaaaacaaaaaggtgctgcacttaaataagatttgatatgattactaccaagagacaagaatgcatcttcctgtacaaacatactcataaggcaaacaccccagccagatatcggaatcatcacacaaataggaccacctgttgcgtctaaaagataggccaatgtctctcttggtatcttctttttatcgtaatgtgtcttcatacaagctccaattgtcattgcattaagaagttcttcaataaaaataacaacacccattaaaaatgtcataagtaatgtttttcgttctgtatcgcaaattttatcaactattttagaaaatcccagatgcccattagaggactgcaataatgctataaacccaccaagtaataacactatcaacataacccatgcattattttccagtgcctctacaaaaataccacctaactctgacaatgcatgtgtaccatatagaacaattgctcctatcaagcatgccaaaaacaaacatatttctactctctttgtagcaattgcccctatcacaacaaataagattaacaatacacttactaatcctaacgacatactatcatctccttccctatcataatcaataagaggactgctctacccctttgtagatgcaatcctctttgattcacataatatttatttcgctatatagttgtaattgttttcttttaatgccttcatggctttatccgcagcagcaagcgtcttctcggcatcttccattgtatgagatgcgttcacgtaccatcttccaccaaacattaggaacacaccattctcctgcatatacctctggaaattattaacgatgtttttatcaaatcccactagttctccatctgtatataatctccgtctgccacccggaatgccaaataatgtatcaaaaactccatttgcttccgtaattgtaagtggtatatcatactttctagagatttccacaaggccatccataatcttttcctgtactttgaatacctgtttataaactgcacaatcatcttttgtcaactcgtcaagggttgccagaaccgcagccatgccaagtccatatccaggatacgtacccggaacaagcactttatttcccctgatacaatccatgatctccttcttaccacccacacacgataccggaataccatttgatattgccttacccattgtacaaagatcaggtgtaactccgagaacagtctgtgctcctccaatatttactctaaatccagtaatgacctcatccatgcacattacaatattatacttcgtacataattccctaattttctcaacaaatcccggttttggatatagaccttcatgattccacacaataccctcaaagtgaattcccgcaataatatcatgatacttatcaaatgtttcctcaagaacctcaaaattattccaaggaatcataatagtttctttgcacgccaaaggtgatcgaccttctgtataataaggatcttcttccggtcctccatgtgtagagaagtccgtaaatggaatttccgcatttacatccgaattaatccgtccgcctagaacattatcaccccatccagcataattaccctgaaacctaacgattacattctttccagtataagctctcataattctaaatgctgcctgaaccgcttccgatcctgtaacagtaaacttgagttcttcaacgcacggaatcaactcagaaagtctctttgcaacttccacatccattggcgaaaacaacagatttgaaccaatcgccgtaccattattttcaatatactctacaacctttttaacaaaatttggattcttatgacctaaaatattgggtcccattgaaccattgtactctatatattcattgccatccacatctgtcaaatgtgttccgtctgacttcgcaataaataatctgtgctctgtaacatccatcggaatacgaagattggaatgtccgcctggataatacttgttatactcttttgttaaagcttcacttttgtctttttttaacataatctcatcctcctgacctgtactaattcctgttaacctattgaaaagatacaatgtttttaacatggctttatattatcaaagcaaacgcatattctctaggataaaaaggaatacaaattaggaaaaaacggaacaaaaaacttcctagattcatttctaggaagttcacccaccttctttatgaatacatatttattatttttttgggcaattcacccgttaattttttacatgataaattcatgtgcgattgatcataatatcctgattgcaatgccaaatcagacaatgtaacatcaccctgtcttaatttataataattacacatccactgaaattttatcacttcacaaaactgttttatggatatacccaacaaatcctttaccatttttcttaaatatctacctgtataccctgttttatcctctaattctttaattgctatgcatccctgactatttattatttcccttacaacaaaatttacaatattattggttttataattatgcgcaactcgttgttcaagatatgacgacattatctcccaccgctgcataaactgatctgcttctgccattcgtttttcatactctctaccattccataacgcatcactcatggcaattcttgaattattaatgtccttcacatcacaacgaaatagatttccaagcatccctgttcgcagtctcactccaaatatactctttacatctttcataaaatccaattcgttcatttgttgaagcgatatagaacctcccataaaaaaactatatgcattatcatccgtatagaaagtcataatatctgcacatacatctggtaaagcaactgtttttcccaaatcaaaatcatcaacctcgtaaacctcccatacaatatcccttataatgttatgttcaattggtacataagattgataattattattcaactctaaatacggttgatatgataaaaattcatttgtttccagcatacaaagccttttaatactagacataatagcaccttctttcctccaaaaaagcaaaaaggcaaagaagtaaaaaacttctttgccttttctagtattatactaaaatttcttttcttgtcaagtttcttaagctgttgttgctcccccatccacataaataatctgtcctgttatatggtctgcatactttgaacataagaataccatcatgtatccaatatcttcatgggtctgtgcccctcttgcaagtggaatatatgtctttatatattcattccatacttctttcctattttttccttctttctccgccgtatctaaaatatcctcccacatttttgtcaacacaattcccggtccaactgcattcacattaatgttataatctgcacccgcaaacgctgccgactgtgtaatataattcaccgccgctttggtcataccataatgtccaaaacctaatccatgtggcaaatcacgtctccccgcaaaggatgtcgttgtaacaatctttccatgattatattttttcattctccgtagtgcacactgtaatccgttattaacgccaacttgatttgtcataataacacgcatcatttcttcctgcgagcagtctacaaatggtgtcacacaatcaatacctgcattattaattacaatgtccaattttcccgtttccttttctgcctgtgctaatactgcatccacttgattaatatcactcacatcgcacgaaatcgctaccgccttattacccgcatccactatttcagtcattactctaacgcaattagcctctgtccggcttgcaagatacacaattgcacctgcttgcgcaagctgcttggaaacagtttctccaattccttttcctgcgccaaagacaaccgccgtctgccccgttaaatcaatatccattattcccatcattgtttcccccgatctatatatttaattcttttcctgcagctcaaataacatcccttcaggatccataaaataaacccaataacacgtcaccccatcacctagcaatgcttcctgtggttccataaatggtttaaccccatgtttatccaactcctggacccattcttgaatactatccacgtataagcacaaatgtaatttacctgcacatgctgcagttggcggaatcggtgtcggaacaggatccgtaatctctatgaactcaagcatgactccatccggtgtttccatgaaggcttctctatggcaatgtgttacattatctccaacaatccccattgccttaccttcattaacatcatgaaattcctcactcggaccacttaacagcttcaaacccagtatcccatgataaaaattaattattgtgtttaaatcttttactataaatcccaaatgactcgttgataatactttcatgttgccacctccttgtttttcttaattgtaatattgttttttggggacatctaggataaaaaggaactcgttttatatatgttcactttatacaaaaaagacaatgatatccattccggcttccacacaaagctttcgatttctcgtcatggtgttagccgtcatttctgcggacgggaaaaagagctggattctacatgcagaaatgttgtgaagtccagttcttttattacagagaaatgattttacttgacaaaaaaatgaaagcggagtatattattaaagttcaaaaacgaacagttcaaaatgaaagaaggtgtatttgtgataaattattttgcacattgtgttgatgtcgaagaagtgtataaaaatatgatatctccagtctatgaaaaatacaaattgacctatatggagtttacagttcttatgtttttagcaaataatccccagtataatacagctactcaaattgttagatatcgtcatcttgcaaagtcccatgtatctatttccattcgttccttgcaggaacgaggattgattttaggggaacataagggaggaaatcacagaaccattcacttaagtgtgtcggataaagcaagggacataattgcagtcgggcgtgcggcacagaacaaattttgtgaaatagtatttgcgggattttcaaaggaagaaatggaaaagctgcaacagtttacagagcaggtaaacagaaatatcaaagaatatacgaacagttaggagagatttacagtggaaaagaacaaggattttttaggtacgcagcccgttggaaaactgctttttaagttggcaattcctacggtaatagcacagttgatcaatatgttgtataacattgttgataggatctttatcggtcatataccggatgcaggtagtcttgctctgacgggtgtcggtgtgactatgcctattattatgattgtgtcggcatttgcaggacttgtaagttcaggaggtgcgccacgtgcttctatttcgatgggaaaaggcgatatggacagtgcagagcaaacgcttggtggatgttttcttttacaggtaattgtttcaatcattctgacagcggtacttttgctctttggagaaaatttactgtcagcttttggagccagtgaaaatacgattgaatatgctgtttcctatttgaacatatatgcgcttggaacattgtttgtgcagctaacattgggaatgaacgcatttgtaactgctgaaggatttacaaaagtgtctatggtatccgtggcaatcggagcaattctgaatatcgctctcgacccgattatgattttcggattaaatatgggtgtgcgtggtgctgctttggcaactgttatttcgcaggcagtttcatgtatcattgttgtggtatttttgtgtagtaagaaatcaatacttagactgaaacgtaagaatctgaatattaagccaaaagttgtgttcccatgcatagcacttggaaccgcagcatttattatgcagtcgagtgagagcgttatatccgtatgcttcaattcttccctgctgaaatatggcggagatattgcggtaggtgcaatgacgattcttaccagtgtcatgcagtttgcaatgcttcctttacagggaattgcacagggagcgcagccaattacaagctataattatggagcaaacaatacggaacgtgtaaaaaagacttttcgtgttttattaacagtaagcctgatttattctgtcacactttggctggcggtaatgcttttgccacaattctttgtaagtatttttactccggagacagcgatgatcgagtttgcatcaaaagctctgcgtatctatatggcagtcatgtttttatttggtattcagattgcatgccagatgacctttacagctcttggcaatgcgacaagttctatcattgtggcagttacaagaaaatttattctgctgttaccattaatttatattatgccacatatggtttcaaacaaaaccatgggtgtttaccttgcagagccggtagcagatttcatagccgtaacctttactgcaattttgttttacttccagtttaggaaagcaatgagaaaggtcgaatcgcagtctgtatagccgttaagggacactttgtaattataatggttggaatgcttccttacataattgaaatgattgaactgcttgggtagatgggcaatccacgcctaatacatttctgccattcatatatatcggaaatttaaaccggagaccttttaatattctgccatccttttgctcttcctcatagataaacacatcagacaggaagttcttcaaaaatgtcttcttttccagatctgtaaatttatcatacagcttatcaaagaataaaaggaactggtaaacattatcttctgagattttgtcctgcctgatattataaagtcttgtttcgacttcttccatggcattctcaatatctgtgaaaagaaacagtatggggcaaattttccaaccaccagcaactgctgcgccataccagcttcttttctatatttttttataacaacgcctatatccatttgcttcatctcctataaaattcaaaagcttttgtatactcagcatatcagattcatataaattgcacaattgaacagtgtttattttttattcaatttaattaaccagcaggaaatgttgcatgattaatctactgttttggttgctttgatatttcttaggttgacggctaaatacgcattagagatgtctccatccaaatgctgttctagcaagggatttttcccttgaaccctttgtttattatatgtggtggcgctttttgcccccactttttatgttctgatttcattgtaatcttgtttagattccagatttcaaaaaaacgggggcgcaaaatggagccatttttgaattccgggggcgcttttcgcccccaaatagtgaaagtgggggcaactttctgcccccactaaggaaatattgctaaaatacagtttagatttaccatacacacaaactgggatttatttttttcttgtggttatgcgaagtaacaagcatcccatcaaaaatccaatgagagtcccacaagtattcataatcacatcatctaactgtgcaaaccttccaataaatgtttgcaaaaattctatgccaatcgaaaatactgctccaagtataacgccattccaccaatgcttgtagatattcttaaaaataaatactggcaaaaatccatatggaacgaatagacatatgttcaaaatagttgccgcattaaatccgtcttcaaataatttaaaactaatataactatcaagaggtgacgatattccaaaactaccaccaataattcctgtaatttttaatattgatacaattatcaaaatccacaagaattggcataaacaatttaaaatcctaatttctattttcttcttttggataaattcaatacccagttcgataatcataacacctgcgaaaataataagtgccgttggaagtaacctcactaatatccatattccagtccatatttccattgtaatataactcactatcattcctccataaatttcatttatcaaactccctttattcctgctgaatcatcttaaaatgcttcaatgcctccacaattgcactttctttatcttctggacactgtggctgcctactatcttctttaggcaaattaggacttggaacaagttccaagtctgtcgcagcagtcatcggattgccctgcaagcagtccattctcctcgttgcaacgcgcaaattctttccaacctcaattccacattttctctttacctgtgaaatatacagatcggaaaccttcatgccggcattatgttcagccacatacttctttatctcatcatatgttgccttagtctctacaggtgttatatccacatcatcaagttcaatcgtgacattaatgtaatcatccggcttttgtttcagttgggacaaaagaacaaccgtctcaacgtgccccgtatgcgcaaactgatcaaacgcccgcacttttctcagttcatatccgccatccaccagaatccgcagatcacgtgcaagcgttgccgaatcacaactcacataaacaatccgctgcggcttcatggcaagcatcgtggacaaacactgctcatcgcaccccttccgaggcggatctaccacaatcacatccggatggcgcattcctgcatccagattattgctgttgtaaaacgctggaagtacctcctccgcttttccaacataaaactgtgcattggtaattccatttaacgcagcattattttttgcgtcctcgatcgcctgcggaacaatttccactccgtatacctgctttgccttctgcgacaaaaataacgaaatggttccaatcccacagtacagatcccataccgattcttctccggtcagccccgcatattccagcgccgtactataaagtttctccgtctgtaccggattgacctgataaaacgattgcggagaaatgtgataggcaatcgccgtatctttcacagaaaaatcatttgtattgcgcagatggatataatccgtgatataaggcatgccccagatacattccgtgcgctttccaagaataacatttgtgcgctcggtatttatattataagaaatagaggtcatccccggaagcaccgaaagccgttcgatgagcgcgtctttctgtggcagcccgtctccgttaatcaccagacataccatcacttcttcggtggtaaatccatagcggatcaaaacatggcgcaccaacccggttccggcagcctcatcgtaagccggaatctgtgcctgatacatccactcctttactgcagacagcacatctttattttcctttaccccaagcagacagtcttccaccggaatgatggcatgcgtacgtgccgcataaaatccggtcacaagttttccttctttatccagtcccaccggaaactgtgccttgttgcggtagcggaaaggatgctccatcccaacgatcggcagacacacccgctctaactcctctttggaaaatccaccaatcctctgcagattactgcgcaccttgttttccttgaatgcaagctgttcctcgtaggaaagtgcctgtatctgacagccaccgcagcggcggtggagcggacattgcggttctacacggtatggagatggtgtgataatttcctccacacgggcatatccatagtgctttttcagttttgtggcacgagcacggatttcatctccgatcagcgcatccttgacgaaaaatgtcatcccatcgtactttccgatgccttccccgtcgactcccatatctgtaattttcaaagaaaataaatcgttttttttcatccttttaacctgcgaagtcggagtcaaaatatctttcggctccgactttatctcatcttatttgcttgtcttgcggatatttgtctccagcaggcggctgtacccctgccactcaagattattgtccggcacatttgccagaatctcccgcatggtttccatctttgcatccacgttgtccgcgaagctcaaagccatcgcttcaaccagtgccggtttcttcggagatccatactccagttctccgtggtgcgccagaatgcagtgctttaactcattttccagaaccaccggaaatccctcaatggaacggattccctcgcctacccactcggcaccgatcataatatgcccaagcagctgtcctgcatcggtataatcatttgccggaaacgccgacaactcttttaatttaccgatatcgtggaaaatcgccgccgtaatcagaagatcccgattcaaaaacggataattctgcgcaaaataattacagtttcttgtcacgctgacggtatgttccaacagacccccgacaaatccatgatgtacactctttgctgccgaatgaaatttaaaccggtccgcaaatgtttgattgtcgaaaaatctgtgcagcagctggttcaggtaaggatttttcacagaatcaatatatcctgtcaattcggcatacatctcctccacatccttgtccgtacaaggaagatactccttaggatcaatgtcctcctctgaaacacggcgtgcacgccggatcgacatctgcagatttccctgaaagctggtgacatctcccgtaaccgccacataatccagcgcgtcaaactcatcaattcccacagaacccggatcccagatcttggcatcaatcgttcctgttttatcctgcaggatcacattgtcgtatgcttttccggctttggtcagtgccgcctgtttgaatttacacagatatacttcatttactttttctccttctcggagagattcaatatatttcatagtaactccttatttccaattttactgcaaaacccctgcttttaatttacaggtaatctttttataccccttagtaccttcccgcataaccgtaaccgaataggtttctttcggtgtcagctgcaacagcacctcccggaactgctctgcacttgcaacctcctggcctgcaacggaacggatcacatccccgctctgcagtcccgcatccatggcaggcgaatccatctcaacttttttgatatatatgccctttgggatatcgtatttctgcgcaatatgctgggtaacagtagaaatgtgcacaccaaaatacggcacctctttgtccgcaaataatagatcaatcactggcatcagttctgatatttccactgcagtgagcgtatttgcagaagccgcactatagctttgcatcacaacaccgacaagttcgccatccatattgatcagcacaccgcttccattctcgctggcaacaatatctgtcgtgtatacactgtaattattgtccggggtggaaatttcattattggtcgctgtaatagttccggtcaggatcgaataattcgttccaagcggactgccgagggcaatcacaatgctccccttatgtatggtattcgagcctgctgttttcatcacggtgatggcattccgcgtggaatcttccagatcctccagatccacggtaagtgccgcaagaccggtattcccatcgtatctgaccagctttgcctctgccaccgcatcatttacaaaggtaactttgatctttgcagcatctttaatcgtttttttctccgtaagaatccagagtttacctccactttctccaatgatcgtgccacagccctgaccttcccgttcataagagttgttaaaccagtccgtatcactgaccacccccgtgatcgtaacgatggacttatttgccgtatttccaatggcgtacagctctgtctgaatctgttggtaatcgtccagcgtcatcggctgtctctcttccggagtctgtgtctcctccttttcctcagacccctgctccgtttcttccaccgatgcctgctgtgaatcctgtgctccggtatccggcacaggaccttcctcctgccgcagaaccggaatcataaaaagcagcaccagacacacagccagcgcaaatacacccccacaggcagcagattcccccaaccggacccacatacgtttataattctttggtttgtccttaatctgttctctgacaaacgcattctttggttgctgtttatcactcataaccactattatattcgcatttccatgcacttgcaacaatcacattatttttcttttccaaaatggcactttgcgttataatacaagagagaatactatataaaaaggaatatcactatgaatcagaaagtttatcatacacttgaatattataaaatactggagcgtctggcagattatgccagctgtgaagaggcaaaagaccgctgtcacaaactggttcccctgaccgatcctgcggaaattgcacacctgcaggaaactacggcagacgcactcagccgcctgtaccgcggaagtggcatcagtttttccggcgttcacaatgtcaacgcttccctgaaacgtctcgatatcggtggcaccttaaataccacagagctccttatgatctgttctctgttggaagttgccaagcgggtcaaagcatacgaccgaagcgaccgcaacgatgaaaaaacagattccctgtcaccgcttttttcacagatccagccgctttctccccttttggatgaaatccgccgctgtgttgtcggggaagacgaaattgcagacgacgcctctgcggcactttctaaaatccgtaaatccatccgggggatgaacgaccgcattcacgcacagctgactggtcttatgaacaacacaaccacccgcagctatctgcaggatgctgtgattaccatgcgtgacggccgctactgtctgccagttcgtgccgaatccaaaacctcggttcccggtatggtacatgaccaatcctcaagcggttctaccttatttattgaaccgatggctgtcgtcaatttaaataacgaacttaaggaactgtttttaaaagaacaggaagaaattgaccgcattttagcagatctttccaaccgtgtgacagaaaacgcaaacggaatccgtcaggattatactgttcttgcggaactggattttatttttgccaaagccgaacttgccaaaagttacaacggtgttgcccctgtctttaatgaagagggacggattaacatccgcaaaggccgccacccactcttagatcctaagaaagtggttccgattgatgtacgtctcggtgcggatttccggcagctgatcgtgaccggtccaaacaccggtggtaaaaccgtctctttaaaaacggtgggactgctgactctgatgggacagtccggtctgcacattccggccggagatcgctcggaacttgccatttttcacgaaatttttgcagatatcggagatgaacagagtattgagcaaagcctgagtacgttttcttcccacatgaccaatatcgtccgcattttacaaaaggcggatgaccagagcctgtgtctgtttgacgaactctgcgccggtaccgatccgaccgaaggtgccgcacttgccatctccatcttaaacaaactgcaccagtatggagcggtcaccatggctaccacgcattacagtgaattgaaagtttatgcgctctccacagaaggtgttgaaaatgcctgctgtgaatttgatgtcgatacgctcagtcctacctaccgtctgctgatcggtattccgggaaaaagtaatgcgtttgccatcagttccaaactcggactggcagaaaatatcattgaagatgccaaaggccacctgagtgagcgcgacgtcaatttcgaagatatgcttgccaatctggaacagagccgtatcaccattgaaaaagaacagctggaaatccagaaatacaaagcagaaattgaagatttaaagaagaaactgaccgccaaaaatgagcgtctggacaacagccgtgacgagatcctgcgcaaagccaatgaagaagccgtacagattctcaaagaagccaaagaccttgccgatgagaccatccgcaatttcaacaagtacggacagggacaggcgcctatgtccaaaatggaaaaagaacgcagccgtgtccgtgacaaaatgagtgccagtgaaaaagcactctccatgaagaaaaaggaaacggtcaaccacaaagtacctaaaaagttgcgcatcggtgattccgtgcgtgtactgtccatgaacttaaagggaaccgtgcacacactgccaaacgccaaaggggatctgtatgtccagatgggaatcttacgttccctggtcaacatcaaagatctggtactgattgatgaagatgcctctccggcggcaaaaaaatacggaggtacttcttccggaaaaataaaaatgagcaaagcggcatccgtttctacagagatcaatctgattggtatgacggtagacgaagccattgcccatctggataaatatcttgatgatgcctatgtggctcatctgccatccgtccggatcgttcacggaaaaggaaccggtgcactgcgcaatgccgtgcagacacatctgaaaaaccagcggtacgtgaaatcttaccggatgggagagccgtctgagggcggtgccggtgtgaccattgctgcttttgatgtttaaatacctattgattttttataataaggagggatttccatgtccaaacagaaaatactgattgtggacgatgacaataatattgcagaacttatttccctgtatctgaccaaggaatgctatgataccaaaatcgtcaatgacggggaagaagccctgcacgcatttgaacactataaccctaacctgatcctgcttgatctgatgcttccgggcattgacggctatcaggtctgtcgggaaatccgtaccaaaagcaacgttccgatcatcatgctttccgccaaaggcgaaatctttgataaagtactcggactagagctcggtgcggatgattacatattaaaaccatttgattccaaggaactggtagcacgcgtcaaagcggttctccgccgtttccagcctgccaaaaccgagtccgttgtagaattaaaatgtgtggaatatccggatctgaccgtcaatctgtccaattattcggtcatgtacaatgggcatccgattgacatgccgccaaaagaactggaactgttatatttccttgcagcttctcccaaccaggtgtttacccgcgaacagctgctggatcacatctggggatatgaatacatcggggatacccgcacagtagatgtccacgtcaaacgtctccgggaaaagatcaaagaccatgaaacctggtcaatcgcaactgtctggggaatcggttacaaatttgaggtaaaaggatgaaaaaaacactgatacccaaactcattttcggctatgtcctgtttgtggttctcggctttatcatcctgtgtacgttcacacagcatgcgatcacgcattatgccgaaaaccgggaggcacagcagctataccgggaatctgtacagattgcatcaggttatgctgacaattataataaatacagtttttcgttgcaggattttcaaaaacagatgcaaagtcttggcgaatatctttctgcccaaatctggatcatggacaatcagggaaatattctttttgattctaccgatgaatccgtcggcaaagatgcagcaaatgccaattataaaacgctcaaaggtttcaacacttccgactttggcaaccgttattatatgaccggtaacttttacggatcgttttccgaaaaaaaccttacggtattttctccgatcaccagcaattaccggattcacagttatgtcatgatccataagaccgtgtcctccatcacacagaatgcaaacggttttatgaacattgttttttataccattgaatttgtttttctgacagcactgttcctccttttgctgtttgcacatggattttaccgtccactgcatcggctgacaatcgtctccgagagttatgccaaaggaaattttgaaccgcgcacacagatccaccggaacgatgaactgggatatcttgccaacaccatggattatatggcgaatgaactggacacactcgaagaagaccagagaaagtttatctcgaatgtttctcacgatttccgttctccgctgacatcaatcaaaggatatatcgaagccatgttagacggaaccattccaccggagctacagaataaatatctgaatatcatcctgtttgaaaccgaacgtctgaccaaactgacacagggaattctggatctgaaccgttttggacagcaccggggtatgatgcttgaccttacagatttcgatatcaaccgcatgataaagacgaccatcctcacctttgaaggaacctgttctgccaaagggctttcttttgatcttgtcttaacaggacaaaagttatatgttcacggtgatatgagcaaaatccagcaggttctctataacctgatcgacaatgccacaaagttttcccacaatgatgcatcaatcaagattgaaacaagcatcaaaaatgaaaaagttcttatttccgtgaaagattccggaatcggaattcctgcagaaagtatcaaaaaaatctgggaccgcttttataaaacggacctttcccggggaaaagataaacggggaaccggcctgggacttgctattgtaaaagaaattattcaggcacacaatgaacatatcaacgtcatcagcaccgaaggagtgggaacagagttcatctttaccctgccactcgcaaaaaaagaagtacagtcataactgaccgtacttcttttttcagtcaatggtaagttcctgatccttccggtcatacacactgcgatacatctttgtatctatgctttccttatccagagaccatttattttcttcttccatggcatcttcccgcagcagatccgtttcaaaccgatacccttccgttgtcacagcacgcagatagatacgcagtggtttccgcgaaggggtttgtccttcctgtgcctgcgtctgttctacgtcttctttctgctgctgtggcttctcatataccatcctgcaggtaacggtaccggaacctgaatcaacggtagatccttccgaattctcctccaccgcctgttctgtcgtcaccagatccttatcgtcctttgatgactcctgtttttcctctagcagattctgcatcagatcctgcgtccagatttcctctccatccagggatgctgctatttcaaaacttttaaaatgatacatcgcaacattatcaagcgtataggtacactttcctttcagagaaagttttccgtcctttaatgccggcgttccatctaacgttcccgataaaacctgatcaaattttccgctgacaccatcaaagtcttccaccacttccgttgtcttcttttttccgtttgcaagaaggaacgtgacatttccgttgaatgttttgttaagcggaagtgtgatatttcctttgaacatgtaaccgtctgctttcagcggacattccgttgttccgaaatagatgctcatcgttgtattatcggtatactctttcggaatcacggaaacttccaccttatactcgtgacgggcaaaatccatatcctttacttctatggaataatcctcgaccatactggcctcttcttcgagtgttttttcaatgcttgactgcattcctcctacatccgaaagaatgatgttggtcgtatcctgcagataggcaagctggttggtcagctcactgactttgccatacatcagaattccaaacaccaaaagcaagataaggatcagtacaatgagtatttttttccagtttgctttccattttttcatagaaattattcttcgctatcctcacgctttacgatcgcaataccaagttcttctaactgtttctcatccacagaacccggtgcctcagacatcagatcggaagcatcctttaccttcgggaatgcaatcacgtcacggatagaatctgcatgtaccatgtgcataatcatacggtctacaccgtaagccagtcctgcgtgtggcggcacaccataggagaatgcatccagaaggaatccaaactgctcatgtgcgcgctccttggtaaatccaagcacctcaaacatcttttcctgaatgtcatcctgatgaatacggacagaaccaccgccaagttcggtaccgtttaatacgatatcgtatgcctttgcgcggacagcacccggatcgctgtcgatcttatcccaatcctcttccatcggcatggtaaatggatgatgcattgccataaaacggttctcttcatcggaccactccagaagtgggaattctgttacccacaggaaattgtacttgttctcatcgatcagtccaagttcttctccaagctgtaaacgaagtgcgcccagtacgttccatacgatcttatttttatctgctgcaaacaaaagcagatcgcccggcttgccgttcatctttgcaacaagtgcgtttaactcgtcttctgtcataaactttgcgaaagaagacttgtaagtgccatcttcgttaatgcacagataagcaagtcccttggcaccgcagccctttgcatgctccaccagcttgtcaatcttcttacgcggcatatgtccctgtccctcgacattgataccacggacagaaccaccgttttccagtgcaccggtaaatacaccgaatccacagccctttacggtctcggatacatcgaccagttccataccgaaacgggtatccggcttgtcggaaccgaaacgatccatggcttcctgccacggcatacgctgcagcggaatctgcacgtccacaccgatggcttccttaaatacaaattttaacagacgctcgttgacatcaatgacatcgtcgatatcaacaaaggaaagctccatatctgcctgtgtaaactccggctgacggtctgcacgcagatcctcgtcacggaagcagcgggcgatctggaaataccggtcatagccggatgccatcagaagctgcttgaacagctgcggagactgtggcagtgcatagaaatttcccggatgcacacggcttggcacaagataatctctggcaccttccggtgtggacttgcacaggatcggagtctcgatctctaaaaatccctcgtttgccataaactgacgcatcagtccgagcacacggcttttcagcattaagttcttttgaatgtccggtctgcgcagatccagataacggtatttcagacgaatatcttccttggtctggctgttctcctcaattgcaaacggaggtgtctgtgactcagataaaatgcgaaggctggttgcgatcacttcgatatctccggtctttaagttttcattgactgctgcagaacgcttctgtaccgttccttcaacagccactacatattcacttcttaaagttcctgcctttgcaaatccctctgctccgacactctcctcatcaaacacgatctgtaacagaccacttctgtcacgcaggtcgataaaaatcagacttcctaaatttcttctcttctgtacccagcccataatggttactttttcaccgatgttggcactgcttatctcggtacatctgtggcttctgtgcaagcctttcattgattctgccatgattgtctcctttatactctccttattctatttgttaaaaaactcctcaaattcttcgtatccttctttggaaagctgctctttctggaatttcttgttcttgttcatgcggacaaccaatacctgctgtccgttctcgcgggcttcttttgcctgtttcatcacatccacaagtttctctgccggatacttcttttctactaagtaagcaactctcttcggacgctccggaattttgaacccgctctccatcagaagcaggataatacgctcaaatccgatggaaaaaccacatgccggcacatcgttgcctgtgaattttccaatcatcttgtcgtatcttccaccgccgccgcaggctgcaccaagctccggcattgcgatctcaaaaatggttccggtataatagctcatgccgcgcacgagtgtcggatcaaaaaccagtgtaaactctgcattctttgtcgcattgactgccgttgcgatctctgtcagactgtccgccacttcctgatccaggaaatctcccagcttgtcctttaagaatgccacaccttccgcaacatccttgcggtcttttaataactcaaacagctctaagtatttgtcaatcgactcttttgcatagccttcttcctcgagttctgctgccacaccttcgagaccgatcttgtccatcttatcgagggtgatgaaaatgctgtcgtaatccttctcttcaaatccgctgtatgctgccattgcctttaaaatccggcgctcattgatgtggatctcaaaattcttaaatccgagtctgccgatggtggtggttgtcgcagtgatcagctcaatctctgcaagattactcggctcacctaaaatatcaatatcgcactgggtaaactgacggtaacgtccacgctgcggacggtcggctctccacacgcttccaatctgcaatgccttaaacggtgtcggcagatcattggcatggtttgcatagaaacgggaaagtggaacggtcagatcgtaacgcataccgaaatcgaccacatccgcctcttcttttgcggtctcgagatttaacttctcgccacgctttaatactttaaagatcagtttctcgttctcgccgccctgcttgttggaaaggtttgcaatattttccatgcatggggtttcaatcggcgtaaatccaaagctgcgataggtatctttgatcacgctcgtcacataatcacggatttccatctctgcaggtaatatatctttcatgccgttgaccggctttttgctcagtgccatttgatttcctccatttttttctctttttatccagcatttattatacgtttcggggcctgatacgtcaaggattgttgcaaaatgctttttcaatcagacaactgtgtgttacaagtttacctctgaacagtaacagatcgtccaagaaaatgtccgcaccctcccgtcacgaaattgatctgtttcatcagttactttctgattatattttaaggcagatgtaaatgtttccatttcacatctgccttaatgccgttaatacgcatttattttaattcatcttccagcaataatgccgcatcctttacacagtcaatgcattctctcctgacaaccccatccgcaatacctttgagttctttacagataacggtaccattctgttctttgaatctgctgatgattcgtcttgcactctgcattgttttctgcggatttttattgatcatacccaatacatttactgctccgatgattgctccgcatgttgcttccatactgccacccatgcctactgcaaatccctgtgtaagatttttgactgtttcttcatccaaccctgcctgttcgcaatacgtacatgccacagcctgcgcacagttataaccacacatttttctttgaactgcctcttttacttttgattccatctttttctttccttttctttttgtaattaggaaggggatttcatccagctatttttctgagaacaactgctgcttgcgcgcaatcatctcatcaatcctcttcatatacagcccgacatctttgacattctcacaccgctcgatccggtgtgtgccatccgcattcggctgcggccatacccgtttggtagatgcccctgcgccacaggcaacgattgtctggcgttcctccatgattaacacgttatacacccctgccttgcccggcttggcatatcccacgttttccatatttcccgccattcctttctgacggtacagataatacggagagagtcccatctgatgacagtattcggcacacagatccatgtgctcctgcgtattgaccatcatcatgctctcatagcgatctttgaaaatgtttaaccgtgccgcacgcttgatggcaagtgaatggatcgtgatattatccggatcgagttcttttaaaatctccatcgtatttcgcacatccgcaagatcctcttccggaagccccataatcagatccatgttgatattgtcaaatcccagttttcttgccatatgaaaactttctatcgtctgttcgaccgtatgatggcgtccgatcagatcgagcgttttctgcttcatggtctgcggattgatggatatacggctaatgccattctttcgcagcaccagaagtttttcttccgtgatggaatccggtcgtcctgcttccaccgtaaattccagacaatctcccagatcaaaactgcacctgatcttgcggatcagacgatccagctggtatggctcaagtgtggtcggtgtccctcccccgatatagatcgagttcagtttgcgatgataattctttgcggcaacataatccagttccttttccagtgcgtccagatatgcgtcaacctgtgttttccaggcagtcagcggataggaagtaaacgagcagtacagacaggtgctcgggcaaaacggtatgccgatatacagactgtatccattcttataatccagccgggaaagcaatgcccgctcacgctctgcaatggcaatcgacagattgattttctcatcggatgccagataggtctgtttcatataggaagcaatctcttcttttgtttttccctcatcaagcatctgcatcggaatcttcgtcggacggataccggtcagtgtaccccatggcagcggctgtcccgtctcttcctccagcaggcggtacagatgttccttcaatgcattctttgtctctgtacgattggaaaaatccaccgcaaaggtgcgccgcgccggaccatccggcgcgtcatcccaggcgatggaaattctgtcatccgcataatcaatcgaaaaatgggaactccccgcttcttcctgctccgcagaatgattggtacacgccacatttttttcgtccgcatgcgcttccttcgtatagtaaagctccacatcttccttcgggaaaaacgctttaatcagcgaatgaatatcatattcaaattctgttctgtttaatgttacagtaatcataagtatggattgtacatcctctcgttttcaatggtcgttacatcgttgtgtcccggataaacggtcgtgcggtccggcagtgtcatcagcttttccttgatggaacgaatgatatcagacatgcttccgcccggaaaatcggtacgtcctaccgatgtgcaaaacagtgtatctccggaaaataccacattttcgtatgggaaatagtaacagcatccccccggtgtatgtcccggtgtgtgcagtacccggatatgaaatcctgccagatccagttcctgctcatcctttaaatatatgtccgcatggaacacgtggtgttcccctgtcatgtggcataaattcatctcttcattttccagcgtttctttttccgtctcataggcatagaccggaatcgaaaattcttttgccagatctgctgctccggttgcatgatcaaaatgtccatgtgtcagcagaattgccaccggtgtacatccttcctgacgcacacgctccgccagctgcttgggactgtagcccggatcaataatgatcagttcttttgtctcatcattgattgcaaaatagcagttggtctgtaccggccctaccacatagtgatttatttttaattttgccattctcttcctcctgtcggcgcaaccttagccagtcgtccgctccacatccatcacgctctcaatctgtcggatcttttccacaatttttgtgatctgtcccctgccttttgtctggaaggccacatcaattgttgcgatcccctgcttgctggtcttcgagtgaatcccggaaatattgatctccgcctctgtaaatactttggtaatatccacaagaagtccggaacggtcgtgacagaaaatcttgatttccgcatgatactcgccaaactgttctttgtctgcaccctcctgccactcagcttcaatcaggcgcacacgctccatatcggacaaatgcagaatattgacacagtcggtacggtggatcgacacaccacgtccgcgggtgacaaatcccacaatctcatctcccggaaccgggctgcagcacttactgaaatgcacagccacatcataaagtcccttgaccacaattccgctcttggaatgctttggcatatcctcctgcttattctccccaacagcctcaagcacttcctgatctgtcagcgtagtcggatgatccttgcggtattcatcgtacatacggtttacaatctggctttctttcaatcctccgtgtcctacggttgccagacaggaattccagtcatggaacccgtatttgcggataatctttccctgatattccggcttattgatttctccgaaattgattccctttgccttggcataattgttaatcagttccttgccgtgcagaatattttcttcttttaattcgctgcggaaccactgattgatcttgttcttggcctgtgtgctcttgacaatggaaagccagtcacggctcggtcccttggagttctgggaagtgatgacctcaatccggtctccgttctggatcacatagtcaatcggcaccagcttgccattgactttggcacctaccatcttatttcccacagcagagtgaatgctgtacgcaaaatcaatcggtgtggaaccgtttggcaggttctttacatctccggacggggtaaaacagaacacggtatcggaaaacagatccagatcactctttaaaagtgtcataaactctttattatccgacatgtcacgctgccactcaaggatctgacgcagccagcttaatttttcttcttcggttacggtcgtggaagtggttaccccattgttcacttccttgtatttccagtgcgccgcaataccgtattctgcggtacggtgcatctcaaacgtacggatctggatctcaaacggctgtccgctcggtccgatcagtgtcgtatgcaaagactgatacatattcggttttggcatggcaatatagtctttgaaacggcccggaatcggtttatatttttcgtgcatgatacccagagccgcatagcagtcttttacggtatccacaatgatacggatggcaaacagatcataaatctgatcaatggtcttgttctggttcaccatctttttataaatggagaagaaatgcttggcacgtccggaaatctccgctttgatgccagcctcttcaatttccctgcgcacatcggcaaccagtccctgtacataggcatcccgcacatttttgcgcagtgcaaccttttccaccagatcatagtaagcctccggctccagatatttaagagaaagatcttccagttcaatcttgatcttgctgataccaaggcgctgcgcgatcgggcagtaaatctcctgtgtctcacgggcgatccgctgctgtgcctccttggactggtattttaaggtacgcatattgtgcagacgatccgccagtttgatcataatgacacggatatctttcgccatcgcaagaaacatcttacgcagattctccgcctgcatctccaaccggtctgcattcttgtccttcggatttttaatattatccgtcagatgcagatgctgcagcttggttacaccatccacgagaagaaggacttcatccccgaattcctcccgcatctgttcttcggtcatcacggtatcttccagcacatcatgcaacagacccgcagcaatggtttccttgtccagttccagctctgccagaatgattgccacacagagcggatggataatatatgcctctccggatttacgcacctgtcctttgtgcgcctcaaaagcgacatgatatgccttttcaattaatgtgatatccgtggagggatggtatttccggatacttgcaatcagttcgtcatacaagtcctccggcttggaaaattcctgaattggtttaatgttgtcggaacccgaatgatactcgcgctcaattcgttccagttcttctgtagaaatatctgccatgcgttcacctactttttccatatgccataatataatagattattataatttataatttttcatattgcaatggtttcccctaagaaaactcgtagatatagcgttgtgtccggctcccggaaacatctgtatcctccagatagtaaaatcccagtttctgaagaagtgccacagaagccacattcttttgatccgtcagggcattgactcttggaaaatccagttcttcccgggcaaatgcaagaattgcctgacacacttccgtggccagtccctgtccctgtctgtccggatcgatcagatatcccagttccagttccacggcatccggaaattcccggtgctcgagtcctgccctgccgatcagttccccagaagctttatcaaaaaccagccacatcccatatccatagtatccgtacatattggtaatatatgcctgctgatattttttttctttttcctttgcaaacaatggttcaataaatcccggaatcctctctccgtctgcatccaggcgccatgttaccccttctttctgatacagtttttccagagcgggaagatcttccagcgacaattcccggatcacgcaccgtttcgtgcgcgcaatctcccacggctggccatggcatctttgaaaaatccgctccagaaattcatcatccacttcctcaaaaccttcaatcaccatccaggcgcccgcataactctgttccggaaatgccggatctgcataggcagccaccgccatatgcgcacggactgccgcctgaatcccggcatctgtcggcgtaatcaggaggacttcctctgcatgaagtttccacacagcaagcgcttcttccgttatgttttccaccggaaataccggaaagtctgtggacaattgcagaggattccattctttctgttgatagaccagtgcctttaatttcatcctgtcaaaaaaggcagactctttcgaatctgcctctcctttctaaatattacacggtttccggttccggatattcttccccgaaggtatccacaacaactgttttcatcacctgatcttccagcggacgatcactgtaatcggtagcggtctctgcaatggcatctaccacatcctgtccctcgataatcttgccgaacgctgcatatgcgccatccagatgcggagcgtctttgtgcatgataaagaactggcttcctgcggaatccggcatcatggaacgtgccatggaaagcacgcctgcggtgtggcgcagatcatttttgacaccattctgtgcaaattctcccttaattccatatccagggccgcccataccggttccttccggatctcctccctgaatcatgaatcctttgataacacggtggaaaatcagtccgtcataaaatcccttttttaccagactgataaagttatttacagtatttggtgcaacttccggatacagctctgccttcatcactttgccgtccgccattgtaaatgtaactactggatttgccataatatttgttcctcttctttcttatataaatttatttattctttggtcagtgcctcaacaacttttggaaattccataaaatgagaagccttaaccagtacggtatctccttcttttacatatgccagaagttcttccgtcatctcttcacgggttttcttataatgtacctcacactctggatttgcttttgcctcgctggcatattcctccgcaagtgtacccgcacagaacaatgcatcaatcccggaagctgcaactgcctttccgatacttctgtgaagttccttttcctctgctccaagttcgcccatatcgccaagcaccgcaatccgtctgcccgacgtatgtgccagcacatcgatagatgctttcatggataccggatttgcattgtaacagtcatcgatcacggtcattccctttacatgcagcagattggtgcgcccggcaatggtctgcacagatgcaatgccctgtgcaatctcccggatggaaagtcccagctgcagtccgaccgcagttcctgccagcgcattgtatacattatgttcacccggaatcggaatcttcgcatcgaaatcgccctgtggcgtatggatctttgcacacattccttcgagtccatgattttcaatgtctgtcgcataaatatcttttttgatatcaaatgcggaatccgcccccactccataaaaaattaccggttttccgtttacctcttttttcgtagaaagcttatcatcatctccatttaaaattacggttccatcgacctgcagatggtcaaacatttctgtctttgcctgcagaattccgtctcttgtaccaagattttccagatggcacaaaccaatatttgtgatcactccgatatccggccgtgccatcgctgccagacggtgcatctctccaaaatcggaaattcccatttccagtaccgcgacttcgtgttttgcgcgaatcttaaaaatagtgagcggaagtccgatctcattgttaaagtttccctctgtcttaagcactttataccgctgttccaaaacggaagctatcatttccttggtgcttgtttttccgacacttcccgtaattccaaccactttacaggataactgtgtccggtaaaaagctgcaatttttttcatcgcttctgttgtggaacttaccagaatatagggtcccgtctcttccggcagtgcatgatccgaaagcactaccagtgctcccttttcaaatacctgcggaataaaatcatgaccatccacacgtgcccctttgatcggaataaacagataatctttttgtacctggcgactgtcggtcactgctccggcaatttccttcgtaaccaggtcccggtccccgacaaacgtcccctcacatgccgctgcaatattttcaattgtcatccccggcattttattttccagttcatttttataaaaacatccaaacatgattatccctcatactttttcatggaaatggcaatcagtttctcgcagagctcattgaaattgattccaatgacagcagcttcctgtggcagcagacttgtcggtgtcatacccggcagagtgtttgcctccagacaatacatatgattattttcatccagcaggaaatccgaacgggaataggtatccagtccgatcacttcggctacctgctctgcatatttacgcatctgcgcagaaacttcttctggcagatctgccggacaggtctctaccgcactgcctgctttgtatttattcttgtaatcgtagaagccctgaatcggcgcaatctcaataactggaagtgcctttccttcaatcacaccaaccgagaattcacgtcccttgacatattcctcaatgaccagctcatcttcccagtgaaacgcttcatcgagtgctttcttaaactctgctgcatctctgacaatcgtcacaccgatactggaccctccgcagcatggctttacgacgcacggaagtgtcagcggaagctttgtcacatcatcctcacgattctcttttttcatggcaatgcctctcggtgcaggaattcccgcacttgcaaacagctgttttgccatacctttattcatggcaatcgcgctgctcaaataatcacttccggtatattttacaccaagcagatcaaaagctgcctgcagctttccgttctctccgttttctccgtgcagtgccataaacacgatatctgccatctggcacatacggattacattcggtccgaaaaagcatggggactgatcctttctggaagcttttacggctgccagatccggtgctacctccgggatgtcatctacttttacgctgatttcatccgcacggtcaaaaattccgtccagattttcctctttatcactgtaacccatgaacacatccagcaagatcacccggtgtccattttcttttaatgcagaagcaaccatgcttcctgtcttaaatgacacatcccgctctgtgctgagcccacctgctaatactatgatatccatgatctgttttcctcttttccattaataataatccttcggataccggaacctttttattttccggcatcagaccttttgtatcattatatacgtttgcccctgactaacacaagatattattttcttttagacacttttttaacaatatccagcacttcttgtacagaaaaaaagagactgctcagcactacagtctccttttgcacaaactccggtaggattccccctttattctattgctgccggcaaagccgctgccctgcgattctgttccattttccgcaccagctctgccatgtattcgaaaaactttctctccagatagtttttctctgtgagataactcccatattgatacaaaacattttttaattcttcggtttccgataactccacttcaaaaataaactgccttaacagctgcatgcgctcgtcctctatggaaagaagccagctggcaaccagttctaaaaaatcttcccgctctatgaggaactgcacgtagcgcccaattttattttctgtataaattttcttcttctcctttttcttttgttttcctacccgaatttgtatcaaaaaccaacccccaatgtcagtttctatatgtaatcatatcttattacatatttgatgtaaagacgcgattcgcgtatgctttttacacaaattattactgtataaataatgcattttacacaaaaaaagggcatccaatggatgccctccggtttctatgaactagcactccggctcgatcagaccaaatgtatttccttttctcttgtatacgacattgacctcgtctgtctctgcattgcggaatacgaagaaatcgtgtccggtcagttccatctgcacacatgcatcctccggatacattggcttcataccaaatctcttggtacgcacgatcttgatctcctcatcctcatctgcatcgctgtcgataaatgcttcgttgaaattgtctgccacattcatcttcttggatgcaagtttggtacgatattttctaagctgacgctcgataacctcctcaaccaagtcaatagatacatacatatcattgctgctctgctctgaacgaatcacatgtcccttaatcggaatcgttacctcaatcttctggcgctccttctccacgcttaatgtaacaaatacatcggtatccggtgcgaaaaacttctccagtttggaaagcttctcctctaccgctgcctttaatccctctgtcagttcgatatttcttccggtaattgtaattctcatgat

SEQ ID NO: 964 - DNA, 1476 bp, Unknown
  gut microbiota DNA sequence
aatcggaggaaaacacaatgaacggtataaaacaatggtgcctgacacaataaagaagattttaaaatgataccgggcagaggtgtggcagcaaaggtggaaggctatcatgttcttgctggaaatagagctatgttgaatgaaaataacataacgtttccacagcaaatgacaacacaggcggaagaatttattaaccggggatgtaccatgatctacatatctttggacagccttttcattggttatgttgtattgtctgatacgatacgaagtgagagtgttggtacaataaaggtattagaagcattaaatgtacagccggtacttcttaccggtgataatgaaaaagcggctgcttccattgcaagacagcttggtatttccgaaattcaagcaaactgtctgccggaggataagttaaaatacataaatgaatatcagaacagacaggaagctgtctgtatgatcggggatggaatcaacgatgcaccagccttaaaggcggctgatgtcggcattgctatgggcggtgtaggaagtgatattgctgtggatgcggcagacattgccctggtggatgatgaggtaaaggaattgccacatttactggcactttccaagcgaatgatgactacaataaagattaatatgtcattttccatgggacttaatttcatagctatcattctggcaatcacaggcactcttgatccggtcataggtgcattggtacataatgccggctcagtgcttgtaatcacaaattcagcattgctgttaaaatggaggaaatgtcaactttaaatccggaacatagagaggggaattatgagtaaaggaaatatggaaattagaaaaagcacaagagaagatattaagcagattatggctatttttacaactgctaaggagtacatggctgcacatggaaataaaacacaatggggagatggataccctggtgaggagatactaaaaacggatatagatgcaggaaacagctatgtaattgtaaataatggaatgattgtgggaacattttcttttattattggagaagaaccaacttatcaggttattaaaaatggaaaatggacagatggcagactctatgggacgattcatcggttggcatctaatggaatagtaaaaggaattgccagagcatgttttgaatattgcataaaacagatagactatattcgcattgatacgcacaaagataatatttctatgcagacagcaattgagcgatttggatttcacaaatgtggaaatatatatgttaaaggtggcgcggaacggatagcatatgattacatttcataaaaaacaatggtgtctgacacaataaatatgaatcataaaataggaatggatattgagatttaacttgttttgtgatagaatatcattactaaaaaatgtgcagatgtacggaaatagggagtgtaacgatggagattaaaagaa

SEQ ID NO: 965 - DNA, 27227 bp, Unknown
  gut microbiota DNA sequence
agcgttcttgaattattctcaaaatctttcaaggtttttcactgttcagttatcaatgttcgttgttgttattttcaacagcttgtatattttatcatatcttcaagtcgttgtcaacaacttttttatttttctttgttatctctcaaacgcgacaactctgatatcttatcatgtttgtcattgtttgtcaacaacttttttcattttatttagaaaatatagagcggagaaggagggatttgaaccctcgcgccggtcaacccgacctatacccttagcaggggcacctcttcggccacttgagtacttctccagatattttctatataaaattacgtccttacgtgacgcattgtttattctactaaaaacagtcctttttgtcaacctcttttttaatttttattctatttctgatgcaaatttcttaattgacgtctcatatagattatttccatcctgatcgattactacaatggccggaaaattctctacatataactttcggattgcttctgcaccaagatcttcataacatacaatctcggattttctgatacactttgagagcagagcacctgctccacctactgctgcaaaatagactgcatgattgcggataatcgcgtctattacctcttttgatctctttcccttgccaatcattgctttttcaccaagatcaagcagggtaggggcatacttatccatacgagtggctgtagttggtcccgcagatccaatcggacgtccttcacgggcaggagaagggcccatataatatatcgttgcatctttgatatcaatcggtaattgatctccccgatccaatgcttctatcatcctcttatgtgcggcatcccttgctacatagattgtccctgtgatgtatacataatccccggaatgaagtttttttgtcacttcttctgtgatgggtgttgtaatatgttgatccatacctgttcctccttatatcgttctgactgcatgacgatttacatggcaacagatattaactgccacaggaagccctgcaatatgtgtcggataagtatttatattaacagcaagggcagtagtggttccacctaatcctcccggtccaataccaagcttattgattttttccagcatttctttttccagatctgcaacataaggaatctcagaatgttcatttaccggccttgtcagtgcttttttggccagaattgcacatttttcaaatgttccaccgactccaacaccaacgaccattggaggacacgcgtttggtcctgcatcttttacggcagtaagaatcgcattttttactccgtctattccatccgcaggttttaacatgaaaatacggctcatattttcacttccaaatcccttcggagcaaatgtaatcgtcaccttatctccgggaacaatcgaatagtggataattgccggtgtattatctttcgtgttttcacgaagaatcgggtcagctacaacggatttacggagatacccttccgtatacccctggcgcacgccttcattgattgcatcttccagccattgcccttcaaaatgcacgtcctgaccgatttctacaaaaaatacagccattccggtatcctgacagataggaatcatttcttctcccgcaattttaagattttcctgcaactgcagaagaattttttttccaagttcggatttttcttcttctgcagcctttttcatggcatgttccatatcttctgcaagaaaatgattcgcttccatgcacatttcttttatatttcttgtgatttcttctgtctgtatggtccgaatcatgatggatcaccttccgtctcattttcttctgttgcttcctcttccggtggcatcagtgatttatcttctacgactcttgcaatgcttgcaaccgtcacaccacttttgaggtcaatcagttttacacctgaggttacacgtcctagtaatgccgtatcatttacgcgaattcgaatgatgattccttctgttgtaatcaacatcagttcatcatcttttacgacagacttcactccgatcagatttccagatttttctgtgattttatagcattttacaccttttccaccacggttctgtgttgtaaactcattgatccgtgtacattttccaagaccgttctccgatacgatcatgacggactctccctgggaagccatctgcatggcgattacttcatctccggcagtaaggttcattccaatgactcccattgtcgtacgaccggttgcacggacatcggcttctttaaaccggatacactgtccataccgggtaaataacagaatttcttcatcatccccggtaatttttacttcgatcaattcatcatcatcgcgcagactgatcgctgccaatcctgttttccggatattttcatagtccagcacggaagtttttttcactattccgtttttggttgccataaacagatatttatccttctcataatctttgatcgggatcattgcggtaatcttttcatccggctgtaacggaataatattgataattgcggttcctcgggaagtccggctggcttccggaatttcatatgccttaatccgatacacacgtcccatattggtaaagaacatcaggtaatggtgggaggttgtcataagcatttccacgatataatcatcctggatggtctccattcccttaattcccttaccgccacggtgctgactcttgaaattatcggttcccatgcgcttgatatagccaacttttgtcatggtaatgaccgtattagtttccggaatcagatcttccatggaaatatcaaactcatcgtatccgatctgtgttcttctgtcatcgccatatttatctgcaatttccagaatttctgtgcggataactgcaagaagttttttctcatctgcaagaattgccttgagttccgtgatctgtgccatgaggtctttatactcgttttcgagtttctcacgttccaaaccggtcagggtcttcagacgcatatcaacaattgcctgtgcctgcgcatcggataatccaaaccgctccatcagggaattctttgcgtctgcagttgtacggcttccgcgaataatggaaatcacttcatcaatgttgtctaatgcaatgatcaatccctgtaaaatatgcgcacgttcttccgccttgttcaggtcaaatctggtacgtcttgtgataacctctttctggtgaatgagataatagttaagtaattcatataaattcagaatttttggctggttatccacaagcgcaaggttgataacgccaaatgtatcctgcatctgtgtgtgtttatataataaattcaaaacaacacttggatttacatctcttcgaagctcaataacaatgcgcatgccttcgcggtcagactcgtcccgaagatctgtaattccatcaattcttttatctttgtgcagttctgcaattttttcaatcagtctggctttgttgaccagatacggaagttcggtgacaacaatacggttttttccgttatccatcggttcaatatctgtcacagcgcgtacacggattttaccacggccggtccgatatgcctcattgataccggcagtacctaaaatcacacctccggttggaaaatctggtcccttgatgatgttgattaattcatcaatgtctgtctctttctcctcaatatcgttgtcaattaatttcacaacggcatgaatgacatcacgcagattgtgaggaggaatatttgttgccataccgaccgcaatacctgtcgttccgtttaccagaaggttcgggtagcgcgccggaagtacggtaggttctttttctgtttcatcaaagttcggggtaaagtcaacggtatctttgttgatgtcccgaatcatctgcatggaaatttttgaaagccttgcctctgtgtatcgcatggcggcagcaccgtctccatccacagaaccaaagttaccatgtccgtcgacaagtggatatctggtcgaccacggctgtgccatgttgacaagtgccccgtaaatggagctatccccgtgcggatggtatttacccatcgtatccccgacaatacgcgcacatttacgatgtggcttgtccggtgtattactcagttcgatcatggaatacaggacacgccgctgtaccggctttaatccatccctgacatccggaagcgcacggcttgcgataacgctcatcgcgtagtcgatgtaggaggtttccatcgttttcttcaggtcaacctgttgaatttggtcaaatattttatcgtccactgatctgctcctccctaaatatcaagattctgtacatacttggcattttcttctataaattcccgtctcggctctactttatcacccatcagagtcgtgaatgttacgtcaatttccgatgaactttcgtcatccatcataacctgttttaaaatccggtgctccggatccatggtggtttcccataactgttccgcatccatctcaccaagtcctttgtaacgctggatcttattattctgatcgcgcccgatttccacaagaatattgtttaattcttcatcactgtatgcataccagacatttttgtttttctcaattttgtaaagcggcggggtagcaagataaacatgtccctgcttaataagctccggcataaaacgatacaaaaatgtcagcatgagtgttgcaatatgtgcaccgtccacatcggcatctgtcataataataattttgttataacgcagcttggatatatcgaaatcttcatgaattccggtaccgaacgccgtgatcattgccttaatttcggcattatcataaatcctgtcgagtcttgccttctccacatttaaaatttttccgcgaagcgggagaattgcctgtgttgcacggcttcttgcggtttttgctgaaccgccggcggaatctccctcaacgataaagatttcacaattttttggatttttgtcggaacaatccgcaagttttcccggaagggcagtaccctcaagtgctgtctttcttctggtcagatcacgtgctttgcgggctgcctccctggcacgctgggccagaagtgatttttcacagatattttttgccacatccggattctgctccagaaaatacgtcagctgttccgtaaccacagaatctacagcaccacgtgcctcactgtttccgagtttctgtttggtctgtccttcaaactgtggctcttcaattttgatactgataattgctgtcaatccttcacggatatcatctccggtaagtgccacatcgctgtcttttaaaatttttgcttcccgcgcatacgaattaaacgttttggtcaacgcatttcgaaaaccggcaagatgtgttccaccttccggcgtaatgatgttgttaacaaaactaaacgtggaatcgttaaaagaatcattatgctgcattgcaacttccacgtaaactccgtcacgatttccctcacagtaaataacttccggatataacggttcttttccgcggtttaaatactccacaaattccttgattccaccggcataatggaatttatgattatgcagactatcttccctcgtgtcttttaatgtaatgcataatccttttgtcagaaaagcagtttctcttaaacgctgtttgagcgtgttgtaatcatatacggtttcttcaaagatttccgcatccggcagaaaatgaacctttgtaccgtgaagttgtggatcacagtcccggactgccgctaccggtccatccgcttttcctctcttgtaactttgcatatacacttttccgtcatgatatacttcaaccgttaaccagacggagagggcattaacaacagaagcacctactccgtgcagtcctccggatactttgtatcctccgccgccaaactttccacccgcatgcagaacagtaaacacaacttccagtgcagacacaccggctttgtgattcattccgacaggaattccacgtccatcatcttcaacggttatggaattatctttttctatggtcacctcaatgtttttacaataaccggcaagtgcttcatctaccgcattatcaacaatctcatagaccagatgatgcagtccgcgtgcagatgtacttccgatgtacattccgggtctctttctgaccgcttcgagtccttcaagaatctgaatctgatctgcgccatattcctgattattatttgttaattcgctcatcaatttcctcctcatccaacggatgaacctttcctttatatctcttcaaccgattccttttcataaacatttccgtttatcacctggaaaattttgttgatacaaaaacggttctttacaaattcctccaaccctgtacatgtaatgacagtctgtattttagcaatactgttcagcaggtaattctgtcggttactgtcaagttccgataacacgtcgtccagcagcaataccggagtatcatgaatggatctcctgaccagatcaatctccgataatttcaaagagagtgcagaagtacgctgctgtccctgagagccaaacttacggatatccacattatcaacggaaaacagcatatcatctctgtgtggccctaccgttgtctggcagagtttcaaatcccgattctgtgcccgcagcaattcatccgaaaaaagatcagcggtaatatttggctcatactttaataccagatgttccctgccaccggaaattttcgaatggatttctgaaataatttcattcagttcctccacaaatttttttcgtttccggatgattcttgttccatactccagtaactgcatatcccataccggaagagtatccacaaggtccgggcgaaaagaaatatctttcaacaatttgtttctctgattcaaaactttgttgaaactggataaatctgacaaatatagtttatccaactgacagagttctaaatcaataaatcttcttctctccgcaggtccgttttttataatatttaaatcttcgggcgaaaagaaaacgatattgagtattccaaacaactcacttgcctttttgatcggaatcttattcacagccacgccttttgatccactttttctaagatgcatatcaatctggtactctttttcttttttctgtacgacagtacggatatgtgattctttctcaccaaaccgaatcatctctttatcacggcttcctttgtgggattttgttgtaccactcagataagcagcttcgagaatattggttttcccctgtgcattgtctccgtaaagaatattggtcccttcatccaggtgaatatccagattttcataatttcgaaaatttcgcagctcgattgattttatgatcattgaactatctgaattgtttcaccctgaaaggtaacaacatccccattatgtaatttttttcctcgttgaagttctgtctgaccgtttaccgaaacctgtccatctaaaataaccattttggcatccacaccggaaccaacaactccggcttttttcaacgcctgtccaagtttgataaattcgtcttcttcacggatatttactgtaatcatgtaatctcctaatttgcagcattattaaagttaacaggaagaataagataaatgaattttccttcatcatctttgataaaacatggagcttttgggtttaccatataaagacttacattttcttcatcgataacacgcaatgcatcaatgaagaattttggattaaatccaatcaggatatcttttccttctttctcgatatcgatatcttcattcatggaaccaatgaaagaattgatttttaactccatacttccatctgtgatattcataatgatcggctttttgtcaccttctttgacaagaagagtagcacgatcaatacaatcaagtaattcttttttattgactataactttcgtttcataagcagatgagagcatctgatcaatgcggaaatattctccttcgatcagacgggatacaaccgtagtagtgtcaaattcaaaaacgatatggttgtccgtcaggtagatgagtacatcatcatcaactccacctggaacaatcttgctgatttcctgtaatgtttttccaggaacgacaacctttttattttcgtaattatttttaagttctatattacgaatggagatacgatgaccatcaagagaaacaactttcagttcattctcaataatttcaaacagttcacctgtcataagtttgttattgtcgttatcagcaatggaaaagattgtttgtctgatcacttccttcagtgtgaactgggaaatcacgattgcatcatttttttcaatgtatggaagatatgaaaaatcatctccggattttccaacaatattgaattttgctttttcacaggagatcaccgtcttaaaagaggcatctgtttcaatcataacatcactgtctggaagtttgcgtacaatttcagaaaagatttttgcatccagtgcaataactccacgttcagcaatttctccttctacacgggtttcgattccaagttccatatcgtttgccattaatttaatttcattcgtagaagcatcgataagaatacattcgagtattgccatagttgtacgggtaggaacagctttggatacgatatttactccgcgcaataaatttgatttagaacagatcagtttcatgaaaaactccctcctggtataaataaaaatatattaagacattcgtcttagtcttaataggggctgttaatatgtgaataagcctcttcatgttagatgttaagcggtttccggcgtttgataaccggcttgaaagcatgtgaaaagtgtgaggattcttaaggttcgtctgtggaacaaattttaagagatttacgttaagaacctcatgcacaatccatccactgtggataaacgtgaataagttgaaattaaaaaaagcaaataaaactacattacaataggaagaaactcatttagtttggatttattttctttttgatggtttcaatcatattccttgtagtttcgtttttttcgtattcttcggtaactttcttgataccgtggataattgtggaatgatcgcgtccgccgagtaaagaacctatggtatccagtggactttcggtcatatttttacataaatacattgcaatctggcgtggttttgcaacatcactgcttcttgtctttgaaatcatctgatctacagagatgtgataatgttcggaaacaacttcaataatgagctgtggtgtgatttcccgtggcttgtccggcgtgataatgttggaaagttccttttctgcaatatccattgtaattggaatgtggacaagattgttataagcaagaagtttatttaatgctccttcaagttcacgcacgtttgatttaatgttgtttgcaatgtagcttaatacttcatcatcaatgtcaaagttatccgattcggcttttttccggagaatagccatacgtgtttcataatccggcactccgatatctgccatcagtccccactcaaaacgggaacggatacgctcttcaagggtttccatttcttttggtggtttatcggatgtcagtataatctgttttccctgtgtctggagtgcgttgaatgtgtggaaaaactcttcctgtgtactttcttttccgatgataaactggatatcgtcaatcataaggacatccactttccggtatttgtcacgaaattttgtcatggatgaagcattaccgtttcgaatggattcaattacttcattcgtaaattcttcggatgtaacgtagataaccttggcatccggattctggtttaaaataaagtgcccgatggagtgcataaggtgggtttttcccagtcccggaccgccgtaaatgtaaagcggattatatgcttctcccggagattctgcaactgcaagggaagccgaatgtgcaaaacggttattattaccaacgacaaatgtatcaaatgtataatttggattaagattagattcatctgcggttacggcaggtgtagcttttgctggttttgtgtttaatttcagcgtcctggcttcttccggaaggatgaatttgatttcatattcaatttctgtaatttccacgatcgcaacgcgaagtggtgcaaggtacttcttggaaatatagcttaaagccatctgttcggaaggaaccaggatatagagagtatttccctcaatggcaaagacttctaagggacgaatccaggtatcgaaagagacatcactgatttcgtactcctgtttcacagtatttaaaatttcatcccacttttcaataatcttatccatctgcttttctccacattcttcttataaaataggatactatcccataatcctattcttatctataatacaccattttcggtgtagaatcaactttttagacacccttttatatttttcaaaactaacatataaacatatgcgtaaacggcgaaataatgcgttttaggaaggttttttaattatatggatgttgatggaaaaagagttatccaaggcgtattgacagtttatccacaagttatccccaaattgtggataacttattatttcgtggaaaagcgtggatactatatatagtggaatgcttttcttccttattatatgtagtgtttataacattaaattaggaaaaaaccttgattttacttgacttgtagcgtttttctgatataatgctaagtgatgttttttaacgtagaggaggtggatacgaaatgaagatgacattccaaccaaaaaaaagacagagagccagagttcatggtttcagaagcagaatgagtactgcaggcggaagaaaagtattggctgctagaagattaaaaggtagaaaaaaattatcagcttaggccacattattgtggtcttttcttctattatgaggatagtttcagatgaagttctcagaatcattaaagaaaagtaaagattttcagaaggtgtataacaaaggaaattcatatgcaaaccgtttattggttatgtatgttctggaaaatcacacagacaaaaacagattaggtatatccgttagtaaaaaagtaggaaatagtgttataagacatcatttgacccgtctgatccgagaggggtaccggctacaggaggacatgttcaatagtggtttggacattgtagtcatcgcaagaggaacagcgcgtgatgtttcgtttcatcagatttcgagcgcactgaaacatcttggaggtcttcacaaaataatacattaatatggaaaagaagatggaattctattgaaaaaattacttattgcatgtattaaattctatcagagatatatttctcccatgaagtcaacgaaatgtccgtattatccgacctgttcctgttatggactggaagctgtgcaaaagtatggtgcgataaagggtggggcactggctgcctggagaattttgcgatgtaatcctttttctaagggaggatatgacccggttccataaaccaaatggaggtttttatgtcaggcatgattgaattgacagcgtattccggaaaattcctcggaccgattgcaaaggttcttggatggatcatgagcggaatttacgatattgttttaaaaatttccggtggtacgatcaacagtgtaccgcttgcaatcgttctcatgacgattttgatctatatgtgtcttttgccattgacaatccagcagcagaaattctcgaaactttcgcagaaaatgcagccggaattgaatgcgatccgtgataaatataagaatcgcaaggatcaggaagccatgatggcaatgaatcaggagacacagcttgtatatcagaaatatggtatttctccatccggaagctgtatccagatgcttatccagatgccgattttgtttgctttatatcgtgtattttataatattccggcatatatcggaagtgtgcgtgattctttttatacgatttccggaaacgagacgtttcatggtctggtcggtggaattatgaataccgatgggtttgtgaaaaaagtttcggatttaatgacaaaatttaatgtggttacatccagtggactgaatataaaaaatgttgcagatactttaaacggagcatcgggaaaggatcttgccaattatattaccgatattgtgtacaagcttccatccacagcgtgggataagtcggtagacggcagtattttccagcagtttccgtcacttacggatcagattaattccacaatgcatgatatgaaccattttaattactttctggggcttaatatttcggataccccgtgggcaattataaaaagcagtatggaaggtcatgcgtggctgcttgtgattctggcggttctgattccggtattgtcttatattacacaggtgatcaatatcaagttgatgccaaccgcagctaccgcaggtggggataatgatcagatggcaagacagatgaaaactatgaataccatgatgcctctgatgtctttgtttttctgttttgtgacaccggttggtctcggtatttactggattgccagtgccgtgtgccgtgcggttcagcagttctttatcaacaagcatattgaaaatcttaatcttgaggatattattgcaaagaatcaggaaaaggtgaaaaagaaacgggagaagatgggcgttactgaggaacgcatccgtcaggcagcggcaatgaataccagatccatccagtcgaaggcaaatgtttcttctgcaaacagggaactggaacttgaaaaggcaaatgcagcgaaagcaaatgcaaagccgggaagtatggcagcgaaagcaaatcttgtaaaagaatttagagaaaagaataatcgtaaataagagggggcagttatatggagtttattgagatttctgctaaaaatgtggatgacgcgattacacaggctactgttcagctgggaataaccagtgatcagcttgagtatgaggttcttgataaaggaagtaccggttttcttggaatcggaagtaaaaatgcagtaattaaggctcgtaagaaattttccattgatgagaatgttgttgaatttttatcttccatttttgatgcgatgaagatggaggtagaaattctcgttgcagtaaatgaggaagaacatatcattgaagtagagttaaagggagatgatatgggaattctgatcggtaagagaggacagacgctggattctcttcagtatctgacaaatcttgcaatcaacaaacattccgatgaatattataaggttaagattgatacggaagattacagaaagagaagaaaagagacacttgagaatcttgcaaagaatattgcgtacaaggtaaagcgcaccaagcgcccggtttctcttgaaccaatgaatccttttgagcgacggatcattcattctgcacttcagaatgatcgttatgttacaacacacagtgaaggggatgaaccatatcgccatgtagttgtaacattaaagaaataaggaactgactgatagagttaaaaaataaggtgaatatccagttttgggtattcacctttgtttagaattggagagacttatgaattcagatacaattgctgcaattgcgactgcgatgtctccttcgggaattgggattatccggatcagcggagaagacgcattgccggttattgaccggatttatcgttcgaaatatggtcataaaaaattgagtttatgtgaaagtcataccattcattatggatatatttatgacgataacgagatggtggatgaagtgatggttttactcatgaaggcgccacattcttatacaaaagaagatacggtggaaattgactgtcatggcggtgtctatgttatgaaaaaaattctggaaacagtaatcaaacatggggcacggccggcagaacccggcgaatttacgaaacgggcatttttaaatggccggattgatctgacacaggcagaatccgttattgatgttatcaacgcaaaaaacgaatttgcactgaaaagttcactttcccagttgcagggggcagttcttgtggatatccgaaagatccgggcagatatattgcatgaaattgcctttatagaatctgccttagatgaccctgaacatatttctctggataattatccacaaactttacacaatactgtggataacttggttataaaaattgataaaatcctcaaaacctttgaaaatgggcgttttctgaaggaaggtatcaacactgtaattgtgggtaaacccaatgcaggaaagtcttccctgttgaatattctggtaggagaggaacgggcaattgtaacggaaattgcgggaacaaccagggatgtcctggaagaacagattaacctgaatggaattacattaaacgtaatggatacggctggaattcgggatacggaagatgtagtggagaaaatcggtgtggatcgggcgagaacatatgcatcgaaggcggatctcgtaatctatgtgattgatgcatcgacagagctggatgaaagtgattatgagatcatggatctgttgcaggataaaaaagcaattgttttattaaacaaatcagatctggacacaaaagtcacagtggaagaggtacagcatattctggataaaaagattattccgatttctgcaaaagaacatcagggaattgatgaattggaagaaacgatccggaatatgtttttccagggtgaagttacttttaatgatgaagtttatgcaattaacatgaggcagaaaacgtcacttcaggtagcacttgatcatttacatcaggtaacacaaagcattgaggatgacatgcctgaagatttttattccattgatctgatgggcgcgtatgaagagctgggtaggattatcggggaagctgtcgaggatgatctggtggatgaaatcttttcaaagttttgtatgggaaagtagcaggtaaaaaaatgagtaagaaaaatattccttatattgaagaaacatatgatgtggttgttgtcggtgccggacatgcaggctgtgaggcagcactggcatgtgcaagactcggattggaaacaatgatgtttacggtaagtgtggacagtattgcactaatgccatgtaatccgaacattggtggaagttccaagggacatctggttcgggaaattgacgcacttggtggagagatgggcaaaaatattgataaaacatttatccagtcgaaaatgctgaataaatcgaaaggaccggctgtacattctctccgcgcacaggctgataaagcggaatacacaaaagaaatgcgaaaaaccctgcaaaatacggatcatttatccataagacaggcggaagtcgcagagatattaacaaataaagatcagtttttcccggaagatgaatatcatgagggagaagaacagaaaattaccggagtgcgtacagtttccggaggtgtttacagatgtaaggcagttgttctttgtacgggaacttatctgagagcgcgctgcttaaccggtgaaatgattacacatacgggaccaaatggattatcagctgcaaaccatctgacagattccctggttgctcatggtatccagacaagaagatttaaaacaggaacaccggcgcgtgtcgataaaaggagtcttgatttttcaaaaatggaagagcagtttggagatgaaagagtcgttccgttttctttcacaacgaatccggaggatgtgcagatcgagcaggcttcctgttggctgacctatacaaatgaaatgacacatgaaattatccgaaacaatctggatcgttctccgatttatgcgggaatcattgagggaacaggaccgagatactgtccgtccattgaagataaagtggtaaaatttgcagataaaaacaggcatcagatttttattgagccggaaggacttagtacaaatgaaatgtatgtgggcggaatgtcatcttctctgccggaggatgttcagcatgaaatgtaccggacacttccgggactggaacatgttaaaattgtaagaaatgcatatgcgatagagtatgactgtattgacgcaaacaatttatatgcgtctctcgagtttaaagcaattaaaggtttgttcagtggcggtcagtttaatggaagctccggatatgaagaggctgcctgtcaggggttgattgccggaatcaatgctgcaatggaaattgagggaagagatcctctgattcttgaccgatcggaagcgtatatcggagttttgattgatgatcttgtcacaaagaaaaaccgcgaaccttaccgcatgatgacttcacgagcggaatatcgtttacttttgcgccaggacaatgctgatttacgcctgaccaaaaaaggatatgaaattggtctgatttcacaggaacggtatgactgggtttgcaaaaaagaggaactgattaaaaaggaaattgagcgcgttaatgaagttaagctcggggcgaatgcgagagtacagaatgttctggaacaatatggaagtattccacttcataccggtacaacgctttctgatttgattcgcagaccggagcttgattatgataaactggcagaaattgatacagaccggccggatttacctgcggaggtaacagagcaggtgaatattctgatcaaatatgatgggtatatcagcagacagattaagcaggtagagaagttcaaaaagctggagaagaaaaaacttccggagaaatttgactataatgaaatttcgggacttcgaatcgaggcacaacagaagctgaatgagttccagccgttgaatatcggtcaggcatcacgtatttcgggtgtcacaccagccgatatctctgttcttctggtctatctggaacagttaaaatattcaaatccagatttattttttaagttaaaccctgatgaacacaaagaaaaacaagaataatggaggattctatggaatataatacagaccattttctgtctatgcttgcaaaaatgaatatttcattatcagacaagcagttgcagcaatttatgacttattatgaaatgctcatcgaaaaaaataaggtgatgaatctgactgccattaccgattttgatgaagtcgtcgagaaacattttgtagatagtgtttctctgatacaggttgtggatcttcatcagcggttaaaagttatagatcttggaactggtgcggggtttccgggaatcccattaaaaattgtttttccggaattaaatgtggtgctggctgattctttaaataagagacttgtttttttgaatgaagtgattgatgcgttaggactgacagagatctatacggttcatggccgcgcagaagatctggcacgcatgcccgaatatagagaacagtttgatctgtgtgtttcacgtgcggttgccaatttatccacacttgcagaatattgtcttccattcgtccggttgggtggaaagtttatttcttataaatcgggagagtgtgaaaatgaagtggcagctgcaaaatcagctatttttcttctcggaggaaaagtggaggatgtgtataagttttctattggagaggcgcagcgggcattcatttctttaacaaaggtaaatggtacatcaaaaaaatatccaagaaaagccggaatgccctccaaaaatcctttgtaatttatgcttttttccactgctttgcgcggaaaaaagatgttatccacatttatggatgagttataaaaaatggactgtacctttgaggtacagtccatttccaattaattggataacttgttttcgataatttggtaaaccttttccggattctccagttgtggatataatttgcaattggaaacataggtgatgtctatgttagaattcagtttacgatattcctgtgctgttttgtagtttgcttttatatcgctgctgataataaaagaaaccggttttgtgatttttttcacagcatgccgaaggtcaatattcatataattgccaagaagacttgagtataagtattttccattactgttgtccatatgggctgcttcatagtaggcatctttcgttttggaagaaatcagctgaggtctgcagtaatagataaaacggaactgacggtcaatacgcttcgggttcatgagcaaattatagataaaggttccgaccagaggaagatttatgatcgtttgctttagtttactttgctgatccggcatggcatccatggaatggaaggaaaccggattaataaaaatcattttgtcaatgatggaggcatccagttgatttgccataattacaaatgaggaggagaggtttgaagctacaactgatgttttggattttataatatctttgataaaagcagtgatcagctggacatacatatagttggtataactcagccctggtttgtcggagagaccgcagcccagaagatccatggtatataccgtatgtttcttttgaagtctttttgaaatttttgaccactcaacagatgaactagcggaatttgtgtcatgaataagaagaacaggatctcctgttccagtttttgtgtaaaaaacatttccctgtttccaggaataataggatccgtttttggttgggagcatattcttttttgtggaagtggaggcaacaaactgattgtatgcatacattcctgccagtgttgcaacactcaaaaaaagaaatttttttgtgccttttttcatggaaatcctccttgtatttaaaatttgtttgattttaaatatattatagacatttttgggtctttttacaaacaatatttatttctttattttctttacccgtaaaatgatttataatattattgatattgaaaatacaaaacagaacatacgtttgaggaataagatggtaaaagattatctggaaaaaatccgtcaggagtatatagaacacaaagtttctctggaagagcagatttcttcatatgaaaataaagtaaaagagaatacaaagtttcttcaggttttagagaaggaaacaaatcccgggtatgaagcgttcagcccgagagaatttaattcttttcataaagaaaagatggaagaacttcgggcagatcaaaaaaggatatcaaatgaaattatgtgtctgagagatcagatgcaggaatatgaatttcgaattgcagatattaccagcgttatcaaggaagaaacggagattgaaagaaagattcatgaggctgcggatatagattcttatgataccaggctggcattacttcgttctgttgaaacagagcgtcagagaatagcgcgagaattacatgattctaccacacagaatctgactgcaattgtacataaaacggaattatgctcaaaaattatagaatcagatccggtaaaatgtaaattagagctattttccattggtcagacactccgtaaaataattgaggataccagagggttaatctatgatttaagacccatgtcttttgatgacattggatttgacgttacggttgaaagagcattggatcgatttcagagattccatagaatagaatgtggatattatacggaaggtacatcatatccgattaacagtgttgttcagattacattgcttcgggtgattcaggaggcatgtaataatgcagttaagcatgcacaggcatcttatctggaggtaaaagtttcttatttagaaaagaagattgtattagttattaaggatgacggtaagggatttgatgtaaatgcagttcccgatgagacaagggatgataattccggattcggattgtctatgatgaaagaaagggtctatctgttatcaggaacaatttctatagaatctgcacctggaaagggatgttctattattgtgtcaattccaaaaatgaaggaggacttataaaaatggcaattaaaattatgatcgcagatgatcattccatgatcagagagggattaaaaagtttactggaattggaaggagatatacaggtagttgcagaagcagaagatggtgttgactgtctggaaaagttaaaaatttgtacaccggatgtattattgcttgatattaatatgccgagaaaaaatggtctggaagtattgcaaacgcttaaatcttcaaagtcaaagataaaggttttggttctcaccgttcataatgaagtggaatatctgatgaaagcggtcgatataggggtggatggctatattttaaaggattctgaatccgcagaattgaaaaaagctatattttccatcgtagaaggagaaaattatattcagccaagtcttattccatcattaaattccaagatgattgaaaagaacagggatgaaggaaagatagagagtctcacaaagcgtgaattggaagttttgaaacttttggcagttggaatgtataataaggaagttgctgaaaagttaaatatcagtgagagaaccgttaagaaccatgtatctaacatttttaagaagatagaagtaacagatcggacgcaggctgcagtgtttgctattcgcaataatttaattgaattgtaaaaagaatggaaaacgagagagtttcgtttaaaaaaggataacaaaatgtttcacgtgaaacattttattatccttttttattttcataagtagaatttgctggagagcagtttaaatataagtttgcccggtgaatttatgatatgcatgattttgatccggttttaaaaattaatgaatgaatgataaactaccggaacaataagaacataatatgaatgaaagttttgggaatactttcttattaagcccatcggtaaaaaaataaatttcatagttgtcccatttattaccttcttttccctacatatccagttcatcccgatttttaaagtaacatcactaatcatatcttttaaatttttatttaagagatcaagcagttactgaataaaataatgttccgtttatcatcagatcagtggtgaggaaaattttatcatcgtttcggaataaatataattatctttttatctgtcaaatggtgcagagggtaaattgctacaatgtattcatacttctgatattttataggtttcgctaatctcctgaatagtcgtatcttatataccttgtaaatgtgtctgcattatttccaagattttgtaattcttttgtaaaatctttctgatatgggtgtactagagggatgtgtcggagatatgtttggtacttatcagtatcgtttccttgaaaatttttccatgaaattatgtgattaaaaggtcataaggtatgattgatgtatgtttgcatgcaatttgatggataccgtaatgacccacaccacaattgagaaagtagcaatttactatgcaagcatgtaaattagcggattatgagatgcggtcaaattatgagaatgcgaagcatgtattaatccgattaatcttaaatgaggggcaaaatttctttttgaccctcatatcattatatctatatccatataaatagatatagatatagtcacgtcgtgagattatcggtatcaaagcctattggattctcgaaaatatgtaacaaacgtgcaaatatgttatgagagtatcagtgtcaaaacccatatccatgtatggttacttttggcgttttatttttgtaccatagaaaggagtgaataaaaagcgtaaattaatatatttctgggaaagctataactgtcaaatttaacatcctatttttcacagacaggtgctataaatattatttctttgtctatagtttcttttattatgtgtagaaagagaatgtatcttttctttcgtcttatagaactgaatatcttctttctttcgttgaaattaatacgaaacagagtattattcatcgtatagaaaaaaatgtcttttaagtaacactatgtatatcaatccaaaagaagatataaaaagatttccaatctacgcatttaagctgcgattccgtttataataaaaagaatataaaataaaaatgtttcacgtgaaacatttcacaaaaaaagctcaaagaaaaacataaaaatctgcaaaataacaacataattactattcgagattaatcgattttatgttatactgtaatagaaaataagaggaagatgtgtatgatatataaaagtatattattgattttgggatatctatacggaacaatgttaactgcaacgttcgttgtaaaacattccacaggaaatgatgtaagtaaaataggatctggaaatcccgggatggcaaatgtcatggaacatatcgggaaaaaggaaggtgttttggtattagccggcgatatattaaaagttattgtagccgggattcttggtcacctgttatttccagataaaacatggcatgatatttttttatatacaggatttggagcgatttttggacataattatccactgtggagaaaaggaaaaggtggaaaaggtgttacagttacctgtacgtggttgatacttacatttggagttctgggagcaatctgttgcataataggaggcatgatagtgttacttaccggatggctttcgctgggcgcggttgtcattcctgcgcttgcaattccaacggtatattttatacatggaaaatctatagaacttgtatgtgtactgattgcaactgtccttatgctgatccggcatcgcaaaggaatttacagaataatacatggggaagaacctttgcatttaaaaattaaaaaggataaataaaaatacactctatatacagagaataagaaagaaaagaggaaaatatgggaagaattattgcaattgcaaatcaaaagggtggggtcggtaaaacaacgacatcgataaatcttgcagcaagtattgctgaaatgggcaaacgtgtacttgctattgatttagatccgcagggaaacatgacgagtggacttggcgtggataaaaacgaggttgagaatacggtatatgagctgatgctggatgaatgttccatcaatgagagtattcaggataccgttgtaaaaggcctgcgtctgattccatccaatgtaaatctggcaggtgcggaaatagaattattaggaataaatgacaaagaatatatattaaaaacagcagttgactatatccgtgatgattacgatttcattgtgattgactgtccgccatctttaaatatgctgacggtaaatgccatgacaactgcagatacggttcttgtcccgattcagtgtgagtattatgcactggaaggactgagccagttgatacataccattaatcttgtacaggagagattaaatcccaatctgcagatggaaggcgttgtatttaccatgtatgatgtccggacgaaattgtcaaatcaggttgtagaaaatgtaaaagaaaatctggatacaaaaatttatgagacaatgattccgagaaatattcggttggcagaagcaccatcttatggaattccgatcaatatgtacgatagcaaatctgcgggggcagagagttaccgcaagcttgcaaaggaaatcgtgggtcgtaaagatttgtaaaaagaaagggagtaacaatggcagttaaaaaaggattgggaaaaggtttggattctctgattacagacaaggtgaatacaaaaccggcagcttcaaaaaataatccaacaccaaagagtgagcacgcggcagatgctatcatgatgaatatcacaaaggtagaaccaaacagggagcagccgagaaaaaaattcgatgaggatgcattgcttgaactggcagaatccataaaacagtatggagtattgcagccacttctggtgcaggagagggaggattattatgagattgtcgccggggagcgccggtggagagccgcaaaaatagccggaatcaaagaaattcctgtgatcatcaagaaacttaccagacaggaaattatggagatttccctgatagaaaatattcagagggaagatttaaatccaattgaagaagcactggcttttaagcggcttctgacagaatttaatctaaagcaggatgaggtagcagagcgggtttccaagagcagaacagcggtcacaaatgccatgcggctgttgaaactgaatgaaaaagtacagcagatggtcattgatgagatgctgacaacaggacatgcacgcgcacttctgggaattgaagatcaggaacagcagtatatcattgcgcagaaaatttttgatgaaaaattgagtgtgcgggatacggagaaactggtaaaaagtctccagaatgaaaaaaagaagaaaaaagaagaaaaagagaagattgacccgaaactggaagccgtgtatcatgatttagaagagcagatgaaaggcattcttggaacaaaggtatgtattaaccataaggatgcgaagaaagggaaacttgagattgaatattattcccaggatgaacttgaccggattattgacatgattcggacgatacaaaaataaatgtagaaaaatagggataaaagcctatttaaaattttaacagaatgtaagaaaatagaaacaggagaaaaatatgatatcagaatacttaggatttgattccgattatattattttaggattagcagctttttgtgttattttatttatacttaccgttgtgaatatggcaaagacaagtaaactgcgtaaaaagtatgaagcatttatgatgggaaaagatgcaaaatcattggaagaaactttggtaacccgtttgtctcaggtcgataaactgatatctgcaaatgaagcaaacgagaaaaatatcagaaaaatgtttgacaatatgaaatttacatttcagaaggtcggactggtaaaatacgatgcttttaatgagatgggtggaaagcttagtttttcccttgcaatgttgaatgagtcagataatggattcgttctcaatgcagtacacagcagagagggctgctatacttacataaaagagattatagacggaaattcaattattacattagcagaagaagagcaggaagctttaaagatggcaaaagaatctaccggcagcaatcctgcaaaataacgggagtgtaacatgagggtaaaatcagtaagtgagttgtgtggaaatgaaatattagcagaaccagttcttacagatgaaaaaatgatattaatttcaagaggaagcaggctcaagaaggaatatgttcctttgatccgttcacttgggattgacacccttatggtagaagatccgtatgaaaattatgaaatgccatcgcggattattgattattctgttttcggtaagtttgtggaacgcgtacagcgggtgatggaaaaacatatctaccataagaataagtcgctgcgcgaatttgaagtaatcgcaaatgaagttgtaaaagaagtaagcaaaataccggaaaatataattattgatatcaatgcccggattgtaaatttatatgaacatactgtcatggtgacacttgtgagtgtatttgtggcaagattacttcatctggatcaggtgaggcaatataatattgcagttggggcactgctccatgatctcggactccgttatatcacaacaggatatgtgaaccgggactgggaaaaggaagatcccgtagaagcatttgagtacaaaaaacataccattttaggatattccgctttggatgaggaaagctggatcccggaagtatcaaaaaagatggttttatttcatcatgaaagacttgatggaagcgggtttccgatgcgccgcagagattttgcaatggaatgcaggattattcaggcatgcgatgcatttgacagttatattacgggtatggagtgcatacggattcccctgcaggatgcaatcggaaagatacaggaaggaatcatacacaagtatgaccggaaagtggtggaaaccctgctatctaagattgcctattatccggtaggaacggcagtgaagatgagtaatcaggcagagggaattgtcgttttgcagacagaggatccgaagtgtccggttgttctggattttcattccggggagtcagaaaaaaaatacaatttaatgttacaaaaggatatttccattcttcaaataatatgatagaatataataatatatggagaaaggagaaccgcgaagtgcacaaattccttagggcgattggattttcagatattacaaaaaaagatcttgaaatgatactggatgaagtaattacccgtccggagattatgaaaattacaaaagattctgagggaaacgagtttgcggaactgtcaggttcatttgcggcaaatgccggaattacggttcggggtacttatcaggaagatgatagttttcatatggattattactatccgtatgtgtttggtaccagtattacgacgaatgagcagattgatgtagaaaaacatgccgagaaagagtcctatgcaggagtatgtgacgaggttaatcttggagttacactgattttttatatacagaatgtagcggattatctggcagagacaaaccggcacctttccaaaatacattatggggcaatgcttgcaggactttccaccgagggaaaaatactctgtcccgttgtggagagaaaaaaaaatgatgtaccagctatccagaaaaatgaccggcacaatcagttgatcgcacaggcaagagaaggcgatgaagatgcaatcgaaagccttacgctggaggatatggatacttatgcactgctgtcccagagagtgatgaaggaagatattttcagtatcgtgaagtcaacgtttatgccatttgggattgagagtgaccagtatacggtattgggagaaatcattgactgtgtcacgatggaaaataaacttacacacgaaaaattgtatggaatgaagttgttgtgcaataacatccagttcgatgtgtgtatcaatgaaaaagatttattgggtgaacctgcgataggcagacggtttcgtggaaatgtctggatgcagggaaacctttgccttgaataaattgtcaggaactgccggtaatcggcatttgttctcttagttaaatggatataacgacagcctcctaagctgtaattgtgggttcgattcccgcagggaacact

SEQ ID NO: 966 - DNA, 57449 bp, Unknown
  gut microbiota DNA sequence
ctataaagagctggtcaagaaggatgaaggcataaataacaatatggcaaagaaaagagataaaaaaaataagttgcgagggaaatggttgagaggaattatcatagtttacttgcttttgatactatgtaatctatttcacgaatttccttcaagattagggaatttacatagtattccggtttcggaggagtggtatttaattgtagtaaaccgttggaatgaaataccggaagattatagagtggaattaacagaattatcgaatggtcaaaaggtggatagcaggatatatccgtatttacaagaaaaaataaaacatcaagataaagatactattatcaaaatggatcttgggaattgtgtaaataaacttgaaggacaaataaaaactattgcaaaagcatctatctggattggcaatgatgaaatcatgaaagccgccaaggagttacagacctttaagaatactgctgagaagaagctccctgataaggatattgaagaatttcattaaacagttattccaagaatataataaaacgtatgcctgtggagagcctgcagacatacgttttattaattaatttatcgctatttcatagatatctgccatatcaagtacatattcttcaaaatcagcccagccatcatataatatatcagaacgtaaagtaattgttttatgatcgtgtgttgtaaagatgaatttttgtttctttttcttatagcggtattttatcgtttgaatctgtgaccatgtaactttttcttttttaaagaagctcacatggtagataaaaagttttgtatagaatactttttgacaggtatatctgaaaaagcaataaatggagacaagatacataaatatgatataaacaatacccgttgtcagacctccattgtgataactttcaatgagagtttctctctcatcctgataccataagtataaaagtgcaataagcatcagagtaagcagaaatgtacaaacataaatcatatagtaagcagcactgcatttgagcgttttatattcactgccaagatcggttccaacacgattcttaatcctccagtttctgttctcaatgtgttccaaagcagttacacctaataacagtatagtatgaatgaccaggcagacgcctgtttttgtcaaaacttcaggaatatactgcatatctcccatcagaaaggcaatgaccgcatatatcatatttccacccaggaatccaagcagcattaccttaataaccatactgttggaagtgtcattttttttggtacttttctttttatttatcatatgatcaccttatatcattcgccgttcgggatgagcatgaaagcatgttccccctcactaacgctcattatatcttgcgttacataaaagaagtgtaacatgttataatttgacttgcaagcagtattatctgcatattccgcaaaaacagagcactcgctccgcatgagcggagcactgttccgccaggaacggatcattgccctgttggttaataaagttacttgctttctacacgtctatcgcgacctggaaagtctaatcgatatgctttagaggtcatgcggctgagacatgcatctgcatatgtgttatcaccaaacaattggtaccagctcgctactggcatctgcgagatgatgactgttgattttcggcaatctctagcttcgatgatttcaaagagatcacggcacttgtcaagatttaagtccatcaatcccaaatcgtctataacaagaagatcataaccggccatcttgtttgaatactcatagtaattatcttcactatgcgcatgggcggattcttgaagcagataattcgcacggatatatttaacagtcctcatttgatgtaatgctgtgacgcgaagtgcacatgcaacatgcgttttgccagctcctgctccacctgtaatcaaaagattgttcggttcatcgatccaatcacctttggccagtaattcaatgacatgtgtatttaactgcctctctggatcataaagagaactatcaaggtcagctgccggatattttagtgttgcttgttttaagagccgattgaacttcttgtttgctctccctgaccactcatggttgatgatttcagagaaccttgtttcaaagctttccaatcccgaattcggattcataagttggttttcaaaagcttctgccatgccggacatacgcatcttatagagtttgtccataagaagattttgatcctttgtaagtttgtcgttataattgtattctttctgtctgtatgccataatcattcacctttacttgtagtaatcctttcctctgatgttttcatgagatggaagtgattccggtgatgattctggatgctcatcgcactccatctttttaagcacctgcctgtatgtcgagtagcgacaggagttcatttcaatgcatttacgagcggcttcttctgcaatgcctttagggattgcttttactcgatgtagtatcccggcacatgcattgaatgcttgctcttcgtgcttagaagattttaggattcgatcaatcaattccgacatggaaggaccgaacacagacgcccagcgcctgtaatagtttccatctttcgaattgatttcctgataataaaggtgttccggaggcatatgctcatccgcagttatgtacaacggaaaatccttataagatcttctgtgcgtgcagatcagacggttgtactgatcacagatacgaatctcagaaggtgctgacttgaaaaagtaaattccagtgcaggggtaaattccaccacgctttaaaattctttgattttttagaattgtgggaggctaaatccttataaaactgctataattagattaactttccataaaacatcttactttcaggcatggcaatgtccttaaaagaacagccagcgtttagggatttttcaatgtatttgcgatcttcgagagtaagatgtttttgattaccgggaatatatttgctcatgctagttctccttctactgctgtcagaaggccaacatgagcataccatttatgatatgaaagattaaactccacttgtgcagaagagaattccactgtataaatgggtggtagaattaaactttgcaattttcatgtatgcaccagtcaaagttgaaaattgcataaatggcagaaatatgttaccataaacatagactattgatagaaggtatatggagtggaagcgatggaaaaacaggaattttgcatggaaaaatctcagatatttcaggagatgatcagtcgtatttcaaaattatctcaggacagttatttaatggttactgatatgcagcataatttaacatttgttccagaaagtactgcagaatttctggggattccatcgggatggtgtgaagatggatataaaatagtgctggaaaagagcgtacacccatatgactgcccggaatatacggaagagatgaaaaaacgtctgcgggggatcaatctggagaacgatctgtacatccgtatgggaaaagacaaaaagtatgtgatgacgcagattataacggatatgattttagagcagggcaaaaacagatattttattgttctgcttcggaatcagaatgtgattccggaaattgatccgttgacggatctttatggtcaggtcaaatttgaaaaagatattgtggattatattcagcagggacgaaaagtagctgttttggaaattgaaattgatcatatgaatgatatcaatatattgtacggaacaaattacagcgaccggattcaaaaggttcttgcataccggtttatttacatgatggatgcggataaagcagtttatcgtatgggaaattccaattacgcatttattttgagggatgccagccgtgaagaggctgcggcatttctggagaagattcgcgcgcggctggaggaaagtgtcgtcttggaaaacaaccattttgacctgaagatatatgccagcgggataattcttgatcattatgagggagaaatttccacggtacagagtaagctggaatatgttttaggaaaaatgcgtaccagacgggatcataagttaatgttctttaatgatctggtacagatcaatggggacgtggatctggatctgatgaaggtaattcatcagtctgtgctgaaccaatgtgacggattttatgtggagtatcagcctgtcgtacatgcacagacaggagagattgtcggagcggaagcactggtccgctggaaaaaggagccatatggtattgtgccaccgggaatgtttattgactggctggaaagcaatccatgtatgtatgatctgggaaattttgttttgaaacaggcattgacggatgctgtggagtttcgaaaatcaaatccggatttttttattaatgtcaatatgtccgcaaaacagctggaaaggaaaacgttctgtggtgttgtcatggcattgttgaaagaaaccggttttccggcggggcagttgtgtctggaactgacagagcggtgtagaagcatgccggtcagcgttatggaagaaaaactgttgtacctcaaacaacatggagtgagacttgcaatggatgattacggtacgggaagtgcttcttcaagtgtcctgctgcagaccccgatggatgagataaagattgacatgagttttatccgtggaattacggataatcagaccaaacaggcactggtgcgcagcatggttgattttgcaaataaagcggatttaaagagctgcctggaaggggtagaggatgaaaagctgcagaattatctgcgttcctttggagccacatggtttcaggggtattattattccagaccggttcaggcagctgcaatgcaaaaattgttaaacatggaaaattgataattagtcggcgatgagcagatcaacgccggctttttcataaatttcttttgtattttcggataatccggagtcggtgattaccagattcagatcatcaatagaggcatagctggaaatggatgaggtgtcaaatttggtgtggtcaatcaatgcaattgttttagcagaagccttgatacacatgcgttttaaatctgcttcgtagatactgaaatcggtaagtccgttttcaacggagaagccgcgtgcagagacaaatgcaatgtccgtatgaattttctgcagcagatccacaccgaggagaccttcaatggaagaagaggcagaggtaacgattccgccggtcaggataacggtgatcccggggatatctttcagagccagtgcaaggtcaatgccgtttgtaataacggtaagttctgtaaagccggtcagtttcatgccaagtgtataggcagtggagctggcatctaaaaagatgcacatgtgatcttttaccatgtggatggcatttgcagcaattgcctctttttcttttttattttccagtgcacgttcatgaaagaaataggcttttccggtaagttctttattgtctgcggagttatcgtggtagagtgcgcctccatgtgttttggtcagaagtttttctttatccatctggtttaaatcggtacggatggttgtggtggaaactccaagcatttcactgagttcatttgtggttgcttttcggttttgtttcaaatattccaatataagtttctgacgttctaattgcagcatgatgattttttatactcctttatatttacgaaaacacagatttcgaaagtttatatataggatactatacatcggaattgcattttttgccagtgaaaagtgaaaacaaaaaaatttgcaaagaagtggatgaaaatcagcggctgtggtatgataagaaaaaagcataaggaggggtttttatgctaaaagagtgggaaaaatccgaaaaaccatcggaggaggaaattaaggcacggctggaagcggtaaaagagaaactggcacggcagcagcttttgatcaaagagaagaaagtaccggttcttgttgtgcttgaaggctggggaacggccggaaaaggttatgcaatcggccagatcatccagaatattgatccgcgtttctttaaggtggtatcgatgcagaaaaagacggaggatgacaagagaaaaccgtttttgtaccggcattttgccaaaattccggaagccggacagtttgtatttctggatacggcatggatggatgagattacggaggagcgtctgcacggaaccatttccgaggatgtatatgccaaccggattgaaagtgtccgccggtttgaacggcagcttacagacaatggctatctggtcatgaaattctttctgcatatttcaaaaaaggaacagtcacggcgtattgcacagctggagcatcagaaggacacaacatggcgtgtcagcaaaaaagatctgtggcagaatgaacattatgagaaatgtatggatgtattttccggatatctgaaaaatacaaatatgccatccgcaccctggtatatcattgatgcaaagtccagaaaatggacagaagtacagattcttgagacgcttacccaggggattgagattgctctgagcaatcaccagatggcggttccgcttctgcagaatgtatttccgttgaaaaaaatgccgcttctttgtgaaattccgttggacaagtgtatggaggaggatgtctataaaaaggaattaaagcagcttcagcagagacttggagaactgcacaatcgtctgtatcgtaagaaagtgccggtcatcattgcctatgaagggtgggatgcagccggaaaaggcggaaatatcaagcggattacgggagcacttgatccgcgtggatatgaggttcatccgattgcaagtcccgagccgcatgagaaagcaagacattatctgtggcgtttctggacaaggcttccgcgtaccgggcatattgcaatctttgaccgaacgtggtatgggcgtgtgatggtcgaacgtctggaagggttttgcagcgagaatgactggatgcgtgcgtacaatgaaattaatgagtttgagaaggaactgcacgactggggagccgtgatcatcaaattctgggtgcagatcgacaaagatacgcagcttgcccgttttaccgatcggcagaatacgcccgaaaagcaatggaagattacagaggaagactggcgcaaccgtgataagtgggatgcgtatgagggggcagtcaatgagatgattcaaaagacgagcactacctatgcaccgtggcatatcttagaatccgtagataaaaaatatgcacggatcaaagcattaaggatcgtgattgctgaactggaaaaagtgttagactgactggaaaaataaaaaaggaataccccggcaaacggaatttccgttgtcggggtatttttgcgacttatgatgaaacatcgcagaattatgaatttgcttttttcaggtttttctgtgctgtagaaagcatcagcttgatacggttgagctggttaacttctgatgcacccggatcataatcgattgcaacgatatttgcgcctggatattcgtgacgaatttccttaatgacacctttaccgacgatatggtttggcaggcaggcaaatggctgcgcacagacgatgttggttgctccctgtgcaatcagttcaagcatttctccagttaagaaccagccttcgccggtctggttaccgcaggagacgatatgctctgcctgttttgccagatcctgaatatatgcagttggctcaaaatgtttactctttgcaagttcatcccttgcatccttgcgcagccactcaaagaagcggatgagcatattgttgatgcgcttggattttgcggtagctccaagataatccgccttgaaattctgattgtagcagcagtacagtaagaaatcggtcagatccggtacgactgcctcagcgccttcggattcgagcaggtctacaatatagttgttggcagccggaaggaacttgacaaggatctctccaaccacaccgacacgcggctttttctcatccgtcattggcagattgtcaaagtcgcggatgatctgacggcacattttgcgatatttacggtgggacagaatcttggtgttgccaacaaagtcaatgacacgttttttctttttttcatgcaatgcgttggcagatcccggtaccttttcgtatgggcgcacacggtagagacagcgcatgaagatgtctccgaattccagagcgtacagaccatgctggatcaggcttggtgtgagtttaaatcccggatttttctccagtccgaccatattgatggagatgaccggaatatccgggtggccggctttggtcagtgcacggcggataaatccaatgtagttggtcgcacgacagccaccaccggtctgtgagatcaggattgctgttttgctcaggtcatatttgccggacattaccgcactcataatctgtccgatgacaatcagggacggataacatgcatcgttatttacatactttaaaccgacatcgacacattctctggccggaacatccgggatgaccagattgtagcctgcggcacggaatgccggaacgagaagttcaaaatggatcggtgacatctgtggacagatgatggtgtaatttttacgcatttcctcggtaaagataacgcgctcgtaatttgccggcttgatttcgcgtttttcatgttttttctctttgacacgaattgcagccagaagcgaacggatacggatacgggcagcaccgaggttgttgacttcatcaatctttaagcatgtataaatttttccggaattggtcagaatatcgctgacacagtcggttgttacggcatccagtccgcagccgaaggagttcagctggatgaggtccagatcatccctggtcttaacgtagtttgcggcggagtacagccggctgtggtacatccactgatccatgacaataagcgggcgttccagattccccagatgggaaatggaatcttctgtcagtacacacataccgtaggaagtgatcatttccggaataccgtgattgatttccggatcaacatggtatggacgaccggccagcacgataccgcggcgatggtgttcttccatatatttcaatacttcttcgcccttcttctgcatctccagacgggtcatggcaagttctttccagccttcggatacggcatcacgtacttcggcttccggaatatggaattctttcttaaaacagtctacgagctgtttggaaaggatttcttcgtttgtaaacgccatgaacgggtttaagaaccgcatctgtccactcgtaatttcctcaacattgtttttaatgttttcggaataagaagttacgatcgggcagttgtagtggttgtttgcatccggaaactcgttgcgctcgtaaggaatcgccggatagaaaataaaatctacattctggtggatcagccaggaaatatgaccgtgcgccagtttcgccgggtagcattcggattcgcttggaatagaatcaatgccgagttcgtagatttttcgtgtggactgcggagagagaaccacacggaaaccgagcttcttaaagaacgttgcccagaacggatagttttcatacatgttcaatacacgcggaagtccgacggtcccgcgggttgcttcggcttctgacagaggttcataagcaaaaatacgtttgttcttatattcgaagaggtttggaatattctctttgtttttttcttttccaagtccgcgctcacagcggtttccggtaatatactgacggttgtctgaaaacttattgatcgtcagcagacagtggtttgtacatccctggcagcgtgcaagcttggtagtgtaggacagtttattgatctgttcaatggacagcatcgtcgtctgatagccggcttcgtgacgttcgcgagcaatcagtgcggcaccgaaagcacccatgattccggcaatgtccggacgggttgcgtggacaccggcaattttttcaaaactgcgcagaacggcgtcattgtagaaagtaccaccctgaacaacaatattttctcccagatctttggcatcggacagtttgatcaccttaaataatgcgtttttgattacagagtaggcaagtccggcagagatatcggcaacggaggcgccttccttttgtgcctgttttacctttgagttcataaatacggtacagcgggtaccaagatcaatcggatgtttggcaaacagtgcttctttggcgaaatcctgcaccgtgaagtttaaggattttgcaaaagtttcaatgaaagaaccgcagccggaagaacatgcttcgtttaactgaaccgaatctacggtctggttcttgatcttgatgcatttcatgtcctgaccgccgatgtctaaaatacagtcaacttttggatcaaagaaagcggcggcatagtaatgggcgacggtttctacctcgccgtcatcaagcatcaatgcagctttcaaaagagcttccccgtatccggtggagcaggagtgtacaatgtgcgcactctccggaagcagacggtaaatttcctgaatggaacggatggcagttgcaagcgggcttccgttattgttgtcatagaatgaatacagaagttttccgtcctcgctgacaagtgcgatctttgttgtcgtggaacctgcgtcaataccgagatagcagtttccggaatagtttttcaggtcaccggtttctacatgattgtttccgtgccggctggtaaaagcatcgtaatcttcctggctggcaaacagcgggtccagacgggcaacttcaaactccagcttaatgccggtggaaagacgctgctgcagagatcccaaagtggtctctacgtcttctttataatttaatgcggaaccgatcgctgcaaacagatgcgaattttccggtgtaattgcgtgctcatcatcgagatttaacgtgcggataaacgctgctttcagttcggataaaaaatgcagaggaccaccgagaaatgccacatgtccgcggatcggtttaccacaggcaagtccactgatcgtctgattgacaaccgcctggaaaatagaggcagacagatcttcgcgagttgcaccctcattgatgagcggctggatatctgtcttggcaaatacaccacagcgcgctgcaatcggatagattgctttataatttttggcatattcatttaatccggaagcatcggtctggatcagggatgccatctgatcaatgaacgaacctgtaccgccggcacagataccgttcatacgctgttcgacattaccgccttcaaaatagatgatcttggcatcttctccgccgagctcgattgcaacatcggtctgtggcgcataatgagtgagagcagtggatactgcaataacctcctgcgtaaacggaacctccagatgctttgcaagggtcagtccgcctgatccggtaataacaggagaaacagaaagatcccccagttcgttggatgctttggcaattaaggacgccagtgtctcctgaatatttgcaaaatgacgctcgtaatcggaaaacaggatgttgtcctgtgagtcgaggattgcaattttgacggtagtggaaccgatatcaattccaagtttatgtaactgcttgtcactcataaatgtaacctccatgtgtaagtaactaaacttattataaataagtatgatttcaaaacaaaacctaaaacattatacgacaagaattgacaaaagacaacgactgaaaacataaagattttataaaatgttggaaagaacgtgctgctgcgttgacaagagggatttgaaaaccgtataattggttgacagaaaggtcagaagtgaccgtaaccatacatacactattctatgtagacaggagacagatttatgaactggatggataaattggaacgcaagtggggacgacatgcggtcgccaatctgagcagatattttgtacttgcgcaggtgattggatacgtggtacagctgacggcacccggactcatgagttatatgaattttgatatgggcagtattctgcacggacagctctggagagttgtgacatggatttttacaccgacggcatcgctggatgtttttggaatcttatttctgttctgtgtgcttatgtggggcagttcgctggaatccatgcttggaacattccgcatgaatgtatttttgtggggaagtgtgattttgtgtgacattgtgggcgcgatcgtatatgttgttacgcggattctgctgggatatggtttttctccgtatctgtccacgtattatattctgatgtccatgctgctggcgctggccatgtgcatgccggagggagaggtacgcctgtattttgtccttccgatcaggatgaaatggatgttaatttttgaactggtatatctgggatatcaggtggttcgtatattctcgatcggaattgcaagttatggaaccggaatgggaattctcgtgggtgttttaaactgcgtacagatagtggttccggtactcaatatgttctggtttttccatgcaatgaagacccgtttgtccggaaaacaaaagaaacgccagaaagaattccgggcacagttcagtcagcctcgtccggggtccggcattgcacgtcacaaatgtgccatctgtggaagaaccgagctgacaaatccggaattacagttccgttattgcagcaaatgcgtggggaatcgtgaatactgtcaggatcatctgtttacccaccagcatgtaaaataaaatttagtgagtggaaaagaaaaaaatcatgaagaaaaagtttttaagtgttttgcttatcgttgcggttctgataggaatggcaggtgtcagcggaacacagacagaatcaggagaacagaaagcagacaaagaacaaaagcagcaggaaaacgaacagactgcggaaacgaaagtggaaattccaccggaaaatgaggaagaacaaaagggatggatcggtgttatcttaaacggagatgagacagaagcctatacactggcgcatattgacggaatccgggcagcagcagaaaatgtcagtcttccggagcaggatatcatctggaaagagcgtgtcggtgcgaatgatggctgcaaaagtgcggtaaaggatcttatcagacagggatgtgagattattattgcaaacagcgccatttatgaagaagcaataaaaagtgaagcagaaaagaatccggaagttgattttgtagttatcaacgattcaaagacacagagtacggtaacggaagacggaacagaactcacaaatctttacaatgtacatatggatacctacgaagcttcttatgtggcaggagtcacggccggaatgaaagtagcaaagctgaaggaaaagaaaaagattcccgcaaagagttttgacgaaaagaaaaatgtaaaactgggatatgtggcggcagaggcaaacgatgatgcacatgcagatattaatgcctattacctgggagtaaaggccgtctgtaaaaaggttgttttacaggtagaatacatagatgcctggaataacagtgatgcggaggcaaccgcagccggagatctgatccggagcgggtgtgtggttcttgcatccaataccgatctggatgctgttatgcagatggctgaaaatgcaaaagaaagcggaaaatgcgtatacgcggttggaagaaactctgatatgcgtcagatggcaggaaaggccgcgctgacttcggttgtcagtgtgtggtcggtttattatacagagctgtttgatgcaaagctgaatggccgctatatggaacagaactggaatggcggatatgcacagggagcggttacaatttctacactgggaaaaagtgcatcatccggaaccggtgacagagtgaaaaaaacggaagaaaaaataaaaaacgggaagaaacagattgcatatttttcaacatgtgtgctggacggaatcctggaatccgaaaaaggacaggagcaatagcgtacacaggcgcgttccggttgacaaatatcgggaatatccctataattattcttatttgaggagtgctggaggaatagacatatggaaaatgaagcggtttccaagaattttattgaacagattattgaaaaggacctggcagagggacattgtgagacggtaaaaacccgttttccaccggagccaaacggatatctgcatatcggacatgcaaagtccattcttttaaattcagggttagcaaaaaagtacggaggagaattcaatctccgttttgatgatacaaatccgacaaaagagaaacttgagtttgtagagtctattaaggaagacgtaaaatggcttggagcagattggggagatcgcctcttctttgcatcaaattacttcgatcagatgtatgaagcagcgattaaactgattaaaaagggaaaagcatatgtatccgatctgtctgcagacgaaatccgtgagtatcgcggtactctgacagagccgggaaaagaagacccatatgccaaaagaagcgtagaggaaaatcttgcgctgtttgaagaaatgaaggaaggaaaatgtgaggatggaagtcgtgtacttcgtgcacggattgatatgacttcttccaatatcaatatgagagatccgatcctttatcgtgtggcacatatgacacatcacaataccggggacaagtggtgcatttatccaatgtacgattttgcacatccgattgaggatgcaatcgagggaataacccattccatctgtactctggagttcgaggatcacagaccgttgtatgactgggttgtgacagaacttggatataagaccagtccggaagggactccgaagcagatcgagtttgcaaaactgtatctgacaaatgttgtaaccggaaaacgttatatcaagcgtctggttgaggagaagattgtagatggatgggatgatccacgtctggtttccattgcagcgctgcgccgcagaggatatacaccggaatccattcagaaatttatcgaacttggaggtatttccaaggcaaacagttctacggattatgcaatgcttgagtactgcatccgtgaggatctgaagatgaagcgtccacgtatgatggcagttttagatccggtaaaggttgtcattgacaattatccgcagggtcagacggaggaacttccggtggacaataatctggaaaatccggaactcggaaagagaaccgttccgtttaccagggaaatttatattgaacgggatgattttatggaagaaccgccgaagaaatatttccgtatgttcccgggaaatgaagtacgtctcatgaatgcatatttcgtgaaatgtgtcggatttgaaaaggatgagagcggaaaagttacggttatccactgcacatatgacccggcatcaaaaggcggaaacagcccggatggaagaaaagtaaagggaaccattcactgggtatcggcagaacacggaaagaaagtaacggttcgcttatatgagaacctcattaatgaagaacttggcgtatataatgaagacggaagtctgaatctgaatccgaattccctgactgtcctgacagagagcattgtagagccggcattgttagaggcaaaaccatatgagagttttcagtttgtaagagaaggatttttctgcgcagattataaggattcaaagccgggagcgcctgtatttaacagaattgtttctttgaagagttcttttaagctgccgaaaaaataaagaatagacaaaaagaggcgtagaatgaatttattatcgggattggaaaaatttggtctggatcagatggatacagaccacctctttgaagaggaaaaaagtgatacacctgcacggaaagcaccggaaccggtgccaaaaaaagaaccggttcacagcgaaactgagttcttactggataaatccatccgttgtccggtatgtgataatgttttccgtacaagaatggtaaaaaccggacgggtaaagcgcatggaaccggattttgatctacgtccgcgttttcagtacattgatacaaataaatacgatgtatcgtcctgcccacagtgcggatatacggcgatgaaccgctattttacccatttgtctaccggtcaggtcaagatgattgaagaaggggtatgccataagttcaaagggcagaagcagccaaaagaagaaccgatggagccgtattcttacgaaaaagccattgagcggtataaactggctttatataatacactggtgaaaaagggaaagaacagtgaaaaggcatatgagtgcctaaagatgtcctggctgtaccgcggctggattgaggagctttccaaggcagaaaagaaagatgaaaaaacacttgccgaatgccggaaagaagaagccacgtattatgaacaggcatatgagggatttttaaaagcgattgcatccgaaaatttcccaatgtgcggaatggaagaaagtaccgtaaacctgttgatggcgaatatagcttataaacttggaaaggtggacattgcatccagattcatttccatgattctgacttcacaggcagcttcccgtgtggcaaaagaccgagcgatgcttttaaaagaagagattattgcaaaactgcacggcaaaggataatctatggctggaaaattttatgcggtaaaaaagggaaaagttccgggaatttatacctcatgggatgcatgtaaaagtatggtgcatggatttccgggagctgtctataaagggtttgcgacacgcgcagaagcggaacagtttctggaagaaaaaaaagaggaacaaaaggaaccggaaaattatgcgtttgtcgacggttcgtttaacagtgctacttccgtctatggatatggcggatttctcgtgacaaagggagaacgtcacgtgatcagcggaagcggcaatgatccacagatggcatcgatgcgaaatgtggcaggagaggtgttaggcagcatggctgcagtaaaagaggctgttgccataggacttaccgacttaaccatttattatgactatatgggaatcgagatgtgggcaaccggagcctggaagcggaacaaacagggaacgattgcctattatgattttatacaatccgtgaatgataaaatttcccttcattttgtgaaagtgaaaggacattccggggtagaaggaaatgaagaggcagaccggttggcaagacttgctgccggggtagattagacagacaggggtgacaaagtgagcgtatttaatgtagaactgaaaaaagtggtggatgacagttacgatattgagatggggtaccatctggaggatcagctggtagaggatttagagaccggtcttctgggaaaaatcaaaaaatttgccgtgatcacggattccaatgtgctggatctgtatgcaaagccgatcagtgaaaagctgagcaaggctggatttaaagtggaactgttcgtatttcccgcaggagaaaaaagtaagaccagacagacgaaggcgaagattgaagatgccatgctggaaaaagggttccgcagagattgtgctgtgattgcaatcggcggaggtgttgttacggatctggcaggatttctggcaggaacatatggcagaggcgtaccgtttatcaattatgcgaccacacttctggctgctgcagatgcatccgtgggcggaaagactgccgttgatacaccgcttgcaacgaatctgattggacttttcaatcagccgcgcaaggtctacattgatattgccgcatggaaaacccttccgaaacgtcagatggcaagcggcatggcagagaccatcaagcatgcatgtctggcgagccgtgaaatgtttgagtttatcgaggaaaacttggatgatattatgagtttccagaagtttgcctgcgaatatatcgcagagaacaactgcaagatcaagtatgatgttgtcatgaaagacgagagagaaagcggactgcgcgaagtcctgaatttaggacacacggtgggacgtgccattgaaactgtcagtgactacaggctcctgcacggcgaggcactttccatcggaatggcggctatggtactgctttcggcacgccttggctatatgtcagaggaagaggaagagcgtgtgactaagctgtatgcgcgtgtgggacttccgacaagaattccggattatattgatcgtgaggctctggttaagaagctttataccgacaaaaaggtgcgtgacggaaagttacgctttgtgatcgaaaaaggcattggcgatgtagtggagtttgcaccgaatgtgtatgccaagccgatcgaggagagtctggcaagagagattattatggaactgtaaaggttatacgaggacgatgggctgtcggtattcgtttggtaattcggtctgtatctgcatggaagatgtagtgcggtacagatcagcacaggctacatcgtgtaaaaaacgtttgtatgcaattccatgaaggatagaagaagcatctgcaactttggtaatcaaaggaacggatgcttcttttttgatggcagaaagaagcacagaggaatccctgcggaaaccaagcacacgcagatatggaatgccatccggctgccagagcgcagcataatcgtcctgccggatgttgagcaggatgtggagcagtgcacggcagatgcgtgtgtatgttgtatttttgctttttaagagatcggcaaactgcgaaaagcttaaaaaatgttcaagctgctgtgtgatccggtgggacagatccttgccacagtctgcaaagccagcatagcctccatcgtacagtgcccataaccgggtgtagagagcctgagaaaaagcatccgtgtccagaagaaggttctgctgtgccaaagtggcaaggagggaggcggaagtatcgggaagcatctgcgaaagttcgaaatcaaagctgcctgtacttatgaacatggaatggttgtggttaccatcattttcagatggcacaagcagtgcgtttcttatggcagttgcagaggcgtaggttacgcctgtttttgtgctgtgatagccttccccgatacgttggaccggcatactggaaaaagttctgtcatgtacgctgtttatggaattccagcgggcgattgctttttcgtattctaaggccagaatattgttcggagatgccagaaaagaagaaaccgcatcagaagaaaaggaaggcagcagggaacacagtgcgtggcttcgtgcgacaggaaacggatttccctgcttcatgttataagaaaccagcatctgatagtccgaagcatttttggaaagaacttcgacaattgcctgcataagttctttttccggagtttcacagccatagcagagcgtgtcaacgacgcctgtttttccgagaagctgtacgcctccggcagcaaaatattccgcggaagcggtcgcccatacagccggaagttcgagtaccagatcggcaccgccgagaagtgccatgcgggtgcgcgtgtatttgtcggcaatggcaggaacaccgcgctgtaagaaatctccgctcatggcaacgatcacaaaatctgctcctgtaaggtggcgtacggtttccatctgatattggtgtccgttgtgaaacggattgtattcggcgataattcctgctgttttcacgtttgcctcctgttcggtcgtttcttctgcctgtttttctgttaaaatattaacacagcttttcgaggatttccacttgtataagaaggaaaatgtgtttataatggaaaaagattgtggatttccacaaaatgaataaggacaagggagaattcaaatgaacgtattagtaatcaactgcggaagctcttccctgaagtaccagctgatcaactctgattcagaagaggtacttgccaagggcttatgcgaaagaatcggaattgacggaagactggtttaccagaaagagggaatggataaggagatcacggaagctccgatgccaacccacaaagaggccattcagatggttcttgatgcactgcataatccaaagagtggagcagtaaaggatctgagcgaaatcgacgcagttggacatcgtgttgtacacggtggagagaagtttgcaaagtcggtggtactgacagaagaagtgcttgcaaaggtagaagagtgtaatgaacttgcaccgttacataacccggcaaacctgatcggtatccgtgcgtgtcaggatcttatgccaaatgtaccgatggttggtgtatttgatacggcgttccatcagacaatgccaagaaaggcattcctgtacggacttccatatgaatattatgagaaatataaagtaagaagatacggattccacggaaccagccacagttttgtatccaaagcatgtgcagagtatctgaaactggatctgaaaaacagcaagattattgtagcgcatcttggaaacggagcatctgtcagtgctgtattaaatggagaatgtgtggatacttccatgggtctgactccactggagggactggttatgggaacccgttccggagatattgatccggcaatcatggaatttatcgcaaagaaagagaacctcgacatcgatggtgtcatgaatgtgttaaataaaaaatccggtgttgaaggattatccggtgtatccagtgatttccgcgatctggaagctgcttataatgaaggaaatccacgcgccattgatgcctgtgaggtatttgcttaccgtgtggcaaaatacatcggtgcatatgttgcagcaatgaatggtgtggatgcgatcgcatttactgcaggtatcggagagaatacttctttcattcgtgaaaagatcgtttcttatctgggatatctgggaatcaagcttgataagaagacaaacgatgtgcgtggcgtggaggaaattatttccacaccggattcaaaagttaccgtatgtgtcattccgaccaacgaggagcttgcaatctgtcgtgagaccgtagcactggtaaaataaatgttgataaatttgttgataatttgtaaaaattagttgacaaagcaggacaccctatgtataattgtttaggtgtgaataggagaatactgtgaaaattgatctttcaatcattacaaaatccataaacaaggaattgacacaggaggcggacatctcgctcacttcctttcgttcccgcttgggagattttcctattgttcgcaaagcgccggtgacattgcagatccgtaatgaggagaatgcagcggtattcgttaagggtacggttgatattgatgtgatgattccgtgtgcgcggtgtcttgaagaagttcggacgccgatccgttttgacatagataagaaactcactgttcaggaagagggacttgtcgatgaagagatggagaaaccggattacctgattgggtttgaactggatgtagataaacttgtctacgccgagattttggtgaactggccaatgagagttctgtgcaaggacgattgcaaaggaatttgtaaagtctgcgggatgaacttgaataagggagcctgcagttgccagagaacagagcttgatccaagaatggcagcaatccaagatatatttaacaggtttaaggaggtgtaaacaaatgtcaatttgtccaaagaataaatcttctaagggaagaagagataagagaagagcaaactggaaaatgtctgctccgaccttagtaaagtgcagcaagtgcggcgaattaatgatgccacaccgtgtatgcaagaactgcggatcttataacaaaaaagagattatcgcgcaggattaataaggataggtctttaaaaatcaagagttggcggttttgctgactcttgatttttttgtgcctgaaagagccaatttatcgttgatttatggaatgatatatagtatattttctagtagatgcataaggaggaacagaccatgcagacaatcacgaaagtagctcttgatgcaatgggcggtgataatgcaccggcagaaattgttaagggagcagttgatgcggtctcttcccgtgaagatatcaaagtttttctggttggacaggaggacgtggtaagggaagaattgcaaaagtacccatatccgcaggagcgtattgaggttgtggatgcgcctgaagtaattgagatggcagagccacccgttcaggcaattcgaaagaaaaaacagtcatccctcgttgtaggtatgaatatggtaaaacaaagagaagcggatgcatttgtttccgcaggaagttccggagcggttctggttggcggacagacgattgtcggacgcatccgtggaatcaaacgcccaccgctggcaccgatcattccgacggagaccggaatttcactgttgatcgactgtggcgcaaatgtggacgcacgaccggaacatttattacagtttgcaaagatgggttccgtttatatggaaaacgttgtggggattaagaatccgagagtggcgattgtaaatattggtgcggaagaggaaaagggaaatgctctggtaaaagaaacatttccattgttgaaagaatgtgaggatatcaattttgtcggaagtattgaggcaagagagattccacacggtggagcagatgtcattgtgtgcgaggcatttgtcggaaatgtcattttaaaattatatgaaggtctcagttcaacactgatcggtgtgatcaaggcgggactgatgagcaatttaaagagcaagatcggtgcggcactggcattgccgtcactgaaaaaaacactgaaagcatttgatgcgagccagtatggcggagcaccgcttctgggactgaatggccttgtggtaaagacccatggaagttccaaggcaaaggaaattaccaattccatttaccagtgtgtgacattccgtgaagagaatattaacgaaattatcaaagaaagagttgcagattccaaaaataatgaagaagaataagaaaggaaatgaagtattatggaattcgaaaaattaaagaagattattgtggacgtattaaacgtggacgaaaatgagattacgatggataccacattcattgatgatctgggagcggattccctggatgtattccagatcattatgggacttgaggaagaatttgatatcgagattccaaacgagcaggcagaaaagattgttacagtaggggatgcggtagaacagatcaaagctgcaatgaatgaaaactaaacacagatacgaaaggagtctggtggcggactcctttatttcagaaaggggaaagaagtgacagatattaaaaaatttcaggaagtgatcggatatcactttcatgatgagaaactgcttcgtcaggcactgacgcatagttcatttgccaatgagaagcacttaaagaaacattcggacaatgagagactggagtttttgggcgatgccgtgcttgagattatctccagtgaatttttatacaaagagtatccggacaagccggaaggagaactgacaaaactgcgtgcaagcattgtctgtgaaccgacactggcactctgtaccaaggatattgctttgggagagtatcttttactcggaaaaggagaggaccagaccggaggaagaggtcgcaaatctattttgtctgatgcactggaagctgtgatcggggcaatttatttggatggtggttttgctaatgcaaaagagtttattcataaatatattctgacagatattgaacacaaacagctcttttatgatagcaagactatcctgcaggaggttgtgcagggagaacatgagcagcttacttatgtactgaccgatgagtccggtccggatcataataagagttttactgtccgtgcatgtattggagagcgtgtcattggcagcggaaccggacataccaaaaaagcggcggaacaggaggctgcatatcaggcacttctgatgcttaaaaatcagcaaaggggataatacatgtatttaaaaagtattgaggtgcagggatttaaatcatttgcaaacaaaattgtatttgaattccaccagggaatcacgggcattgtaggaccgaacggaagtggaaaaagtaacgttgcggatgcggtgcgctgggtacttggagagcagtcggtcaagcagctgcgtgggtcttccatgcaggatgttatttttgcgggtacggagaaccggaaaccgctcagctatgcgtatgtagcgattacactggataattccgaccataaactggcaatcgactatgaggaagtcaccgttgccagacgtctgtatcgttccggagagagtgaatatctgatcaatggcagtccgtgccgactgaaagaagtttcagaattgttttatgataccggtatcggaaaagaaggatattcgatcattggacagggacagattgaccggatcttaagcggcaaaccggaagaacggcgcgaactttttgatgaggcggcaggaatagtaaaattcaaaaaacgaaaagcgactgcacaaaaaaagttagagaatgagagagacaatctggtccgtgtaaacgatattttgtcggaactggaacgccaggtggaaccgttacagctgcagtcggaaaaggcaaaaacctatttaaaaaagaagaatgagctgaaagattatgatgtcaacatgtttctcatggaaacagagagaatcgcatccgagcagcgtgaagtagaggaaaaattcaaaattgcagatgaacagctgaaagaaagcacggatgcaagggaaaagatccgccaggaatatgaccgtttgggcgaaagcatcacggaaatggacgaaaagatcaatgcaatccgggaaaatatcagcaatacgtctgtgatgaaggaaaaactcgaaagccagatccagatactggcagagcagatccatacggcagagatgacagatgaacatctgcagagccgtctggatgccattgcgcgggaacagaaggaaaaggaggaggcaaaagcttcctacgagaaagaaaaacattccggtgatgaacagcttgcacaggtacggaaacgacaggaagaagcagcacagacactggcagagatacagaaacagattgcatcctgtaatgagggaatggaacaggggcagaaagaattgtttgcgctgttaaaccgcagagcagatattcaggccaaacagcagcgttccgataccatggtggagcagatcaatatacgaaaagcagagcttggaaagcgtctgctggacagaaaaacgcaggaaacggatctggattcggttcttgcagactgcaaaaaagatctcgaagaggtcagtgcgcatatccgaaaactttcggagcaggaaaaagaattaagtgcaaaggaaaaagaatggagaactaaggcaaaagaaaatgaccgtgcattggaagaaaagcaaaacgaatttcacaggcagcagtctcgtctggagtcgcttaaaaatattgcggagcgctatgacggatacggaaacagtatccgcaaagtgatggaacagaaagaacataatccgggattactcggggttgtgtcagatctgattcaggtggataagaaatatgagattgcgattgagaccgctctgggtggaaacattcagaatattgtgacggaagatgaagcaacggcaaagaaaatgatcgcctttttaaagcagaaccgtttcggacgtgcaacatttcttccgctgaccagtgtaagcgcaagaaaaaatccgaagaatgaagcggcacggaaggagcccggagtcattggaattgccagtcagctggtaaagtgtgagcaaaagtatgaggaagtggcggcgtatctgctggggcgtgtgcttgtggcagattcgattgatcatgcgattgcacttgcaaagaagaatcattacagtttacatattgtaactctcgagggagaatatttaagccccggtggttccatgacgggtggagcatttaaaaattcatccaatctgctggcaagacgccgcgaagtggaggaactggaaacgaaaacgaatcgtctgcttcaggagattgcgcagataaaaaaccgcagggaggatcttcttacggccattgagctgaatgaggaagatctcgaacaggtgaaagaaaccctgcagaaagaatttattcgtcagaatactgcaaagatcaatgtggatcgcgcaatgcagcagaaaaatgagagtgaagaagtattttcaagtctcatgaaggaacggcagcagatggatcggcaggtagaagaaatccgtgcagatcagacaggcattaaggaggaactggaacattccagacaacgggaaacggaaatccagcatgcgaatgaagcgtttcagaagatgcttgaagaacagaaagaactggaaaataaagcggaatcggaactttccggaattcagcttgaggaagcgaatatccggcagaaagtagaatttgcccagacaaacgtggaacgtatcaatggagatctggaaaaattcgagacggaaaagaccgggcttctggagaatgcgaaaaatttcaaagaagatgtggaaaagaaacagcacgacattgcagaaatccaaaagacgatccttgcttcttcggattcccatggggaactggaacagaaacttcgtgaaagcgtagaacaaaaagaacagatgtctgcggaataccggggatttttccagaaacaggaggaaatttccgagcggtgtaacgaattggataaagaagtgttccgtctgaacaaccagcgggaaaagctgaatgaatctgcagaacaacagacaaattatctgtgggaagaatatgaactgacaccgcatgcggcagcagaattaagaaacagtgaatacgaagatctgcttgctttaaagaaactgatcgcagcagtaaaggatgagatccggaagctgggaacagtcaacgtcaatgccattgaagaatacaaagaagtttcggaacgttatacgttcctgaaagggcagcatgatgatctggttgaggcagagcagacgctgctcggcatcatagaagatctcgacagtggcatgagaaaacagtttatggaaaagtttgcggaaatccagaaagaattcaatgcatcattcaagcacctgttcggcggcggacatggagctttggaactggtggaggatgaggatattctcgaatgtggcatccgcatcattgcgcagccgccgggaaagaaactgcagaatatgatgcagatgtccggtggtgagaaagcgctgacagcaattgcactgttgtttgcgattcaggcgctgaaaccttcgccgttttgtcttctggatgagatcgaagcagcgcttgatgattccaacgtctcaaggtttgcaagttacttaaataagctgacaaaaaacacacagtttattgtaattacgcacagacgtggtacaatgacagcagcggaccggttgtatggaattaccatgcaggaaaaaggtgtatcgacacttgtgtcggtagatctgattgaacatgatttgaactgattgattatgtaaaaagaaagaagcgataagaaaggaaactgatatgggagaaaagaaaggttttttcagccggcttgtcgaaggattgaccaagacaagagataatattgtatccggaattgattcggtatttcacggtttttctaaaattgatgatgaattttacgaggaactggaagaaattctgattatgggtgatctgggcgttaaggctactgagtcgattctggatgatctgcgtgaaaaagtaaaggcaaaccatgtgaaagagcctgcagaatgcaaacagcttctgatcgacagcatcaaacagcagatgcaggtcggtgagacggcataccgctttgaagaagagacatccgttgtccttgtgatcggagtcaatggtgtgggaaagaccacaaccgtcggaaaacttgcaggtaaactgaaagagcagggaaaaaaggttgtgattgccggtgcggatactttccgtgcagcagcaggagatcagctcaaagagtgggcggaccgttcgggagttgacatgattggcggaacggaaggcgcagatccgggatctgtggtttatgatgcaacggctgcagcaaaggccagaaatgcagatgtgcttctggtcgatacggcaggacgtctgcacaacaagaaaaatctgatgaatgagcttggaaaaattaacaagattctcgaaaaagagtatccacaggcgtatcgggagacgctggttgtgctggatgcgacaaccggacagaatgcgctggtccaggcaaaggaattttccgatgtggcaaagatttccggaattgtgctgacaaagatggatggaacagccaagggaggaattgcggtggcaattcaggcggaacttggagtgccggtcaaatatatcggcgtgggagagaccattgatgacctccagaaatttgacccagatgaatttgtgaatgcattgtttgacgtaaaaaataaggaggacaacgatgaagatgctgacgctagataaatttgaagaagcaagtgaaaaagtaaaagaggttactctggagacaaaacttgtatacagtgattacttaagtgaccagacaggcaataaagtatatttaaagccggagaatatgcagtttaccggtgcatacaaagtaagaggtgcttattataaaatcagcacgctctcagaggaagaacgtcagagaggactgattacagcatctgccggaaaccatgcgcagggagtggcatatgccgcaaagtgctacggctgtaaggcggtaattgtaatgccaaccaccacgcctctgatcaaggtgaatcgtaccaagagttacggtgcggaagttgtgttgtacggagatgtatatgatgaggcatgtgcacatgcactggagctggcagaaaaaaatggatatacctttattcatccgttcgatgatctggcagtggcaaccggtcagggaaccattgcaatggagatctttaaggaacttccgctggtagagtacattcttgttccgattgggggaggcggactggcaacaggcgtatccacacttgcaaagctgctcaatccaaagattaaggtgatcggtgtggagccggctggtgcaaactgtatgcaggcttcatttgcagccggaaaagtgacaacgcttccgacagtaaatacaatcgccgacggtactgccgtaaagacaccgggaagcaaaattttcccatatatccagaaaaatctggatgacattatcacggtaacggatgatgaactgatcgtaagctttctggatatggtggaaaaccacaagatgattgtagaaaattccggactgcttacagtagctgcattaaagcatttaaatgtcaaggacaagcgtgtggtatccatcttaagcggtggaaacatggatgtgatcacgatgtcctctgtggtacagcagggactgattttccgtgaccgtatctttaccgtttcggtattgcttccggataagccgggagaattggcgaaagtttccgagacactggcaaaagagcagggaaatgtcatcaaactcgaacacaatcagtttgtttccacgaaccggaatgccgcagttgaacttcggattacattggagtgttttggtaccgatcacaagaagcagattatcaaggcgctggaaaaggccggatataagccaaagatcgtaagaaccatgatttaaaaatgaattacaaggtgtcaagaaaaaatacttgacaccttgttttctttatggtaaagtatccaaggtgattgatgtggaagaaaagttacaacaggcttatttatatgatttttatggcgagttactgaatgaacatcagcgccggatctatgaggacttcgtgttcaatgatctttctctcggtgagattgccggggaggaggggattaccagacagggcgtggcagatatgatcaaacgctgtggaaagaagctttcggattatgaaaagaaacttcatctggtagagaagttcttatctgtgaagcaggatgtggaggaaattcacagactggcagaacagtttcatcaaacaaaagatgaacagatcgtagaacagatcgcaacgatttcaaatcagattttggaggagctgtagtatggcatttgacagtctttctgaaaaattgcagaatgtatttaagaatcttcgcagcaagggcagactgacagaggacgatgtcaagacagcactgaaagaagtcaagatggcactgcttgaggcagatgtaaatttccgtgtggtcaagaagtttgtaaaagatgtgcaggaacgggcaatcggacaggatgtgatgagcggtctcaatccgggacagatggtcatcaagatcgtaaacgaagagatggttaagctcatgggctccgagacaaccgagattgcgttccggccgggaaaagaactgaccgtcattatgatggtaggtctgcagggtgccggtaaaacaactaccacggcaaagatcgcaggcaaattaaagaccaaagggaaaaagacactgctggcagcctgtgatgtgtatcgtccggctgcaatcgaacagttgcagatcaatggagaaaagcagggcgtggaagtattttccatgggaaataaaaacaaacctgcggatatcgccaaagcggccgtggaacatgcaaagaaagaagactgtaatgttctgatcattgatacggcaggtcgtctgcatgttgatgaagagatgatggatgagcttgtggagatcaaagaagcggtggatgtattccagaccattctcgttgttgatgcaatgaccggtcaggatgcggtaaatgttgcttcgacatttaatgacaagataggaatcgatggtgttgttctgacaaagctcgatggagatacccggggcggtgcagctctttccatccgcgcagtgacaggaaaaccgattctgtacgcaggtatgggtgagaaactttcggatctggaacagttttatccggatcgtatggcatcccgaatccttggtatgggtgatgtgcttaccatgattgagaaagcacaggagaatctcgacgaggaaaaagccaaagaacttgagcagaagatgcgcaagaatgaatttgactttgaaatgtatttagagtccatgagtcagatgaaaaagatgggcggtttgtccagtctgatgggcatgatgccgggacttggactcggcggtggaaagatgccggagattgatacggacgaagcggagaaaaacatgcggagaatagaggcaattattcattccatgacaccgcaggaacgtaaaaatccgaatctgctcaatccaagcagaaagaaccgcattgcaagaggtgcgggtgtacaggtggcagaagtcaaccgtctggtcaagcagtttgagcagacaaagaaaatgatgaaacagatgcccggcatgatgggcggcaaacgtggtaaaagaggaatgttcaaaggacttcccttttaaataaaaaacaaaacctatgaggaggtgaaatcatggcagtaaagatcagattaagaagaatgggacagaagaaggctcctttctatagaatcgtagttgcagattcccgctcaccaagagacggaagatgcatcgaagagatcggaacatatgatccaacaaaggatcctagcgagtatcacgtagatgctgagctggctaagaagtggttatctacaggcgcacagccaacagagaccgttaacagaatcttcaaggcagctggtatcgagaaataattccgaagggtggatgtaattaatgaaagaattagttgaagtaattgcaaagtcactcgttgatttcccggatgaagttgttgtgacggagtctgagaatgaaaaaggaactctgctggaacttagggttgcacagtccgatatgggcaaagtaatcggaaagcagggacgcattgcgaaagcaatccgtgcggttgtgaaagcagcggcatccaaagaagacaaaaaagttattgtggaaatcatgcaataacataacggtaggatataccgcattaagcaccccgcagttgcgaggtgcttgtttttctatgaaacaaattcatgagagaatctgcacaataggagattttatggaagatttatttcaggtgggagtgattacggctcctcacggggtacgtggagaggtgaaagtgtttcctaccacggatgataatgcccggtttaaaaatttgaaaacagtcctccttgatcagggtcggggaaccagagaacttgaaatcgaaggtgttaagttctttaaaaatatggtgatcctgaaattcaaggggatagatgatagaaatgacgtggagagaatgcggcaggcaaagttgcttgttaccagggaaaatgcagtggaattaggaaaagacgagtattttattgcagatctgatcggaatacaggtggtttcggatgaaggagaagaacttggaacaatctccgatgtattgcagaccggtgccaatgatgtctatgttgtgagtaaagacggcgcaaaagatctgctcattccggcaatccatgcgtgtatccagaatgtggatgtggctgcgggacagatggaagtacatctgctgccgggactgcgttaaacggagggtggacaatgaagtttcatgttttgacactttttccggatatggtgatgcaggggcttatgacaagcatcacagggagagccgtacaacagaaaaaaatagatattgatgcggtgaatattcgtgattatacgcaggataagcatggcagggtggatgattatccttacggcggcggtgcagggatgctcatgcaggcacagccggtatatgatgcatgtcagagtgttatggaaaagataccgcagaataagaaaaagcgggtgatttatgtaaccccgcagggaattccttttacacaggcaaaagcacgggaactggcggcacaggatgagctgcttttgttatgcgggcattacgagggcattgatgagcgcgtgcttgaggaagtggtcacagattacatttccatcggtgattatgtactgacgggcggcgagctggcagccatggtgattgtcgatgcagtggcacgcctggttccgggagtgcttggaaatgaacagtcggccctgaccgaatctttccacggagagcttttggaacatccgcaatattccagaccggatgtgtggcacgggaaaaaggtgccggaggtgctgctttccggaaaccagaaacacatagatgcatggaaaaaggaacagtccatcctgcgtacaaaggaacgcaggccggatctgtatgcccgctatgtgcggctgcaggaatgcagacaactgcttatgaaacagaaactgttgcacatcgatatgattgaactgatcaatcgtggacgcgcacaactgttgtatttcgggcagggacagatattgctcaaagatatggaatacgagatctattttcatgcatgtgttgatccgtcaagacttccggatatccgtacatggacgcttccggttgaaaaaataccgctggcggttttgcatcaggaggaaatgattccttattttcaaaagagatacggacttgatcaggagtgtgaatgttatcaggctgtgtacaccagacatgaaaagcttccggtgcgcgggttataccggccggatctgacgcgtgaggatggattgtcgatgcgcagattacaaagagaagattttccacaggtggtttccttttatcacggctgctgtgatgaggactacctgcggtcgaggatacaggatggtatgcttgtgggggctttttatgacgaaaagcttgccggatttatcgggcagcattgtgagggaagtatcggaatgcttatggtagcaccaaaattccagcgcagacacattgccatgacgctcgaaacgtatgcagcaaactgtatgctcgaacagggaaaaattccgtttgcacagattatcacggacaacgaaaaatccaagagattgcaggaaaaagagggattttgcctgtcgcgtgacaaaattttctggatgtgcgaaaaatgatgaaaaaggacttgatttttcggaatgagtatgctaaagtttatagttgttgcggtgtaattatccggtaatattacggaacggatagttacaaatgtgaataaaagtgacggtcctctggcaccgatagatggagtttaagaacgtcaaaataatcaggaggtcacaaaatgaacgcgagtgaaattatcaagaacattgaggcagagcagttaaaggctgaagcaccacagttttccgtaggtgatactgtaaaggtatacggaaagatcaaagagggaaaccgtgagcgtattcaggtattcgaaggaactgttattaagaagcagggtggaagcaaccgtaccactttcactgtaagaaagatttcaaacggtgtaggtgttgagaagacatggcctttacattctccaaacgttgagaaggtagagatcgttcgtaaaggtaaagtacgtcgtgcaaaactttactacttaagagaccgtgtcggcaaagctgcaaaggtaaaagagttagtaaaataatttgcttcatggaagggatgccacagaatgcggcatcccttttttctaacttgaattaaagaggtggaaaagtgaaaagaagaagcggactgaatttcagcagaagaagaaaaaagtttaatgtgcccctgtttaaagaaattatgacctgggtattagaatgtgccattgtaattgccattgcatatgcactggtcagttcttttggttttcggacgacagttgtgggaaatgccatgcaggataccttacagagcgaggaacagatttttgtcaatcgctttgtctatatggtacgcgcgccaaagcagggcgatgtcgtcgtttttttgccgaatggaaatgaaaaatcccattattatgtccggagggtcattgcttgtccgggggatacggtacagatcaaaaatgggaaagtatatattaatggagaactttacaaggaagatattgtttctgcttccatcgaagatcccggtgtggcagcagatgaagtgaaacttggagatgacgaatattttgttctcggggataatcgaaacagcagtgaggacagccgtatggcaaatatcggaaatgtgaaaaaagattatataattggaaaagcgtggttccattttaagggatttggaaagatgggactgatcgattaagcgggctgatttaggaaatgaggaaaaagagatgaattttcaatggtatcccggtcatatgaccaaagcaaaacgacagatgcaggaagacatcaaactgatagatctggtgatcgaactggtagatgcccggattccgctcagcagcagaaatccggatattgacgaacttgggaaaaacaaatatcgtctgattttaatgaataaagcggacctggcggaccgcaaggcaactgagcagtggtctgcttttttcaaaaaaaaaggatattatgtggtaagccttgacgcgcgaagcaaaaacggaatgaaatccattaccgaaattattatggaagcctgtaaggaaaaaatggagagggaccgtaagcgcggaatcaaaaaccggccggtccgtgccatggttgttggaattccaaatgtcggaaaatccacatttatcaattcgtatgcgggaaaagcgtgtgcaaagaccggaaacaagccgggtgtaacgaagggaaaacagtggatacgtctgagcaaaagtgtagagcttttggatactccgggaattctctggccgaaatttgaggatcagaaagttggacttcgtctggcgctgatcggttccatccgggatgagatcttaaatacggatgaacttgcggtagagctgatccgtttcctgaaaacacagtatccgggaatcctgacagaacgttatgaagtcgaagaaacacaaaaggagaccgaacttttatgcgggattgcagaaaacaggaaatgtatcacgaaaggcggggaacttgattacagcaaagcggcagcacttctgattgacgaattccggagcggaaaactcggaaaagttacgctggagtggccaaaggagcaggaaaatggctgaaaaaattgatgcgattaaagaggaactgacagcaacaccgacggaagcactggaggcgtttgtggaaaaatatgcgtcggattcccgcaccggtgtgcagaaactggtggataccgcaaaaaaacgcgtggataagctacagaaggaaatgatccgtacggaaaatttaaagaaatatgaaaaagagtacgatacatatacatatatctgtgggatcgatgaggtaggacggggaccgcttgcgggaccggtcgtggcaggagctgtgattctgccgaaggattgtgatatattatatattaatgattccaaaaaactttcagcggcaaaaagagaagaactgtatgatatcatcatggagcaggcagtggcaaccggacttggcacgatcggtccggacaggattgatgagatcaatattctgcaggcaacatatgaggcaatgcggcaggcgattgcacagttatctccgcagccggatctgctgcttaatgatgcagtgacgattccgaaagtggcaattccgcaggtaccgattatcaagggagatgcaaagagcatttccatcggtgcggcatcgatcattgccaaggtgaccagggaccggatgatggtatactatgattcgatttatccggagtatggttttgcttccaataaaggatatggaagcgcggaacatattgcagcactcaaaaagtatggaccgacaccgattcacagaagaacctttattaagaattttgtatcataagataattattcaaaatcacaaagggggctgttcggatgcagatttcagatttggtaaaacagtatcatcaggcgatctcatcaggtgcggagacgctgaccgggacgaaaggtgtggaaaatcttgtggcctctctgcggtctctgacaaaaggaaatatttttgaggggacggtcacttccgttaaaaatggccgcgtgacgctttctctttccggagggcagcaggtgatggcacggctggacggaaagatttcccttatggaaggggaatccatgtttttccaggtaaagtccaacgatggcacgcagattgccatccggccgtttgcaattgacggggcaggcgcaaattatacgctgatgcaggcgctttccgcagcgggactttccgcacagccggagtatttgtccatggttgaccggatgatggaagaacagatgccgattgaccgggagagtctgcagcagatggcacggctggtcaatgcaaatccgcggattgatgtacagacgctggtacagatgcaaaagcttggaataccgattactgtagaaaatgcctcccagtttgaaaattatatgaatgacagtcaggcgattacacgggaactggatgcactgattgagcagtttccacagagtctgaccggaacagaaggcgcaccagtaaagacagagaccatgcgtcagcttggaaatgagttgttgcagattctgacagacgggctggaagaagtaccgcagcagatacaaagtccggaaccggatatggcatacaacctggatggtctgaattatgaaagcgtgcagacagataccgcagaaacgcagatgcagacggaagctgcaccggagactgccacggaaaccgtgcaggaacatccggaaattttgtcgcagcaggaaggtcaggctgcagcggaggagaaaggcgtggccggacagcaggaagccgaaacgatggaaactgtttccggaaaaacaacttataccgggcagatgtcgcagactccacatacactgggagctgtactttcacaggaacagctgcagcatttaaaccggatgatcggagatattctcggaaagccgcagagtgcatataacgcaaatagcggtacggtagaagtgttaaaggatctgcagcagctgtgcaaagatccgctgccgttggagagggaacatctcggaaagctgttttcttccagggaattccagaaacttgtccgggatacggcagaacagcagtggatggtcaaaccgggggatctcaaagagggcgattatgtgggcagactgtatgaacgtctgaacagtcagatggaaaaaattgagtctgcactcaaaaatgcgggacaggagcatactgttttttcacagatggcaggagagatccacagcaatgtggaatttatgaaccaggtgaaccagatgtacacatacgcacagattccactcaaaatgtcggggcagcatgcaagcggcgaactgtttgtgtataccaacaaaaaggcactggcgcagggagaaaaggatctgactgcttttttgcatctggatctggatcatctgggaagtacggatgtttcggtccggatgagaggacgtgaagtaagtacgcgtttttatctggacaatgacactgcatatgcattgctggaaaaaaattatccagtgctggaagcgaggctggaaaaaaagggatatcactgtaagatcgacgtggtaaatgaagaaaaacatgtaaattttgtggacgattttctgaagatggatcagccggcggcgacacagctgcaccggtattcctttgatatgagggcataaaatggaaaataataattttaaaccctttccgtttgagcagttaaaacaaaagaaagaaccggagaaaacggcagtggcgattgcctatgagccgggcgaaaaagcaccaaagatactggcaaccggaaaggggcaggtagccgaaaaaattattgaaaaagcaaaagagagtcaggttccgacttacaaagacaataaacttgcgtctactctttccaaattgcagatcggggacatgattccgccggagctgtatgaggtggttgcggagattcttgtttttgtggatgatatggatcgtatgaaggcaaagattgatcaggcaggggttaaataaaatttgaataaacgtacaattggaacagaatatgagaccatggcagcccggtatttgtgcacacatgattacacaattcttgcacgcaattaccggacaccatttggagaggtggatcttattgcacaaaaggacggggtacttgtatacgttgaagtaaaataccggagcagcaatgattacggagatccgttagaggcggtagaccggagaaagcagcgccagatctgtaaggttgcaaattatcattatgcaggatatgcagcagggcaggagatggactgccgttttgatgtgattggaatttatggggatggaagtatccggcacatcccaaatgcattttattttcagaggtgacagacatggacagagaagattttcagtggaaaaataaagagcatatactggaactggaacagtttcagggcaaaaagggacaggggcttccgcttttgtattttccccttcttttggcacatacgggcgtaaagaactgttttaccactagagagggtggatgcagcaccggaatgtttcagagtctgaatctgagttttacacgtggagatgatccgcaggcagtgacggaaaactaccgcagagtggcagaggcaatgggaggaacgctttcggatattgtctgttcggatcagacccatacgacgaatgtccggcgggtggatagaagctgcgggggctatggtgtgacaaaggagcggccttacacggatgtggacgggctggtgacggatgaaccgggactgattctggcaactttttacgctgactgtgtaccgctttattttgtagatcccatacaccatgcgatcggactttcccattccgggtggagaggaacggtcggacgcatggggcagcataccatcgaggtgatgcgcagggaatttcatagtgaccccggagaaattcttgccgccgttggaccgtccatctgtcaggactgttatgaagtaagtgaagatgtggcatctgcctttgcaaaagagttttccggtcatgagtgtgagatcctgatcgaaaagggcggtggaaaatatcagctggatctgtggaagagtaatgagattgtgctgcgggatgcaggaatccttccggatcatctggcggtaacgaatctttgtacctgctgtaatccgaatctgctgttttcccatagggcaagccatggaaaacgcggaaatctgggagcttttttaaaacttgtgtaacaaattaagaaatccttaagaatgtatttcaaagatgttaaattactcggggaagatttatggtacactgactgtattgaggaaagataggaggatgctctttgatgcagccagattgcagagatatcaaaccggtctatgagcagatcacggacgggattcgaaaaatgatcataacgcatgcgataccggagggagaaaaacttccgtcagtgagggaactggcttcaaaatttgccgtaaatcccaatgctgtaaggaaagcttatcaggagctggaagaggaagggtatgtctgtgaccgggaaggcgaacggatggcggcatcggaaaagcagattgcggaactgatccgcaaagagctgctgcaggagttcgacacggtggtaatcagactgcagaatatgtcggtagggaaagaagaattgacaggacgtatgtggaaactggcaggaggaagcaaagactttgattgaagtaaataatctgataaagaaatttggggatttccgtgcgctcgacggggtaaatatgcatgtggcatctggaaacatatatgggcttgtgggaccaaacggtgccgggaaatcaaccctgatccgtcatctgacaggcgtataccggcaggatgccggagaaatttttattgacggggttccggtatatgaaaataaacaggtaaaggctcaaatggcttatataccggatgagccgttttattttttacaggcggatacactggaaatgatgcgttatttccggggaatgtacgagtcctttgatgaaaagatgttttatcgcctgcaggagtttttcccgggaattgatatgaaacgcaatatccgcagactgtccaggggaatgcaaaaacaggttgcattctggctggcactctgctgtagaccgaaacttctgattctggatgaaccgctggatggccttgatccggttatgcggaaacagatctggacgatcctgatgtctgaggttgcagagcgcaggacgaccgtactggtttcttcccataatctgcgcgaactggaggatgtctgtgatcatgtgggcattatgaatcacggaaaggttataattgagcgttccctgtttgatttacatggaaacatcagtaaaatccaggtggcatgccagaccggtatgccgaaactcccaaaagaatttgagatattgcatatgtcaaattccgggcgtgtatatacaatgattgtcaagggaaatcccagggaggttgcggcagtcatccagacagagggagaccatctggctattgtggacattctgccgcttacactggaagaaatttttatttatgaaatgggaggtttgggctatgaagtcaaagacatccttttttaaccgtacggtttttaaaaaaaatgtgaccctgtactggccgatctgggtatgctatctgttatatgggatggtaaaagtgccggggcagctgtggtcgcgtctgcagcaacagacggacatgactgcttatgccagggattatgcattgtacaacagtctgcgtctggaagtggatgtggccgcaattgcaattatggcagtcgtctgtgggatggctttgtttggctatctgtttacccagaagaatgcgtatatgatccatgcactgccggttacaaggggggaactgtatgtgacgaatatgatcagtggcctttgttttctattgattccgcaggcactggtttttctggtaacggtggttctttgtcttttgaaaggcattgcgagtgtgcagtttctgggattgtggtttttaagtgttatgggaattgcttttttcctttatgcaacggtgtgtttttgtgtcatgtttaccggacagctgtttgcacttccggtgtactttctggcggttaactatgtagcatttgcattttccagtggggcacgttatgtcatcggatatctgggatatggacttggcatggatactgtgccggaatttttgattttgcggattctctccccgatgaattatctgtacaacaatgtgcggtttgtattccggcaatcctataaccaggaaacggatctgatgtcgggggtgttgtcctaccggggactgcggatacttgcggcctatgtggctgcagcagttgtcatttatctgattgcttattactgttataaaaaacgcaggattgaaagtgcaggggatctgatttcttttaactgggtaaaaccattgttccgctggggcgtgggaaccggagtcggttattttgcaggcgtcctgatggcagaatttttagattccgtgcatctgcatgtaaaaaaaccaatgttgcttgttcttgtggtggcatttggttttgtcagtttttttattgcacagatgtttgtggaaaaaggatttcgcgtattttgccgccggagattctgtgagagcgggttatttgtgctgtttgtgctgggcagtttctggggatgctcaaaaaatgccacctatctggaacagtatgtcccggatgcagatcaggtaagccgggtggaagtttctcttgattatccggtagaatataaaggggacagcgttcgtgtggcacgtcaggcacagaaagaaattttaagtcatgcggaaatttacagggaaaataaaacggatgacagtacacagatcattttttattactacctgaaaaacggaaaaacgctctctcgcacatatgaaattgtcggggggaatgaaacgctttcagaactgttgtttaaagaagaaaataaagtggatcattttatggaatatctttttggaacggattctgacaaaatttcaaagtttagtaccggaacgttgacattaaatgaatcatcggaaaattataaggattgtgactttgatgcggatactgcaaaaaaactgtatcaggcgatttgtgaagacgccgcagatcagaagctgcaaaagtacaatctgacgaatgcactgaaagatccggaagaaacaggggagtactcttctgccagtatcagcatggatttttatcacgtatctgcagactggaaaaatgtatatgaccggctcgatgattactacacgaatatgggcgaatctgtggaaacatccagatcatatggcggatcagcatatgtcagcttcgggaaagactgtaccaatatcataaataccctgatagaatgcggggtcattgacgatgtttcggaaattcattttttaagttccggagagaaaacatcacagggatgaaaccagcaggactttacaacttccgcggcttattgtaaaataaagatggcgttttcggacgccatccatttttttgttggaggtaaaaaatgagcagaccagtcgtagccattgtcgggcgtccgaatgtcggaaaatctacgctttttaatacattggcaggagagagaatctccattgtaaaagacactccgggtgtcacaagagaccgcatttatgcggatgtcacatggctgaactataattttacattgattgataccggtggaatcgaaccggacagcggggatgtgatcctttcccagatgcgtgaacaggcagagattgcgattgccacggcagatgtgatcatgtttatcacggatgtgcgtcagggactgcaggatgcggatgcaaaagtagcggacatgctgcgcagatccaaaaagccggtggttctggtggtaaataaagtggacagttttgaaaaatttatgccggatgtgtatgaattttacaatctcggaatcggagaaccgtatccggtttccgcttcttccatgctaggacttggagatatgctggatgaagtggtgaaatatttcccggaaggatcggaaaatcagccggaggatgaaagaccgaaggtagccattatcggaaagccgaatgtcgggaaatcatccctgatcaacaagctggcacaggaagaccgtgtaatcgtatcggatatcgcaggaactaccagagatgccatcgatacagacattaaatacaacggaaaagaatatgtatttattgatacggcggggcttcgccgcaaaaacaagatcaaagaggagattgagcgctacagtattatccgtgcagttaccgctgtggaacgcgcggatgtggtgatcatcgttattgatgctaccgaaggagtaaccgagcaggatgccaagattgccggaattgcacatgacagaggaaaaggtatcattattgcggttaacaaatgggatgccatcgaaaaggataacaacacggtgaagaaacataccgagaaaatccgtcagatcttaagctttatgccgtatgcagagattttgtttatttctgcaaagtccggtcagcgtctgaataagatttttgaaatgatcgatgttgtcattgagaacaacagtatgcgtgttgcaacgggtgtcttaaacgaaatcgtgacggaagcagttgccatgcagcagccaccgaccgataaaggaaaaagactcaagatttattatgtaacacaggttgcggtcaaaccgccgacatttgttgtatttgtcaatgacaaaaatctgatgcatttttcgtacaccagatatctggagaaccgtatccgcgatacatttggattccgtggcacggctcttaaattcatcacgagggagcgaaaggaagactagttatgatgatcgttgcaagaatcattgcattactgatcggatatggattcggtctgtttcagacgggatatctgtatggaaaaagtaagggaattgatatccgtcagcagggaagcggaaatgcaggcacgacaaattctttgcgggtgcttggatggaaagccggcattattacatttgccggtgatcttctgaaagcagtatttgccgtacttcttgtaaaactgatttttcacggaacgtatggggctgatacaaaggtgctggaactgtatgccgggtttggaacagtcttaggacataattttccgtgctatctgcagttccgtggcggaaagggaattgcctgtacgacaggcgtcatccttgccgtctgtcctccggcagtaatctgctgtgccgttggattcctgattattgtgggaattacccggtatgtttcggtgggttccatatttctggtatctgcctatctggtacaggcgattattttcggacagcttggctggttaaaaatcagcggagccagccggatcgagttttacatactgagtgcatgttttaccggcatggcgatttggagacaccgtgcgaatattgttcgtctgatgaacggaacagagaacaaattcggaacgaaaaaaggagataaatgatatggcaaaggtaggagtgatcggagctggcagctggggcattgcgctggcaaagcttcttcgtaccaatggaaatgaagtaacggtatggtcgattgtggaagaggaagttgccatgctccgcagagagcatgagcatatcgataaacttccgggagtgaagcttccggaggatgtcctgtttacaacagatttaaaagaagcaatcgttggaaaggagttcctgattctggcggtaccgtctgtatttacaagaagcaccgcaaaaagtatggcaggatatgtgatagaaggacagatcattgtctgcgtggcaaagggaattgaagaagataccctgatgaccatttccgatgtgacagagcaggagattccatgtgcggatgttgctgtcatgtgcggaccgtcccacgcggaagaggttggaatcggacttccgacaaccgttgtggcaggagcaaaaacagaaagcactgcaaaaaaaatccaggatctgtttatgaatgaagtgttccgtgtttataccagcccggatatgcttggcatggaactgggcggatctttaaaaaatgtcattgcacttgctgccggaatggcggacggactcggatacggggataacaccaaagcggccctgattacccgcggcattgcagagattgcgggacttgccgtaaagatgggggcaaaagtggagacactctgcggactgaccggtatcggagacctgattgtcacctgtgagagccgtcacagcagaaaccgcaaggcgggtatgctgatcggacaggggtataccatgaagcaggctaccgacgaagtgaaaatggtcgtagagggaatttattcggccaaggcagcacttgctctggcaaaaaagtatgatgtggagcttccaattatagaagaagtgaataaagtactgttcgatgacaaaccggcaaaggaaggtgtaaaggatctgatggtccgcgaaaaacgtgtggagcatctgaatctgaagtgggaaaactgatatgcagaaaatcaagattaaatattttacagacaaaatcgaaccgctggattacattgaaggaaaatccgattggattgatatgcgggcttcggaagaagtaactttaaaagcgggagagtttgcactgatcccgcttggcgtggcaatggaacttccaaagggatatgaggcacatcttgtgccgcgcagttccacatttaaaaactggggaattatccagacaaacagtgttggaattgtagatggttcctattgcggggacaacgatatgtggcggatgccggtttatgcgacaagggataccgtgatccacgtaaatgaccgcattgcacagtttcgaatcgtggaaaatcagccggagattgtattcgaaaaggtggaacatctgacggggaaagatcgcggtggctttggcagtaccggattatcataacaataacagcaacaggagaaggaggattatactatggaagatcgtatgatgaaattttattcaaaagaaagcaacatgctggcgctgcatgccatgcacggacattttgcaacgagtcattcccacattaattattatgtggatgtgacaagtatcaagacacgtgtggcggaagcaaaacaggcggcacatgtactgtattcgagaattccaaagacaaaatacgtggatacaattgtatgtatggatggaacggaagtggttggtacgtttttgacagaagaaatccaaaacggtggaattatgggaacgaccaaccagcatgagacggtgtatgtaatttctccggagatcaacagcaacaaccagatgctgttccgtgacaataacaagggtgcgatcaaaggaaagcatgtggtgcttcttctggcaactacgacaaccggtgagacgatccgcagagcactggaatgtatccagtattatggaggagagatcgagtgggtagcttctttgtttggaacaatcaattccgtagacggggtagaagtggaaactttgtttgatgaaaatgatgttaccggatatgcggcatatccagtgacggagtgcccgttgtgcaaacagggacagaaaattgaggcgatggtgaatggatttgggtattccaaattgtaattttcggggacattgtacacagaaaatgtgggcaatgtcctcgttcgttatttcgccaagaaaccatgtaaatatttggacggattgacggtggtaatttcagacgaattccgttatcatacagttatcaggaagttcaaagaaacttcatctaaagaaaaaataacgaaaagcaaaaatcaggaggttttttcaaatggcaagtttatcattaaaaaatgtttgcaaagtatatccaaacggatttgaggcagtaaaggatttcaatctggatgttgcagataaagagtttatcatcttcgtaggaccatctggatgtggtaagtctacaacacttcgtatgattgcaggtctggaggaaatttcttccggtgatctgatcatcgacggaaaggtaatgaacgatgtagagccaaaggatcgagatatcgcaatggtattccagaactacgctctgtatccgcatatgacagtattcgataacatggcattcggtcttaagttaagaaaagttccgaaggatgagatcaaagcaaaggttgaggaagcagcaagaatccttgatctggagaagttactggatcgtaagccaaaggctctttccggtggacagagacagcgtgttgccatgggtcgtgcaatcgttcgtaatcctaaggtattccttatggatgagcctttatccaacttggacgcaaagcttcgtgtacagatgagatctgagatcgcttctttacataacagattaggtgctacaatcatctacgtaacacatgatcagacagaggctatgacgcttggaaccagaatcgttgtattaaaagatggtgttatcatgcaggttgattctccacagaagttatacaatgagcctaacaacttattcgtagctggattcatcggatctccacagatgaacttcatcgatgcaaagtgcaccattcagggagataaagctacattaacattcggtgattactctgtggttcttccggattacaaggcaaagaagcttgaagagggcggatacaacggaaagacagttgtattaggtatcagaccagaggatatctctgatgatcctgaaatgatccagaagaatggtgactgtgtcatcgagtctgatgtaacaggatacgagttacttggtgcagaagtattactgtactactctgtagccggtgcaaacatgacagcaagagttgattctgatacacctgcccgttatggcgatcatatcaagcttgcatttgatccgcataagattcatgtattcgataaggaaacagaattgacaattaccaactagtccgttaaaattatatagttgtaaatcttgaacccgggtgttagtatttacacccgggttctttcgaacgtaaataataggagagtatatgctttcaaatcagaaattacagaattcattaaacgaaattaaagagatcagccacatggatacggcattgtttactgcaaaggggaagctggtagcacatacggaggagatgccgttgctggaggcattagaacagcaggtggtcgttgatttcgcagaatcgcttgctgaaaaacagacgtatcaggattatcatctgtataaagtgatggtagaaggtgaaacggaatatattttagtctgtctggtgaaagaagagtcatttcttgtatgcgcacagatggcagtctgccagatccggaatctggttatgagttttgcagagcagttcgaccgcaataattttatgcagaatatcattcttggcaacatgctgattgtggatatttacggaaaagcaaaaaagcaccacattcaggaagtaccgcgggtagtttttgtgattgataccggaagtaaaaataacgatatggcgatggaactggtaaaaaatcttgcagatatccgttcgaaggactttgtgacctgcgtggatcagcacagtatcgttctgatcaaagatgtttcccatataaaagaagaggagatggaggaacgtctgtcaaaaattgcgggaagccttgcagataatttacatatggaagcaatgattcgtgtgcgtgtcggttatggaaacgttgtgacacaacttccggaaattgcggaatcttatcaggaagcgcggatggcactggaagttggtcgtgttttttatgcaaagtatgacacaatttcttacggaaagcttggcatcgggcgtctgatttaccagcttccgatgagtttatgtaatatgtttatcaaagaggtattcggtgagaaaattccggacatcttagatgatgaggaagcaatgtctactatcaataaattttttgagaataatctgaatatatcagagacggcaagacagctgtatgtgcaccgcaatactctggtatatcgtctggaacgtatcgagaaagcaatcggactggatatccgtacgtttgacgatgcgatgacttttcggattgcagtgatggtgattgctcacatgaaagatcaaatgtaatttagcaggatagtaaggagatagaggaacatgtcaggatatgatgcaagcagtatatcggtactggaggggcttgaagcggtccggaaacgtccgggaatgtatatcggaagtacaacgaccaaaggactcaaccacctgatttatgagattgtcgacaattccgtggacgagcatctggcaggtgcctgtgataaaatatgggtgacccttgaggcagatggctcctgtacggtggaagataacggacgtggtattccggtcggcatgcatgcaaagggagtatcggctgcccgcgttgtattttctacactgcacgcaggaggaaaatttgacaacaatgcgtacaagacgagtggaggactgcatggtgtcggatcttcggtagtcaatgcactttccacctatatggatgtggaaatcagccagggcggatatgtgtatcatgaccgctatgcacagggacatccggtggtagaacttgaagacggacttcttccaaagatcgggaagacaaagaagaccggaacgaagatcaattttcttccagatccagaaatttttgagaagaccagattccgggaagatgatgtgaagagccggatgcatgagaccgcttatctgaacccgaaactgacgatcatatatgaggaccggagaaagccggaagcagagcacattgagtttcatgagccggatggaatcattgggttcgtcaaagatctgaacaataatcttgaagtgctgcatgatgtcatttacttcaaaggggaaagtgaaggcattgaggtggaagcggcattccagtataccagcgagttccatgagaatatcatgggattttgtaataatatttataattcggaaggtggtgcacacctgaccggatttaaaactgcgtttacgacgattatcaattcctatgccagagaacttggcattttaaaagagaaagatgcaaatttcaacggtacagatgtgcgaaacggaatgacagcagtgatttccatcaagcatccggacccgcgttttgaaggacagacgaagacaaaactcgataatcaggatgcaaaccgtgcaactgccaaagtgacaagtgatgaagttccgctgttttttgataaaaatttagaaaccttaaagattgtgattggctgtgcggaaaaggctgcaaaaatccgcaaggcagaggaaaaagcgagaaccaatctgctgaccaagcagaagttttcgtttgattccaatggaaaactgtccaactgtgagagccgggatgcgtcaaagtgtgagatttttatcgtagagggagattctgccggtggttccgccaaaatggcgcgaaaccgtatgtatcaggcgatcatgccgatccgcggaaaaattctgaatgttgaaaaagccagtatcgacaaggtgcttgccaatgcagaaatcaagacaatgatcaacgcattcggctgcggtttttcggaagggtacggaaatgattttgatatcagtaagctgcgctatgacaagattattatcatggcagatgccgatgtcgacggagcccatatttccacgctgcttctgacactgttttaccggtttatgccggaactgatttttgaaggacatgtgtatgtggcgatgccgccattgtacaaagtgattccgtcaaaagggaaagaagagtacctttatgatgatgcggcactggaaaaataccggaaaacacataccggaagttttaccctgcagcgatacaaaggtctcggagagatggatgccgagcagttatgggagactactttaaatccccagacgcgtgtcatgaagcgcgtggagattgaagacggtcgtatggcgtcggatgtaaccgctatgctgatgggcacggatgtgccgccgagaaaggcctttatttatgaacatgcaaacgatgcgatcttggacgtatagatcctgttaggttttctaggagtgaggaagaaataaaatggaacatagtatcattcgcaccgagtattcggagctgatgcaaaaatcatatattgactatgcgatgagcgttatcattgcccgtgcgctgccggatgtccgtgatggattaaaaccggtgcagcgccgtacactttatgatatgtatgaactgggaatccgatatgacaaaccgtatcgtaagagtgcgcgtattgtcggagataccatgggtaaatatcatccgcatggagattcttcgatctatgatgccctggttgtcatggcacaggatttcaaaaagggactgccgcttgtggacgggcatggaaattttgggtccattgaaggcgatggtgccgctgccatgcgatatacagaggcacgtctgcagaaagtaacgcaggaagcctatctggcagatctggataaaaatgttgtggatttcatgccgaattttgatgaaaccgaaaaagagccggttgttttgccggtaaaggtgccaaatcttctggtcaacggtgcggaagggatcgctgtcggtatggcaacttccattccgccacataatttcggagaagtgatagacggtgtgattgcctatatgaaaaatccggatattaccactgcggagatgatgcagtatattccgggaccggatttcccgacaggaggaatcattgcaaataaagatgatcttccggcaatttatgagtccggggtcggcaagatcaaaatccgtggaaaaatcgagattgaaaagggcaaaggcggcaaagaccgcatggtaatcacggagattccgtataccatgatcggagccaatatcgggaagtttttaaatgatgtttacggtctggtagaatccaaggcaaccagtgacattaccgatattaccaatcagtcatccaaagagggaattcgtattgttctggaactgaaaaaaggagcagatatcgaggctctggagaatctgctgtacaagaaaaccaagctggaagacacctttggtgtcaatatgcttgcggtagcggatggcagaccggagacgatgggcgtcgtgccgatcatccgtcatcatgtgaaattccagtatgagattgcaaccagaaagtaccagacccttctggcgaaagaacaggacaaaaaagaaatacaggaaggtctgatccgcgcctgcaatgtcattgatctgatcattgagattttacgcggcagccgcagcatcaaagatgcaaaagcctgtctgacagacggaaatacggatcatattacctttaagaatccatcttcaaagatcatggcacagcagctgaattttacggatcgtcaggcacaggccattctggaaatgcgtctgtataaattgattggtctggaaattgaagcattgatgaaagaacatgatgagacactggaaaatattgcaaaatatgaggatattttagagcatcgttcttccatggcaaaagtaatcatcaaagaactgaccgcgtttaaaaaagcttatggcaaagagcgcaaaaccgtgattgacaatctgaaagaagctgtagttgcagcaaagaagatcgaggagcaggatgttgtctttctgatggaccgcttcggatatgcaaagattgtggatacttctgtctatgagagaaataaagaggcggcaaacgcggaatacaggcatatctttacgtgcaaaaatacggataaaatctgtatctttacggacaagggacagatgcatctgctaaaagtgcttgatcttccatatggaaaattccgggataaaggaacaccgattgacaacctctgcaattatgacagtaaagaagagaatgttgtatatctggcaggtcttgaacatgtcagctcgcaccggatgttatttggcacaaagtatgccatgatcaaagttgtggacggtatggaatttgtggtcgcaaaaaagacaacggcggcaacaaagctgggagaggaagatgaagtactaacggtatgtccgttagaagaaaatgatacactggtgatggcaacaaagaaagatatgtttcttcggattgactgtgcacaaattccgcagaaaaagaaaggtgcggtgggcgtgcgtggcatgaaactggctgccggggatgaactgaaaagtattcatgtgctgcatgaaggtgaggagaaagaggtcgaggtgaaaggaaagccggttgccctgcatcgtctgcatgtgggaaaccgtgataccaaaggagtaaagaaataatgaacaccattttgtttgatctggacggaacgcttattgattcttcggaaggaattataaaatcggtattatatacacttgatttttacggaattgaagaaacagataccacgaaactgtaccagtttatcggaccgccattatcggaaagctttgaaaaattttatggcttttccaaaaagaaagcgtatgatgcggtacaaaaataccgggagcggtacaataagaccggtatttttgagtgtaagttatatccgggtgtggagaagtgtatccgtacattaaaagaacagggataccggattggcatggcatcttccaagccggaagtatcctgcagacggattctggagcattttggaattcttccgctgtttgatgatgtggtaggtgcaacatttgatggtacacgggataaaaaatccgagattcttaaggaagtcatgcaccgctggagtcatattccaaaatccgagatgtgtctgatcggggatacgatgtttgatgtcaacggggcgaaagaacttggaattgcgtgtcttgcggtcagctttggttttggagatgtaaaggaaatgaaagaggcaggcgtgatcggtgtgtgcgattctatggaagaactgccgggcatgttaaagaaataataaagaaaaacgggagggtatatcatggaaacttttaaggagacgctgagaaagatctggtatatcttatacccgtttcttttttattacgcggttatgctgattattatgacaattgcgcagtgggcatttggaggagatgccacacattatgtgttctgtcagctgattgccactgtttttacaattccatccatgcttccgttttatcgtcagggacaggcactggcagggattgcaaagcagccgtttggaatcagccgggaacgtatctgtcatgcactttttgcggccgggatcatggcatgctttggaatttctttgaacaatctcatatccatgacgaaactgacggaaatttcgatgggttaccagcaggcaaataccgatttttacggaagtacaataggaatggaaattctttgtctggcagtatttaccccgattctggaggagctggtattccgggggattctttttggaagattaaaagatatgctgtcgaaaccgtttgcggttggaatttcggcattgatttttgcggccgtgcatgtcaatatcgtgcagttcatttacgcattgattcttggtgtggtgctggcacttctgatggatcgtgcgggaaatgtctatgcatccatgatcggacatatgacggcaaattttattgcggtagtccggacggaaacgcattggctggatttcagtgtcaggggagatgcggtcgcatggatattttccctgatgatactgggagctgggattgtgctgatgtggaggtatttgtctgacagaaaaacaatcgcctaaataaaagacaatagaaaaaaggagtacaaaagaagatgaaatgtttatggaaaaaagtaatttgcggggcacttgtggcgggaatgctggcacagtgcccacagagtatttatgcagaagatgccgcaaatactgccacggtaacggataccgagagtaatcatgtaacaccggatactacgcagcagccggatgatacaaaacagccgggagatacgcagcagccggatgatacaaaacagccgggagatatccagcagccagatgatacccaacagccggaagaactgccacagccttctgccgtggagggactgcatacaacaaaacagggaaaaacaaaggtatatctggaatgggaagaaagcagcgatgccatttcctatgcgatttaccggaaaacagccggaggggaatacaaaaaacttgccgagagcagcaagccatcctataccgataaaaacgtatcatccggtaagacatatacatataaaattgttgcaaaaaacgagcagaaggaagcggatgaggctgcaaaagtcacgttttcgaatacagaggccgtacagatccggtcacagaagtatacatacagccagatgaaaaaagacatgcaggaattggcacagcagtacagtgattactgtgagatgactaaaatcggaacttctgtacagggacgtggaatctatgattttgcaatcggaaacccggatgcagaggaatcccttctgattgtcagtacattgcatgccagagagtatatctgttccgcagtcatgatgaaggaaatccagtattatctggaaaattataacggaaccatcggtggtgtcaaaatgtcaaatatcctccagaagatgcagatccattatattgtcatggcaaacccggatggggtgacgatttcccagacaaaacattccagatggaaatccaatggacgtggggtggacttaaaccggaatttcccggcaaaacattttattccaggtgggaaaaaaggggaacagggatattccggaccaaaagcactgagcgagccggagtcctatgcagtagcaacgctgaccagacagctgatgaaacagcaaaatctgcagggggtggtgaattaccatgccatgggaagaattatttacggggactgtacgaaaggaagcctgaaaaaagatacctataaaatgtatgatatcgcaaagaaaattaccggatacagcaaagccccggatggcggcagcggaaagtcctggggaggacagtaccgggagtatgtgatggatctgcttaataaaccttctattaccattgagattggaagctcagtagcaccgtgcccgtactggcagtatgagattgaattccagaaaaacagatatgttgttgtgcggattgcaaatgcattgaaataaaaaataaaa

SEQ ID NO: 967 - DNA, 93781 bp, Unknown
  gut microbiota DNA sequence
atccttgtcaagttccggatgaaaagcagttgcaatctgattgccatagcgcacacccacgatatggtcatcaacgaccgagagaacctccacaccgtctgatacgcgctctacataaggggcgcggataaacgacatcggaacggttccaatgcctttgacttcagcttcggtatggaaactgccgagctggcggccgtaggcatttctttttacctgcatcgggattgtgccaaaatgttccggggagcctaaaaggatcaacccggcgcaggtgccaagcaccggcattccatcagcgatctgttttttcaggggatcaaacattccgagttcccggagaagttttccctgtacagtgctttccccgcccggcaggatcagtccgtcatacggctggtctaagtctgccgcctgacgcagttccacggtctttaccccaagttcttccaatacatgttcatgttcgataaatgcaccctgcagggcaagtactgcaacagtcatgtttatttccctctttctgccatcagtaaggcgatttcctgttcgttgattccgaccatggcttctccaagcccggcagataattctgcaatcagttttgcatcggtatagtttgtgacggcttttacgatagcagctgcacgcttggcaggattgccggatttaaagattccggaaccgacaaagacaccttctgctccgagctgcatcattaaagcagcatctgcaggggtagcgacaccgccggcagcaaagttaaccaccggaagttttccgttattatggacataggcaaccagatcatacggtacctgtaattcctttgctgcttcgaaaagttcatcttcccgcaggctgacaacttttgcaatctggctgttgatctttcgcatgtggcggacagcctgtacgacatcaccggtaccaggttctcctttggtacggatcatggatgcaccttcactgatacgacggagtgcttcaccgagatctttggcaccgcagacaaacggaaccttgaactggtgcttatcgatatggtagacgtcatcggcaggagagagcacttcactctcgtcgatgtagtcgatctcgatagcctctaaaagctgtgcctctacaaaatgaccgatccggcacttggccataaccgggatggatacggcttcctgaatgccgcggatcatctgaggatcgctcatgcgggaaacaccgccggctgcacggatgtcggcaggaatccgttcgagtgccatgacggcgcatgcgccggcttcttctgcaatttttgcctgttccggtgtggtgacgtccataattacgccgccttttaacatctgtgcaaggtttttatttaattcatactgttctgctgtgctcatcggtattcttctccttttttgttaaaatttgttttatgccggtcattatagaacttgattggatatatgaaaatagccaaaataaatatttattataagaccagaacgacaaaacaacgttaaatgatataaaatcacatgatgtagtaataaaaaccatataatatagtagacatgcgatgacaaatggtgtaatatgatgtgtgacataaaaggagtagaaaacggaggcgggatgaagctgaaacagcgcacgatttattatcaggatgaactgcatgacgagtttgccggagatcatattaaagcaaaacatattggacaggattaccggtatatccgggtgcgtcttctggaacggatgctgcatggattctggtaccgtatagtggcaattccgcttgcacgtctttacatgaaactgcatttttcacataaaataataaacaaagaagtgttaaagcaggccggaaacagtggattttatctgtatgggaatcatacacattttctggcggatgcgctgataccaacgctggtaaatcatccgcgggaaacggcggtgatcgtgcatccgaacaatgtttccatgccggtgctggggcggattacaccatatcttggggcacttccgctgccggatgacagaggtgccataaaacattttctggaggcattgacctggcataccgattgtggagattgtattatgatctatccggaagcacatatctggccgttttataccggaatacggccgtttcctgatacatcattccgctatccggtgcagcagaaacttccggttttctgtctgaccaatacttatcagcgcaggggaaagtctcacattccgcagatcgtaacgtatctggatgggccattttatccggatgcagaattgcctgcaaaactgcaaaaaacgcagctgagggatcaggtgtatgaagccatgggaaaacgggcgcaaaacagcaatatggaaatgatccgttatataaaaaaagacactgacagggagaaatcattcatatgagaaatattcttttttgtggaaacagtaaagtatttgatggtgtgcttacatgcatgttgtctgttttaaaaagaacacatgcaacagatccgttctgtttttatattttcacaatggacatgacgcggatcagaccggaatatacgccgatcagcgaagatatgacaaattttctggagcgcgttgcaaaaaaatttcatccgcagaaccgggtgatttcggtggatgtaacagtattatatgagcgttatttcggaggatgtccgaatgaaagtgcttattgttcgccatatacacttttgcgcctgctggcagatctggtgccgggaatgccggataaactgttgtatctggatgcggatattctgtttcagagagatatccggctgttgtatgacaaggatgtgtcacacgtggaatatgccgcggcaagggatcattatggcaagtatctgatctccccggattatattaatgcgggggtattactgcttaatatgaaaaatatcagaagaaccggtctgtttatgaaagcacgaaagctgcttcagacaaaaaaactcatttttgcggatcaaagcgcgattattcgcagtacgcgtgcgaaaatgctgctcccgcagaaatttaatgatcagaaatttttacataaacataccgttgtgagacatttttccaggcggctgttttatctgccgtatccgcatacggacaacatcaaacaatgggaggtagaacgggtgcatacggtatttcattaccatgcatttgatgacattttaaaagagtatctgtatttaaaacatatttacgaaaaaaggaaacacatataaattgctgcatccggatgaaacggatgcaggggaggagaaggatcatgaaagagaaaatgaataaaataccggtgttttacgcatgtgatgataattttgtgaaatacacgatggtttcactgcagtcgatgatggatcatgcatccaaagaggtacagtatgaaattcatgtacttcataccaatatttcggaagaaatgcaaaagaagatgtatgctatggagaatgcaaatttttctgtgcagtttgatcatgtgacggaatatttacattctatacaggagaaacttccgcttcgggattattattccaaaacaacatattttcgcctgtttatcgcggaaatgtttccggaaatagacaaagccatttatatcgacagcgatacgattgtgctgggggatattgcacaactgtatgcttatgatcttggagatgcttatgtgggagcgtgcagggagcaggtgatgatccaggaagatgtatatggcacttatgtggagaaggtgcttggggtggaacgcgacaattatttcaatgcggggatgctggtcatcaattgtgaacagtttcgtaaaaatcacgtgttagagcagtttatggaacttctcccgatgtacaattttgtggtcactcaggatgaagattatctgaatctgatctgtcacaacaaggtgtgctggctgccccagaagtggaatgtggaagtgttcggtcagatcccgtgccgcgaagaagaaatctgtgtgctgcattatattatggtctcgaagccgtggcattacagtgactgccgcctgcaggaatatttctgggagagcgcagaaaagtccagtgtgtatgccgagatccgtcaggtgcttgagagttatacggatgaagaaagaaagcgggatgccgtatcctgtgaccgtctgatgcagaccgcaaaggatgagatcgccaaggaaaataattacctgaatctggtgaaagcaggaaaattaaaatccaaagaccgcctggaagtacttgaaaaaattgctttgtacgaaagagaaggccgttttggggaagatgtggaggaagatccgcctacccgtgagcttcagccgtctgagatcgattatctgcgtaaaaaattaaagagccgtatcaagacaagattgacttacaaagtagcgcggacatttttaaacaagatcattgaaaataaacagctgatcatcaaggatgtcattggaacggaacatatggatgcactgacttccggtgcggtgattacctgtaatcatttcaacgcatttgacagctttgccatgcagattgcctatgaaaaatcaaagcagtgcaaaaaacgccggctttaccgtgtgatccgggaaggaaattatacgaattttccgggcttttacggaatgctcatgcgaaactgttacacgtttccactgagttccaaccgtgagacgatgaagaaatttttaagttccatggatactgtgctgcagcacggagatttcatgctggtctatccggagcagagtatgtggtggaattaccgcaagccaaaaccgttaaagaaaggcgcctatacatttgctgcaaaaaaccatgtgccggtgcttccttgctttatcaccatggaagacagcgatatcctcggtgatgatggcttttatgtgcaggaatacacgatacacattgcagagccgatttatccggacccacagaaaacacaggcagaaaatgtggatgcgatgcgcaggaaaaatgctgctgtatggaaacagatttacgaagagttttacggaattcccctggtatatgatactgcggaagcagtgcagtatgtgggaaaaccgaccaatatcgcataagaacagataccagaccgccggagaatgcctccggcggttttttcataaggggattgacagaaaagcagtgtgagagtactatactgcttagtaatgctaaatagcaccactaaataaaaagaaaagggatgggtatggaagaaaagtatatacagcagtttaaaaagggcgcatacgagatgatcctgctttcgctgatcgcccaaaaagaaacatacggttatgcgattctgacggaaatacaaaaacagggtggtgaaatctttgcatttgccaaagagggaaccatttatccgatcttgtaccgtctgacaaaggcaggacttatccagtaccgcctggtgccggcgaaagcaaacgggggcgaaaaaaaatattattcgcttaccagagagggaaaagatatgctcgaaaaaatgaaaaatttctgggaaaactacaaggattgtgtggatggatttatgaaaggggatgcgtaatatgaacagagaaacctatatacggaaagtaaaaaaacaactggactgttccgtgaaagaaaaagaggagatcgtgcgggatcttcaggagatttttgattctggaaaagagcatggaaaaagcgaaagccagatcataaaacagctcggaaaaccgcaggcgtatgcacaggcgctcggctgtggcagacagaccatgccgctgtccggaaaacgaaaagttgctgtagtgtttttggcggtgggtggactgttctgtctgtatgcactgggcgaaagtctgcggtttcggatgccgaaaaatgccattggcggtggggatgcgatgacgatgatcgtgctgcaaaactcgtcaccggtaaacagcagcgcgatttttgggggattggcggtcatctgtatggttgcactggttttccttttacgaaagaggaaaaaataaggagaggaatattaagaaataatggaacacataaagaaaaaactagcggtaattgttgtgttttttgctgtttttattggaattgttacaatctggacagtccgaaaacaaagccagccaaaattgacagcggtcacatggaaattggaggaagaagcggatttagacggcaacgagctttcatcttacgcaaaagatccttccaaaagcaaggtcgttctgacatttaaaaaagatcagacctatcggtgcaaaaatcttgaaaacaaaaaaatctggaagggaacatacacactgtcgcgtacaaaatcgaaagatacctacatgctgcatctcgttccggatcagggaacggcatcgtactatggcgtgtatgggacacgcgagtatgaagatggtactgggcacatgtcggtcatactgaccacaaaagacaaaattttatcattccttgcagaataaggcaaagacagcaattccggctgttccttttactgtctgcggaactgtgcgggtgtcatgccggtaagttttttaaacatcacgataaaatggctggaatctgtataaccgacatcgtgtgcgatctcctgaattttgcggtcacggcgcataagcagcagttcttttgccttggtgatccggtagtttgttaaatattcgtagacggagcagcctaggtagcgcacaaacaggcgggacaggtattgcggggatacatagacctgctggcataacttttcggcggtcaggtcttccatatagtgtgtttcgatcagccgcaatacgggctcaacatatttttcccacaggggatcgctggtatttgcgtggaaaaatccattggaaaactgcagcagcagtgcataacagtcgcaggaaagctggtgtgtattgactggtgctgttttaaaacgtgctacagcacggtcgatcacagctttgatttccagagcattttccttttctgtaaaaattatgcggttgttgccaagaatctgcggcagatgtgcttccattgtaccgccaaatgttgcaaaacacgtaatccatgcagaggtgtctgctgcacggtaagcatgtgggacatgcggtgtgatcagaatgccgtgaccttcgggcaaaaaatattcttttccgtcaattgtgaagatgccacagccttcttctgtctgcaaatagtgatagattgggtaaccttgtggacggctgagcgcttcctgcagccagtggtttccaacggaatcaaactggaatggttctttgctgagcgtgttgctgaaatagattgccatgagatacctccacttcttttttctatggcatcatagcatatttcaacagaaaaagaaatagtttcaaaatgttatataaattggtttatcatgttatacaaatataaaagattgtatcgtataatagggaaaaatcaacgaaaacaaaaaatgagacataaattcagaatcgaaaagaaaaggagaaaactatgagcacgcattttaagagaatcctctacggaggagattacaacccgaatcagtggacgaaggatatctggcaggaagatatgcgcatttttaaggatgcacacatcaataccgcgacaatcaatgtattttcatgggcaaagatccagccatcggagcatgaatataattttgatgagcttgacgagatcgtggatatgctttcgaaagaaaattacgatatcgtatttgccacttccacggcagcccttccgggatggatggtgcgtaaatatccggaagtgatgtttaccgattatgaaggaagacagcacaaatttggcggccgtcacaatgcctgcccgaattcttttgtgtttaaacattatgcgcgtgaactggcatataaactggcagagcgctatgcagacaatccacatgtgacctgctggcatgtcagcaacgaatatggaaacgagtgtttctgtgagaactgtcagaaggcattccgtgtgtggctgaaagataagtataagacaattgatgcattaaacagggcctggaatatggaattctggggacataccgtttacgactgggatgatgtggtaccgccaaatgcgttaagtgacggaatcggaagtgaaaagaccgcttttgcaggtatttccattgattatcgcagattttattcggacagccagttagcgtgcttcaagatggagcgcgacgctataaagagtgtgaaaccggatgcatttgttaccacaaacctgatgggaacgtttaaaggacttgattatttcaaatgggcaaaagagatggatgttgtatcctgggataattatccttcctatgatacgccgtggagcagcattgccatgacacacgatctgatgcgcggtttaaaagatgagccgtttatgctgatggagcagacaccaagccagcagaactggcagaaatacaattccctgaaacgtccggggcagatgcgggcacaaagttatcagacactggcacatggggcagacacgatccagtttttccagcttcgcagaagtgtgggcggatgtgagaaattccatggcgctgtgattgcacatgcaggaagtgaaaatacccgtgttttccgtgaggtggctcagcttggcgcggagctggaaagctttggagaccgtactttgggatcacgcaatgaagcggaagtcggactgattttcgactgggataattactgggcactggagtacaccagcggcccgtccgaggatttaaaatatgtggatcagattcatcagtactatcagtatttttacaaaaagaatattggtgtggatatgattcctgtggatgcggatttttcaaaatacaagattgttgtggcaccggtgctttatatggtaaaggatggcatgaaagaagcactggagaattttgtgaaaaatggcggtattctgattactacgtttatgagcggaattgtcggacagtcggataatgtatatctgggcggttatccgggaccgctccgcgagatggcgggggtatgggttgaggagattgatgcccttgcaccggaacagaaaaataaggcaaagtttgcagacggcagtacagcagcatgcggtcttctgtgtgatctgatgcatttagagggtgcgaaagcacttgcctcttatgaggaagatttctatgcgggaatgccggcagcatcgaagaatacatacggaaaaggtaccacatattatattgcaacccggtttgaggaagaagggcttgcaaagattttggatcaggcagtccaggaggccggagtttcatccgttatcccggaagaaaccggacttgaagttgtcacacgcgtcagtgataccacgcgattctattttgtcatgaactttacggatgaggagcagattttgccgaagagtctgaccggaaagaaagacatgatcagccaaaagatgacagaacacggaatgaaattgaaaaaatgggatgtccttttactggaagaacatctgtaaacaaaagacagcgccggaatccgggaaagtggatccggtgctgtttttattcccgtttaaagtacaggtttgcatggtatctctcccctcctggtaatcttttcattattttcttgattttatcacagaacagttcatacaacatcgatctatcttgcaaattgttatgcattcttttgattttgcaaaatccttaaagttttcttaaccaggcatgaacagttgaagggacagtggaaattttattcgggattgtgtatactgaaactatcctgacaattgcagattttcagaaaagagggaaatactatgaagaaaagattatacaagagcagtacagataaaaaggtttgtggagtatgtggcggaatcgcaaactattttgacgtagatccgaccgtgattcgtctgatctgggtgatctttacacttgtgggtggcagtggactgattgcatacatcattgcggccattatcatgccggatgaaatgtaacataaaatgatagaaaaccgaaaggagaattaataaatatatgtgggcttacgaaagtgttttttatcagatttatccattaggattttgtggggcaccatttgaaaatgacggtgtgctggaacatagaattgaaaaagtaaatgactggattcctcatattaaaaaattaggggccgatgccatttatttttctccggtatttgagtcggacacacatggatacaataccagagattatacaaagattgatacccgcctgggtacaaatgaggatttcgcaaatgtatgcaacaatctgcacaaagaaggaatccgcgtggtacttgacggtgtattcaaccatgtgggaagagggttctgggcatttgaggatgtcttgaaaaaccgggagcagtccccttatgtgaactggttcggacgcattgcctttgacggaaattccaactacaatgacggcttatggtatgagggctgggaaggaaactatgatctggtcaaactgaacctgcgcaatgaagaggtgatccagcatatcttttctgccatcaaaggatgggtagacgaatttgatattgacggactgcggctggacgtggcatattgtctggatcatgattttgtgcgcagactgcgcagtttctgtaatgaattaaaaccggactttttccttgttggagagacactgcatggggattataaccagttgatgaacgatgaaatgctgcattctgtgacgaactatgagtgttacaagggattgtattccagctttaactgcatgaatatgtttgagatcaatcattccctgcttcgtcagttcggaccggaaaactggacgttatataagggaaaacacctgttgtctttcgtggataatcatgatgtgacccgtgtggcctccattctgaccaataaaaatcatctgccgctgatttacgcgcttgcttttgggatgccgggaatcccatgcgtatattacggaagtgagtggggcgcagaaggacgcaaagaagatggagatccggcacttcgtccatcgtttgagaaaccggagtggaatgatctgacagagtggatttccaaactggcagaggcaaagaaacagtccaaagcactgcagtatggaaactttatatctaaagttctgaccaatggacagtgcgtgtttgaaagagaatgggaaggggaacgcgtctacgttgcgatcaatgcggcagacagtccgttttatgcaggatttgatgccggagcagcggaagccaccgacctgatcaccggagaaaaaattgcattgaatggtggatttgagattccgggatatcgtgcgtttttcctgcgggtgtaatatggtagcggattttgaattaaagaagctggtaaagccattgcaggacgactggtttgatgggcatgcccgcgtactcccctggagagatgatccgaaggcatataaagtatggatttctgagatcatgttacagcagacaagggtagaagccgttaaaccttactttgcacggtttatggaggcacttcccgatgtggaggcgcttgccgcgtgtccggaggatcgttatctgaaactgtgggaaggacttggttactacaaccgtgtccggaatctgcatgccgcagcggaacagattatggagcagtatggcgggacaattccggatacggtggaagaactgcttcgcctgaaaggcatcggaagctatacggcaggagcgatcgcttcgattgcctataaccggccggttccggcggtggacgggaatgtgctgcgggtgatttcccgtgtgtgcgcagatgattcggatatcatgaagcagtcggtccgcagtgcgatggagcgcagcctgcaggcgatgatggaaacggaagtaacgaatggcctgattccgcgcaaatttaaccaggcactgatggagttaggcgcaatggtgtgtgtgccgaatggggcaccgcattgtctggaatgtccatggtatggattctgtgaggcacgtctgcaggataaaattgacacaattccggtgaaaaccagggcaaaagcgcgcagaatcgaggagcgcacggtgtttgtcatccgggacggagaacatgtggcattgcgcaagcggccggcgaaggggcttttagcaggcctgtatgaacttccgaatgtttcgggtatcttagagcagcaggaggctttggaatatgtgaaagaccaggggttttcaccgatacggatacaggcacttgcaccggccagacacattttttcccatgtggagtggcatatgcatgcctatgtggttctcgtagaagaaactacggcaccaaaagaaaatattttatttactgaggcacagaaagcagtggaaaactatgcagttcccagtgctttttccgcgtattggaatgccattaagatggaaatcaaagagtaagcaaaagagctgtccggacaggacagctctttttatgtgttatgagaaaaaattaatctctaaaaaagggaggacctcgcgccttgcggtgcgaggattatgaaaaagaaaaagtttatttcttaggtatgactaaagtatagtttgcaattatgacgccggtgtgtggagtttatgagagatttgtaaataaattatgaacaaaaataacaatggaaaaagattaagcaaatgttaagataatatctctcgactgtttataaattctcatttataataggtctatcaattattttttcagcaggtttgtacgaagggaaaacatatgaaattattaacatttacaataccgtgttacaattcacaggattatatgcgtcactgcattgaatcgattcttccgggaggggaagatgtggagattctgattgtggatgacggatcaaaggatgataccgctgcgattgcagatgaatatgccgaaaaatatccaacgattgtaaaagcaattcatcaggagaacgggggacatggagaagctgtgaatgcgggaatccgcaatgcaaccggtttatattttaaggtagtggacagtgatgactgggtagactggaacgcttatcaggcgattcttgcaaagcttagggagattgcagggggaagtgtggcacttgatatgcttctggcaaattatgtatatgagaaggaaggggcaaaacacaagcgggtcatgcgtcagaccggttttccgaaagatcagatctttacctggagtgatgtgcggcatttttataaaggacattacatactgatgcattccgtgatctatcgtacaaaacttctccgggaatgtggacttgaactgccgaaacatactttttatgtggataacatttatgtatataagccattgccgcatgtgcggacgatgtattatatggatgtggatttttaccgttattttatcggaagagaggatcagtccgtcaatgagaaggtgatgatcagccggattgaccagcagatccgtgtgaataagatcatgattgacgatgtggatctgaataaagtgtccaattataaatgccggcattatatgataaactatctggaaattatcacggttgtcacgacggttatgctgctgcgttccggtacagaagaaaaccttgagaaaaagcgtgaattgtggcgatatatcaaaaacaaggatatcggcctgtttcaccgcctgcgcagaggcattatgggacagaccatgaatctgccgggaagaagcggaagaaaaatttcggttgcggcatatcgtctgtcgcaaaaagtggttggatttaattaaaaaagtttactgtcttgtcacctgtaaagatatgtgctatactgcatgtcaaacactattgaaatatacatacagaaggtggcaaaaatgaaaacagatattctgatcgtgggaagtggatgttccggtttatactgtgcattaaatcttccgcgggagaaacagattacaattattacaaagtcagatgttaagagcagtgattcttaccttgcacagggaggaatctgtatgcttaaggatgacagtgattatgacagttattttgaggatacgatgaaagcgggacattatgaaaatgaccgggaatccgtatcgattatgatccgttcgtcacaggatgtgattcatgacctgatcggatttggcgtggattttgcccgtgacgagaatggcaatcttgcatttaccagagagggagcacattcggacaagcgtatcctttttcatgaggatattacaggagaagaaattacaagcaagctgcttgctgctgcccgcaagtgtccgaatattaccatattggaaaataccaggatggtagatattgtgacgaaggataactgctgttacggaaccgtaatccgcagggaggacggtacaattgaaacggtggaagcggagcataccgtctgggcatgtggaggaatcggaggattatatcgtcattcgaccaatttccgtcatctgaccggagatgcccttgcactttccatcaaacatggaatccgtttgaaagatgtgaattatgtacagattcatccgaccacattctattcgccggacgaagaggaacgcagttttctgatttcggaatctgtccgcggagaaggggcaaagctttatgacaagaatatgaaacggtttgtcaatgagctgctgccgcgtgatctgctggcagaagaaatttataagcagatggcaaaagatggaacagatcatgtatgggaagatctgcgtaccattccaagagaagaattgatggaacatttcccgaatattgtggaacattgccgtgaaatggggtatgatgtaaccaaagaatgcattcctgtggtaccggcacagcattatttcatgggtggggtatgggtagatcacgaaagccatacgtccatggaacgtctgtatgctgtgggagagacggcatgtaacggagtacacggaaaaaaccgtctggcaagtaattctctgctggaaagccttgtatttgcaaaacgggcggcaaagcagatgagtgggcagaaggaaacgatttccacagcaccggaactgtttgcggcaattgaccggagtatctatgcggatgccgcagcactgtcgagccagtatcatgaatatgtacgggaagcgattatcgcggcagatgcaaagatgcagcaggtacaggatgcaaggacaaaagcaacggttgcatttcgcaagcagtgtgcacaggtcggataaaataaaataagaaaatcaggagagagagatgtacgatcaggtaactttaaaattaaatgtagatccatggattctcagtgctttaaaagaagatatcacaagtgaggatgtctccacaaacagtgtcatgcctcatccacaggcaggagaagtggatcttatctgcaaagaagatggcattatatgcgggctacaggtattcgagagagtgtttacacttctcgatgaaaagacaacagttgaatttttggtgcaggatggagcagaagttcataagggacagcttatggcaaaagtgcatggcgatatccggacccttttatgcggagagcgtaccgcactgaattatctgcagcgtatgagcggaattgcaacctacacacattccgtggcagaattattaaaaggaaccggaatcaaacttctggataccagaaagacaacaccaaacaatcgtatttttgaaaaatatgcagtaagaatcggtggtggaaataaccacagatataatctttccgacggggtattgctgaaagataatcatatcggagctgcaggcggagtaaaagaagcgattgctgctgcaaaggagtatgcaccgtttgtccgtaagattgaggtagaagtagaaaatctggatatggtaaaggaagctgtggaggcaggtgcggatattatcatgctggataatatggacaccgatgcgctgaaagaagccatcgcctatattgacggacgggcagagattgaagtttccggaaatgtgacgaaagaaaatattgcaagactgaccggacttggcgtagattatgtttccagtggggcattgacacattcggcaccgattctggatatttctttgaaaaatctgcatccggtagaaaattaaagaaagtgggattccagagatgagcggggaagaaaggcgtggaaaaattatacaggcactgaaaaacagcgacaaagcagtttctgccacgacactggcaaaagaatttgacgtgagcagacaggtcattgtgcaggatgttgcacttcttcgggcaaatggaaaaaatatattttcgaccaaccgggggtatctgatacaggaagatgaggagacaacccgtgtatttaaggtacagcatgaagatgatgaggttgaaaaagaactgacaacgattgtggatctcggaggaaccgttgaggatgtatttgtatatcataaggtatacggagtgcttcgggcagagatgaatatcaaatcccgtatggatatccgcaattatatggaggagatccgttccgggaaatccagtctgctgaaaaatgttacttccggatatcattatcatacggttcgggcggaacgcgtggaaattctggatatgattcaggaggaattgcagaagaaggggctccttgcaaaactacaggactatgaacctgttgatttttggggacagaataattataatgagtaaatgactactattgtgattattgaaaagaagtcagggaaagaataaaaaggagaaggatggaatgagcgacgagtttacaacaaacgaaaacggttcaaaaacaccggaggaaacaaactttcaggattatacggcaccggaaaaagagatcgtacagaatgaaacatcacagatgacgcaggaacagccggagacttcttatggagcaacatcggcagaggaaaatccgcagccggacaatacggcatatgcgtatggacagactgcgtaccagcaggcatatcagagtgaacagtcacagccgaatgcatatcagcaggcatattacggacagacacaggcaaagggaacaggaaccggatttggaattgcctcactggttcttggaattttatctgtttttacatttgcatgctgcatcaattatattctggcagtgcttgcgattattttcggtattgtgcagatggtaaagaacgagaaaaaggggctggcgatcggtggaattattacagcagtgatttcgattgttcttgggattgccgtttcgctttatgctgtaaatattgcggaaaaaatgcaggacccggacagtccgttttatcagtattttgaagagtatgagcagaaactggaagaaggaaagagttctttctagccgggagttataaaaaggagaacctgttttacaggttctcctttattcgtatatcgatgtctgtgtagtggaattcttcgcaggagatgccctcaatcagataacgggagagcaattctaccggaaggtatccctgcttgtatggctgctggcagatggtagcagtgataatgccatcatcgagcagtttttttgtggaaggaacacagtcgtaagtaaagatacgcatggcatcgatccggccgctttcgactgcggcacggcatccgcctgctacaccgccggctgcaaaatacagcacattgatttcggggtgtgaagccagcatttctttgactttttcataactttcattatcatcatcatgattttctattgtttccacgatatgaatacgttcgcccttttcggaaagcgttgaagtgaaaccctcgatacgatcggagtgacagagtacatgtgacgaaccggttacaataccaatatgaatttccccgaatgtcatcagagaaaccagtccggcagcagtctgtccggacaggcggtaattacttccgacatatgcgatcctgcgggaaagaatatccgtgtttacggtaatgaccggaatgttcatttctgtaaggcggtcgatttccgcagcgatatataaagaattaaacggtgcgataactaatccattgatgccttctgcaagaagtgcttccatggcattaaactgttccgtctcatcaaatggaacctgacggataagaacggtgaaattataggcagataattcttttgccttggcatttacgccttcaaggacttcactgaaaaaaggattggaatcgggaaataaaataacaccgattttcagattctttttctgtgcagcaagcatcagtcctgctttgttgggtttatagtttaatttttctgcaatttcacgtacacgggctgcagtattggcattgacggaaccacggttgtttagtacacggtcaaccgtaccgcgagaaacacctgccatttcagcaatctgttttatagtggccatgtcgttcccccttgttgaatttttcctgaataactcttacaagggtagcattgataaggtaaaatgtcaattgaaatacagaaaatgtgtgcgtgcacgacaagagtggggaaagttactgtacgctttccacaaaataagtgcaaccggtttggaagaaatcacgaaaaagagaaaaaatttcggaaaacagttgaaaatatcagcgcatcgttgtaggatatgagtagaaacgtgcacgagcacaaaattaacatttcagaattgagggttatcatgaattacataggaattgatctgggaacttctgctgttaaacttcttttgatggagggcagtggaaaaattttaaagatcgtcagtcgtgaatatccaatctgttttccaaaaccgggatggtcggagcagaatccgtatgactggtttacacagtcaatggatggactgaaggaattgctggatggtacagacaggagtctggttgccggcatcagctttggcggacagatgcatggacttgtagcactggacgataaggatgaagtgattcgtccggcaattctctggaacgacggaaggacgacaaaagagtgcgattatttaaatcaggtaattgggaaggaacgtctttctgcatacacagccaatatttcatttaccggatttactgcaccgaaagtactctggatgaaaaacaatgaaccggagaattttgcaaagattcataaaattatgctgccaaaggattatctggcatttcgcctgagcggcaattacagtacggatgtatcggatgcgtccggaacactgttctttgatgtaaagaatcgctgctggtcagaagaaatgtgtgagatctgcagtattaaaacaagttggcttccaaaagtatacgaaagttatgaggaagttggaacgctgcttccggaactggcgaaggaactcggcgtatcggatcaggtaaaaattgtagccggagccggagacaatgcggcagcagctgtgggaaccggaaccgttggagatggtgcatgtaacatttctttgggaacgagcggaaccgtatttatttcttccgataaattcggagtggacgaaaataatgcactgcattcgttcgaccatgcggatggaagttatcatctgatgggctgcatgctttccgcagcatcctgtaataaatggtggatggatgatattatcggcacaaaggattatggcgcagaacaggaaaatattacgaagcttggagaaaaccatgtatttttccttccatatctgatgggggagcggtctccgcacaatgatccgaatgcaagaggtacttttgtcggtctgaccatggatactaccagagcggatatgacacaggcggtacttgaaggtgtggcatttgccttaagagattcttttgaggtggcacgttcactcggcattcatattgcccgtacccgtatttgcggtggaggagcaaagagtccgctgtggaaaaagattgtggcaaatgtgctcaatattccggtagatattccggaaaatgaacagggaccgtcaatgggtggcgcaatgcttgcagcagtagcttgtggagaatacccgaccgtccgcgatgcagcagaggcaattgtaaaactgaccgatacggtagaaccggaaccggagcttgcagcaaaatatgaagagcgttatcagaagttccgtaagatttatccggcatgcagggatctgtttttggaacttgcaaaataaaatcatatcatcgtatctaacaaaaaattaaaatgattacatacaacaaggaggcaaaatcatgattaatattccagaagtaaaagtaggtatcgttgcagtcagccgtgactgtttcccggagtctctttccgtaaaccgcagaaaggcgctgatcaaagcatatacagacaagtatgatgcaaaggatatttatgagtgtccggtctgcatcgtagagagtgaaattcatatggagcaggcgctggcagatattaaagcagcaggatgcaatgcgctgtgtgtataccttggaaacttcggaccggaaatctccgagaccatgcttgcaaaatattttgatggaccaaagatgtttgttgcagcagcagaggagtcccagaacaatctggttcagggacgtggagatgcatactgcggtatgttaaatgcaagttacaacttaaaacttcgcaatgtcggtgcttacattccggaatatccggttggagatgcagaggattgcgcagatatgattcacgactttttaccgattgcaagagcagtagaaggacttgcaaacttaaaaatcatttcctttggaccaagaccaatgaatttccttgcatgcaatgctccaatccagcagctttataatctgggtgtggaaattgaggaaaattcagagctggatctgtttgaggcattcaacaaccacgcaggagatcagcgtattccggaggttgttgcagatatgaaagcagaactcggtgagggaaacaaaaagccggagattttagagaaacttgcacagtatgaactgacactgcttgactggattgaggcgcacaaaggttcccgcaaatatgttgcaattgcaggaaaatgctggccggcattccagacacagtttggatttgttccgtgctatgtcaacagccgtctgaccggaagaggtattccggtatcctgcgaggtagatatttacggcgcactgagtgagtttatcggcacctgcgtgagcgaggatgctgtcacactgctcgacatcaataactccgttccgaaggatatgtacaaagagtcgatcgagggcaagtttgactatacacataaagatacatttatgggattccattgtggcaatacctgctcaaagaagctggcatcctgtgagatgaaaaaccagatgatcatggcaagaagccttcctgtcgaagtaacaaacggtacccttgagggagatattgcaccgggcgatatcacattctaccgcctgcagtccacttccgacaataagctgcgcgcgtatgtggcacagggagaagtccttccggttgcaacccgttcgttcggaagcattggcgtatttgccattcatgagatgggacgtttctaccgtcacgttctgatcgagaagaattatccgcatcacggagcggttgcattcggacattacggaaaggctctgtttgaggtatttaagtatattggggttccgatggaggacatcaattacaaccagccggcatctctgccttatccgacggagaatccgttcgcataaagaaaaataatatgggaataagcaccagcttgggcctgtagatgtctgcaggttaagctggtgctttttaaatgggagtttcatcccaaagatacccagtgaaacaggaaaactaaaatcatttggcaggtaattcatccggcagcaatacagaaaatgacaacagtacaaagtaaaatttcagattttcaaaaaaagaaaaagtatggtattataaaactggcatcacggatgccggttctataataaaaatctgaggtgattgtacaatgaaacaggaaaattatatacgtggcatgataatgatcattttgtcggcattcttttttgcgtgtatgaatgtgagtgtgcggctggcgggagatctgccgtccgtacagaaaagtttttttcggaatctggtagctgcattttttgcggcaattattcttatcaaaaatcatacagcacctaaggtggaaaaaacacagtggggttcactgtttttacgctgtgcatttgggacacttggaattctttgtaatttctacgcgattgatcacctgctggtggcagatgcttctattttaaataaattgtctcccttttttgcaattattttttccttcctgttattaaaagaaaagataaaaccagctcaggcaatgtgcgttatactggcatttgtcggctgtttgtttgtggtaaaaccggggtttgaaaatgcacatctgatccctgcgcttattggcgtatgcggaggactgggtgcaggaatcgcatatacaatggtgcggaagatgggtacacacggagtaaagggaccggtcattgtgttttatttttcctgcttttcctgtattattgtgataccgtggatcgtatttcattatcagccgatgtcactgcggcagttgttgacgctgctttttgcgggattttttgcagcgggaggacagtttacgatcaccgcagcatatacctatgcacccgctggaaaaatttctatttttgattattcacagattatttttgcaacattacttggatttcttttattcgcggagattccggatcgatacagtctgataggatatggattgatcattctggcttcactgggaaattttctgtataactggaaacacaaagattaaaggagtattcacatgtcgattatttcatttcggtgtcatacaaccattcatctggcaccattggtaaatcaggaaaccattcatcaggatatggataggggacagcagcttatgtcaaggatcaatcagggaatccttagggagataaagcccaaaaacccactggttgaatggtattactggaaggacaaacacacagtttcggatgtcacagagcatagtttgtttaagatggcgcaggggatgctgtcccccgtggaaaatgataattaccggttggaagaggtcgaagaattaaataatgcatgggccgtttatgataaaaaactgaacacattttttgcgtttgacccggcaattacgacattgcaaaaagatgagaagcgaaaccgtgtgctggtagtctgtgaagacaaggaacgtgggctgattgatgttattgaagcgggagctctgctgcttgagtgtctgcgtgcatttacagggatagaagaactttgctttcttccggtcaacccggactactatatatggacaggaacggtgacagggattgacggattgaagatgcgcagtaatggatatgccggtacctggctgcttctgcagagtgaaagccaggtgaagaaattgcggatgcttgcaaccatttacagtatggtttatccgaatctggtagattcggatgaactggcacgcagactggcaaaggaggaagccgcagggcagtgcatccgaagcaggcatgggatcgtgctgtttacggaagagggacttgtgtatatggatggaacaaatccggacaatgactgggaactgaagtatccaatttatgagaatgactgttattatgagatgctgagatttgcttaccggaaacaggtatccggggaactggaaaattactgtgcatggaaagcctggctgaacaggaattttacttgacatctgaaagaatcattactatacttaaaaccaaaggtgaaaaacgaagacgaagacagtaactgtgataggaaagtcaaagagagttggaacaggtgagagccaatacgagtaatatgacagtgaaaatcacttccgagttgcggatcgaaatcccaggagagtagagttcgacgtatttccagcgttatgggaacgaagtatgcaaatcctttttgaatacgggatttaagtacatggtaatcaggtggtataacgtgaccccgcgtcctaattactggacgtggggattttttatttcagaatcataaatgcaggaggaaaatatgtacaacaaagtagataccaatatgaactttgtcgatcgcgaaaaagaaacggaaaaattctggcgcgaaaatgatatcttcaaaaaatccatggagaaccgtaaggaaggcgagacttacacattttatgacggaccgcctacggcaaacggaaaaccacatatcggacatgtagagacacgtacgatcaaggatatgattccgagattccagaccatgaaaggaaagtacgttccacggaaagcaggatgggatacccacggtcttccggtagaaatcgaagtggagaaacttcttggactggatggaaaggatcagatcgaagcatatggtcttgagccattcatcaaaaagtgtaaagaatccgtctggaaatacaaggggatgtgggaagatttctcaaatacggtaggtttctgggctgatatggacaatccatacgttacctatgatgacaatttcattgaatccgagtggtgggcattaaaagagatctggaacaaaggacttctctacaagggattcaagatcgtgccttactgtcctcggtgtgggactccgctttccgcacaggaagttgcacagggatataaattagtaaaagaaaaatctgcagttgtccgttttaaggttgccggagaggatgcgtattttctggcatggaccacaactccgtggacactgccaagtaacgtggcactctgtgtaaacccgaatgatacttatattaaggtaaaagctgtggacggctacacatattatctggcagaggcactggcagacaaggtactttctccactgttatccaaagaggacaaagaggcaggaaagaaagcttacgaagtgctggaaacctgcaagggaaaggatcttgagtacaaagaatatgagccgctttatgcctgtgcaaaggaactggcagataagcagggaaagaaaggattctttgtcacctgtgatacttatgtcaccatgtccgatggtaccggaatcgttcatatcgcaccggcatttggtgaggatgatgccaatgtcggaagaaactatgaccttccgttcgtacagtttgtaaacggaaaaggagagctgaccgaggagacaccgtttgccggtatgtgggtaaaagatgccgatccggaagtattaaaggatttgagtgcaagaaagcagctttttgatgcaccgaagtttgaacatgagtatccacactgctggagatgtgacaagcctctgatctactatgcaagagagtcctggtacatcaaggagaccgcggtaaaggatgatctgatccgaaataataatacggtcaactggattccggaatctatcggttccggccgtttcggaaactggctggagaacattcaggactgggcaatttcccgtaaccgttactggggtaccccacttaatatctgggagtgcgcgtgcggacacagggagtgcatcggaagccgtgccgaactggcagaaaaggctggtgatccaaaggcggcagaggtagaacttcacagaccatacattgacgccgttacgatcaagtgtccggagtgtggtaaggatatgcatcgtgtaccggaagtattagactgctggtttgattccggagcgatgccgtttgcacagcatcattatccatttgaaaacaaagaagtgtttgagcagcagttccctgcaaagtttatctccgaggctgtggatcagaccagaggatggttccattccctgatggcagagtctacactgcttttcaacaaagcaccatatgagaatgttattgtacttggacatgtacaggatgagaatggacagaagatgtccaagtccaagggaaatgcggtggatccgtttgatgcactacagacatacggtgctgatgctatccgctggtatttctatacggcatctgcaccatggattccaaagagattctccggtaagcttgtgctcgaaggtcagcgtaaatttatgggaacgctctggaacacctatgcattcttcgtgctttacgcaaatattgataaatttgatgccacaaaatacaaactggaatatgataaattatcggttatggatagatggcttctttccaagcttaattccgcagtagccggtgtggatgactgtctgtccaattataagattccggaagcagcaaaatatcttcaggagtttgtggatgatatgagtaactggtatgtccgtcgttcccgtgagcgtttctgggcaaagggtatggaacaggataaaatcaatgcctatatgacattgtatacagcactcgttaccatcagcaaggcagcagcaccgatgattccgtttatgacagaggatatttaccgtaatctggtatgctccatcgatccgtcagcaccggaaagtattcatctgtgtgacttcccggttgtggatgaaaagctgatcgacaaggatctggaaactgcaatggatgaggtattaaagatcgttgttatgggacgtgcgtgccggaacagtgccaatatcaaaaaccgtcagccgattggtcagatgtatgtcaaggcaccggaagcactgggtgatttttataaggatatcattgcggatgagctgaatgtgaagaatgtgacgtttacggatgatgtttcttcttataccgattatcagtttaaaccacagcttcgtaccgtgggtccgaaatatggaaaatatttaaaacagattcaggctgtcctgtcagaacttgacggaaatgctgcaatgaaagaattaaaagagaacggatgtctgaaacttgacagtgtaagttccgaggttgtattattggaagaggatctgctgattacgatgacacaggcagaaggctttgtgaccgagggggataacaatgtgacagttgttatggatacaagactgactccggaactgattgaagaaggttttgtgcgtgagctgatcagtaagattcagacgatgcgtaaagaagcaggttttgaagttatggatcatattgctgtttcttatacagcagatgagaaggtaactggtattttcaataaatatggagaaaagatccagacagaggtacttgcaaatgctatcactgcaggcacacttgccggatatcagaaagaatggagcattaacggtgagaaggttacgctggcagtggaaaaacaatagtgtcacgcaaaccagacacagaggaggacttttgatgcgagacaaagtgtttagtaaaaaggagtttattgattccgtgacagaaaatgtcaagacgatgtatcgtaagacattgaaagaagcgacacagcaggagatttatcaggctgtttcactggctgtcaaggatgttgtcatggatgaatggatggcaacacagcaggtcattgaaaaagatgaccctaagatattgtattatatgtccatggagtttctgatgggcagggcactgggaaataatctgattaatctgggggcttatggggaagtaaaagaagcacttgaagagattggactggatttaagtgtcattgaagaccaggagccggatccggctcttggaaatggcggacttggccggctggcagcatgttttatggattctcttgctactctgggctatgccgcatatggatgtggaatccgttatcgctacggtatgttcaagcagcagattattgatggatttcaggtcgaagtaccggataactggttaaaggatggatatccgtttgaacttcgcagaccggaatactgctacgagatcaagtttggtggtcatgtggaagaaaccgcaggggaggacggaaatctgcactttgagcaggtagggtatcagtctgttcttgcaattccttatgatatgccgatcgttggctacggcaaccatgtggtagattccctgatgatctgggatgcacagccgaaggaagagttttcactggattcctttgaccgtggagattacgatcaggcagtggagcaggaaaatcttgcccgcaacctggtagaggtgttgtatccgaacgacaatcacgtaaaaggaaaggaactgcgcttaaaacagcagtatttctttgtttccgcaagtatccagcgtgcgctggagcgttttaagaaacatcacaatgatctgcatgatctgccaaagaaggtaacgttccagatgaatgatacccatccgacggttgctgttgcagaactgatgcgaatccttctggatgaggaaggcatgtcatgggatgaggcatgggagatcacaacacactgtgtagcttataccaaccataccatcatggcagaggcacttgaaaagtggccgatcgacatcttccagagactgcttccgcgtgtatatcagatcgtggatgagatcaaccgccgttttgtagaagagatccgtgcaaaatatccggataatgaggagaaggtgcgcaagatggcaattctctacgacggacaggtgaagatggcaaatcttgcgattgttgccggatattctgtcaacggtgtggcaagactgcatacagagattcttgagaagcaggaacttcgtgatttctatgaactgtttccggagaaatttaacaataaaaccaacggtatcacacagagacgtttccttgcacatggaaatccactgcttgcagactgggtaacaaagcatgtcggaaaagactggatcacaagtcttgcgaaggtcgaggatctgacaaaatatgcaaccgatccgaaagcacagcaggaatttctggagatcaaaaagcagaataagatccgtctggcaaaatatatcaaggagcacaatggtatcgaagtcgatccgaattctatctttgatgtacaggttaagagactgcatgagtataagagacagcttatgaatatcctgcatgtgatgtatctgtacaaccagatcaaggaaaatccgggcatggatttctatccgagaacttttatcttcggagcaaaggctgcagccggatatcgtacggcaaagaagaccattaagctgattaacactgttgcggatgtaatcaataatgatccatccatcaacggaaagatcaaggttgtgttcattgaggactaccgtgtatccattgcagagtggatttttgcggcagcagatgtcagcgaacagatttccacagcaagtaaagaggcatccggaaccggaaacatgaagtttatgttaaatggtgcgattacacttggaaccatggacggagcgaatgttgagatgtacgaggaagtcggtgcagacaatatctttatctttggtatgagcgcagatgaggttatcgcacatgagcagcatcatgattacaacccatatgatatctacaacaacgatgaggatatcaggaaagttgtcaaccagctggtagacggaacatactcccacaatgaccgtgaactgttccgtgaactgtacaactcactgttaaacccacagcagggacaggtggcagaccgctactttatccttgcagatttccgtgcatatgcaaatgcacagaagaagatcggtgcttattacaccaacaagagtgcgtgggcaaagtctgcaattttaaatattgcgcacagtggtaaattctcttctgacagaaccattcaggaatatgtcgatgatatctggaaactggataagattgaagtgaatacggaaggctgttaatcgcttggatggcagtaaaaaaggcgggaaacccgatggggatcccgccttttttagtctgcgaatcttctatatggaagattttttagaacgtgtcaatattttctgcatttttactcatacaaaaacaatacaaatatattgaaatacaaatgatttgacattataatagagaaaataaatggaagcgaggtagtgaatatggctagtacaattcaggtcagagtagaagacgagttaaagcgtaaatcagatgctctatttaaggatttgggtacagatacaacaacagcaatcagaatgtttttaacacaggctgttgccacaaatggatttccttttgaaataaaaagacagatagaatcaaatccatatgcaccgatgttggagaaagagatgcttgcaaaattgaaaaagtccagggaagagggaatgttcagggatgcagatcatgtgatttctgatatgaggtcaaagtatggattataagatcgttttgatgaagcatgcggaggaagatcttgatagatttattgcgtatcttttgtttgaaaagaaaagtgagcaggctgcaagaaatttattaaatgactttgaagcaacaaaaacaagtctgtcaaatgttgccgggagtctgaaactttgtgataatctaaaactaaaagaattaggatatcgaagaatcaattttttatcccatcgatattttatgctttatcgtattgaaaacgatacggtttatgtggataatatttttcatgaattgcaagactgcgaaaataaaatgaattaaatacaatattcggtgggctttgtcttctttcaggaaagaaatgtatgcagttccttcagacgtgcattaaaatcagaaatccccagatcatacaattcctgttccaacttttcatcgcgcgcgtaagtactcatctttaactctttcgaaggtgcaaaaataagcgcttccccggcggtttcgtgttttttaacatcggcaatattctggcggtacatcagatgccggttgtcgagggcttttatggtctgtggatatttgcgcagggcatgccggtaaatgtgccggaagccttccggttgctttacaaagctgcgcggtttgctcaagatcacgactacacggtcgcatccttttgcaaatgcgcgcataatcggaacagaatcggataatccgccatcaaaatatgtctgatccttaaaagaaatcggacgacacatcacaggcagggcacagcttgccataatggcacggtagtcatcctgtttcatatcgtctttggtaaaataaacgggctttccagttgcggcatctgttgccacgagttcaaactcggccggattttccacgatggcaggataatcgatcgggtcggctccgtcagaattggtcaatgtctgataaatatattgaagaccgaaaaactgtccggtgcgcagcagatttttgacacccatataaccgggctcatgcagatggtctacgtaaaatcgaaggtttcgtccgcgctgtccggcaagatagcttgccacatttgcagatccggccgatacgccgatgcagtaatcgaatgtaatgtgttcatctaaaaagcggtcaagaatgcctgcgctgtaggcgcatttcatgccgccgccttctactacaagtcctgtcttcatgtctgggatactccttttgcctgaaattagcattattgtagcactttttttctttttgtcaaatttttaacaatatgtgtttgtttttctgcaacagtttaagtggtgccgggacatttgaaaaaagtgattggctgacaattccttagaatgggacagcccggaaggcagagatattggattttttgatatgagatatgatttgacgaatggggagattgaggaaggtatgggataatatttaaaaataataatatcctttcgtgaagaaagtttcataaaagctaagaaagttttcaataaagttgtggaatttgtttctcatggaagttcatctcctttctgtttacgctgtcattataaaacacgaaggggtatattacttgccaaaataaaaaaataaatggacaaaaattgcaaaaagcagagattccaatcctctgctttttgcatttttttatatgtttttacgatattcagaaggtgacagcccttttgccttttgaaaaatccggctgaaatatagtggattatcataaccaacaatttgtgcgatctcattgatattatattgtgtattttgaagcagtgcttcggcattatatattcttttttgcagaatgaattgctttggcgtgattccggcatataatctgaaattacggataaaccaactggcactgacatgattttgttcagcatagtcatcaatgctgattggttcattgtaatgctcactgaaataagaaattgctttgtctatttcctcagcagcatgggagttcactgtgttgacagaaaatttaaagtggcgctgtagttttataaaaatttgtcttaaatacatttcaagcatttcaggatagctatcctgacacatttgtaattcttttatcatggcacggaaaagatactgatattccgaaccggaaccacagtggaacacccttttatcatttgtcaatccataggaacggagcagattggtgacattgtttcctgtaaaatgaacccagtaaacttccacctggtctttggcatagtattcatatttctggggttctcttgggcggtataaaaccatatgaccagcatgaacaatcgtttcttcctcatcgttgtcaaaatgaaaatgagctttcccagcagcaataaagatcaactgaaaatcaactctgccacgtggtctccaggtgggaagtttagggtgcgtatataacttgtaagtcccacacatggttacgacaagtggcttggatttatcttttctgtcaattgttgagttattcagatatgcattattggtatacatttgaggcccccatatgataattgaaaaatgttcatgaaataataatctgaaatacataaatttctgtttggctcatgatgcaattttatcattttatgcatgtcttgtccatttagatttcaaacgtttgaaataatggtattttttgtataaattaacgttctggtaaatgaaagtcaataaaagtacatgtcaaaaataacaaaagaaaggaataaagaaaatggtttttgttaattatactgttttgtgcatgttttgtgtaatttatgatatggttttttgacatcagtttttatatactatctataacaaagttgtgggaacaaaaataaggatcatcgaaaggagcagtttcacatggaagaaaagaaatacctgaaatggtataacaaggtggggtatggaaccggagatctggcaggaaatgtcgtgtatgcatttctttcctcatttgtaatgttgtatctgacaaatacggtagggttaaatccgggagttgtcggaaccttgatcatggtatcaaaattattcgatggtgtcagtgatatgttttttggtacattgattgacaaaacaaagagcagacttggaaaagcaagaccgtggatgctttatgcatatattggctgtgcggtaacgcttgtggcgaactttgcaataccggaaagtcttggaaaaacagcacagtatgcatggttttttattgcatatactttgctgaatgcagtattttttactgcaaacaatattgcctatgcatcactggttacgttttgtacaaaaaatagcaaagaacgggtagaaatgggatcgttccgttttatttttgcgtttttaacaagtctgatcattcaatctatcaccgttcagtttgtaagaatggcaggcggtggagctgctgcatggagaaccgtagcaatcatatacgcagtaatcggactgattgtaaacacaatttccgtattctcaatcaaagaacttccggaggaagaattaaaggcaggcagagaacagacagaagaaaaatatggtttgattgaagctgcaaaacttttattttccaataaatattatcttatgatttgtgttacttatatttgtcagcagatctattctgctatgttaaatatgggtatttactatatgatttatgttttgaaaaatgaaaatttatattcggtcttttcctgggcaattaatatccctgtcatcattgcaatgtgtattacacctatgcttgtggaaaagatgaagggattatatcgaatgaatcttgcaggatacattcttggaacagccggccgtgtcggcgttatttttgcaggctatatgggaagtgttccgctgatgcttgcttttaccgcaatcgcagcacttggaatggcaccatggcagggagatatgggagctgttgtggcaagctgttcagaatacacatacctgacaaaacataaacacattgatggaaccatgtattcctgtacatcctttggaaccaaaatcgggggtggaatcggagttgccctctgcggatggctgcttgatgcaagcggatttgtcaaggaagcggccgtgcagcctgcatcctgcatgaatatgcttcacattatgtatttatggattccaatgatcctgtcattagtcattacatttattatgtcagaaatgaatgtggaagcagcgaaccggcgacttagagaacagatggaggagtgttgacgtggaatatagtggaatgaaagaaattgtatggggtgtatggaaagagagggaaaatatgaacgctgatatgaaatggctggacaatccggaagtgtttaaggtaaatcaattggaaccacatagtgatcattgctattatctggattattcagacatgaaaaaagaaaaaaatccattattacagtcattaaatggtcaatgggagtttgcttacagcaaaaatgtgatggaaagacctgttgatttttataaggaaacatttgatgcatccggattcgataaaattatggttcccggacatattgaactggctggatatgataaaatacgttacatcaacacgatgtatccgtgggaaggaaaagagtaccacagaggagcctatagcatggaggcaaccggagcagaagaaggaatgttttcagaggcacagtacaatccggtaggctcttatatcaaatactttgatttggataagaacatgtgtggaaaaagaatccatatatgcttcgaaggtgtagaagaggctatgtatctgtggctgaatggtcagtttatagggtatgcagaggacagcttcacaccttctgagtttgatctgacaccatatattaaggaaaagggaaatgttctggcagtgcaggtacataagatgagcacggcggcatttttagaggatcaggactttttcagattttttggaattttcagaaatgttacgttgaaggcaattccggatgttcatctggaggatgtatggttcaaacctgtgttaaatcaagataatgaaagcggaagcgtatctgtcagcatgaaggtatctgctcctgacagtcagcatgtaactgcatgctttattttaaaagacagggaggaaaatgtattagtggagaaatccatacagttaacgaaagaaaacggccatatggaaggcacgatttgtgttgatttggaaaatgtcaaactgtgggataatcataatccatatttatatcatgcttatgttgagcttaaagcagaggatggttctctggcagaggtaattccttatgatatcggtttcagaagaatagagattatagataaagtgatttatctgaatggaaaacgacttgttatcacaggagtaaaccgtcatgaatggaatgcaaaaacaggaagatgcattggtgtggaagatatgaaagcagacatatcctgtatgctcaggaacaatattaattctgttcgtacctgccactatcctgaccagataccatggtactatatgtgcgacaatgcaggtatttatgtgatggcagaaacaaatctggaaagccatggttcattccagaagctgggggcaatcgagccatcgtgtaatgtaccggggtcttttccacagtggagagaagctgtgcttgatcgtgcaaaaaacaattttgaaacttttaaaaatcatacgtccatccttttctggtcattaggaaatgaatcctatgcaggagacgacattgaggcaatgaatgtttattttgccgaaaagcaggatggaagattagttcattatgaaagctcttattataatagggcatatgaggatactatttctgattttgagaccagaatgtatgcaaaaccggaggatgtagaggaatacttgaataacagtccgaagaaaccatatattttatgcgaattcatgcatgatatgggtaattccatgggaggacttggttcttatatgaagctgattgacaaatatgataggtatcatggcggatttatatgggattttattgatcaggcaattatggtaaaagatccggtgacaggaaaagatgttttacgctatggtggagattttgatgataaaccggcagactatgaattctcagcaaatggaattgtatttgctgacaggaaagaaaaaccggcaatgcaggaagtgaggtattactatggcttatacagataaattaagagtggtctatggtgactatacattaggtgtacatggtgaaggctttgattatattttctcttatgcacagggtggactggaatctatcgttaaaaatggatatgagtggctgtatcgttgcccaaagcctactttctggagagcgttgacagataatgacagaggaagcaagttccatattaaaagcggaagctggctttcggcagatatgtttattgactgtaagggaatacaggtgattatggatggcaaggagcaaaaacaatacgcacctgataataacagctatggcggtgatgtttatgcggatgaaattatcgtaacatacacatacgagaccataaccactccggagacaacggttcttgtaagctataccgttgatgtatctggaaagattcgcgtggatgtacattatcatggggtacagggacttccagaattacctgtatttggaatgagatttatcatgccaacactggcagacaaatatttatataagggactctccggggaaacatatcctgacagaaaagcgggggcaaaagaaggaatctatgagattgaagacctgagtcttacacaatatcttgttccgcaggaatgtggtatgagaatggatacagagtggcttgagattacaagacatacggctcttgataacagccggacagacagttcatcacagatactgcgcattgaaaagaatggcgaaaaatttgcattttcctgtctgccttatacagcatctgagattgaaaatgcctttcaccacgaagaactgccaccggcaagaagaaccgttttatgtgtatatggtgcagtaagaggtgttggaggtattgacagctggggaactgatgtggaagaggaatatcgtatcagtgcggaagatgatatagattattcatttaccatctgttaaacgtgggatgaggatatgaagtttaagattaccaaagactggataaagagtttttttgtaatgatcattgcagttattgtcatgggaatgtgtgtttcgcttttggtgatgtgtgatatgggagcagatccctgttcagcaatgaattatggaatttcgcataagcttgggatgagttttgggaattatcagctcctttccaatattgttctgctgattatagtaattatttttgataagaagcttattggtacaggaacgcttgggaacatgatattggttggttattcggcagattttttcacatggatatggaaagaagtctgccatatacaggcacagcttaatctggggattagaattgttattttgattcctgcactcatactgtttattctggcagcagctatatatatgcaaagtggacatggaacagcaccatatgatgcagtatcctttttaatcagtgaaaaaattgaaaagcattctgggaaaaatatgtttcggattgtacggattgtatatgatctggcagcaaccggtatcggtgttatagccggaggtgaagttggtgtgataacgatattgatggtgattttgctgggacctaccgtggatttggtcggacgaataatgaaaacaagaaggggagtggagaaacagggagtataaataaaaggagttgcttgtaagtgctattggtatatgaaaacagaaatacaggagtatctgcggagtggaagaagccagtacatgtgccgccgcatctacatgaggcaatagaagtagtgtatgtaacggatggagaaatagaacttggagtgggacaggaattgttccatatggatgaaggggattttgcagttgtgtttccaaatgtaatacatcattatcaggtgtttggggaaaaagaaaacaaggtaatattcctgtaccttgaaccaacactgtttccttcctattacagggaattgcagatatacagcccaaagaatccggttgtgaaaaaagagcaggtgcatccggatgtggtaaatgccataaaatatctgaccggaataacagagggggatccccggatgatacaggcatatgcacagatgatccttgcacatgttttcacaacaatgccaatgatggataaaagtgcggtagggagtgatgacctgatttataatgcggtagaatacgtggccaaaaattttagggaaaacatcagccttgaaaaaatggcatatgaattgtgtgtaagtaaatatgtgttgtcaagaatgtttgcaaaaacctttcactgtaattttagtaaatatgtgaatggagtccggttaaattatgcagttgcggcactggaaaacacaatggattccattacaaatatatgtcttgattgtggatttgaaagtcaaagaacttttaaccgcgtgtttaaggaaagatataaaatcacacctagagaatatcgaaaaaggataattatgtaaagcgatgtaatgctgccggtattggggcggtgatgacaataatagttatgaatggcatccggaattagaaaaagttgtggtgtttcctgagaaagagaaaacttgtcataacagccgaaaatagatataatagttacacatgtgggataccacaatgaacgaaaaaggcgaggaaacaatcatggcatttgtacatctgcatacacatacggaatattcattactcgatggttccaacaaaataaaagaatatgtaagccgtgtgaaagaactggggatgaacagtgccgcgatcactgaccatggcaatatgtatggtgtggtggaattttataaaaccgcaaaggcagcagatattaatccggtgattggctgtgagatctatgtggcgccgaattcccggtttgaccgcgagaccagccatggcgaggaccggtattaccatctgatcctgcttgcggaaaacaataccggttatgcgaaccttatgaagatcgtctccatcgggtttacggaagggtattattaccggccacgtgtggattttgagacgctgcagaaataccatgagggattgatctgcctgtcggcgtgtctggcgggagaagtgccgcgctatattgtgcgtggattttatgaagaggcaaaaggcattgcaaaaaaataccaggactgttttggaaaagacaattattttctggaattacaggatcatggcatcccggaccagaagacggtcaaccaggggcttcttcggatcagtcaggaactggacattccccttgtctgcacgaacgatatccactatacctatgaaacggatgtggaggcacacgatgtccttctctgtatccagaccggtaaaaagattacggatgaagaccgtatgcgttacgagggcggacagtttttcgtaaaaagcgaggagcagatgcggagtttgtttccgtatgcaaaagaagccgcagacaacacgcagaaaatcgcagaccgctgccatgtcacactcgaatttggcaattaccagattccaaaatatgcaccaccggaagggtatgatagtgcgtggacgtttttaaatgcgctgtgtgagaagggatttcaagaaaaatataccgacaatccggcgtatgacaaggcgcagtgtgcaaagatccatgaagatatggaatacgagcttggcatcatccagaagatgggatttgtcgagtatattttaattgtctgggattatatcaactgggcgaaaacgcatgactgctgggtgggaccggggcgtggttccggtgcgggcagccgcgtgtgctactgtacgggaattacgaatattgatccggttaaatacaacctgctgtttgagcgattcttaaacccggagcgtgtgtctatgcccgatatcgatgtggattttgagtatgcggagcgttcccgcgtgatagagtatgtcacagaaaagtatggcaaggattctgtgacacagatcacgacctttggtacgatggcagcccgcggagtcattaaggcagtcggaaaagcactggattttccctatgcggagatggaccgtgtggcaaaaatggtgccgatggaattaaacatcacgattgaccgtgccctgcaggtcaatccggaattccgcagtctctacgagggagatgcgcggatgcatgaactgatcgatatggcaaagcgtctggaaggactgccgaaccatacttctgtgcatgcggcaggtgttgtgatctatccgggtgaggcgagcaattatgtgccgctgggacgtgccagtgacggcacgccgacagcagagtacaacatggtacagcttgaggagctgggactccttaaaatggatttcttaggacttcgtacccttactgtattaaaagatgcggtaaagaatgtaaaagcatccaaggggatcgatattgacattgaccatatcgatttaaacgataaaaaggtgcttgattttattggaaccggacgcacggagggcgtgttccagcttgagtctgcgggcatgcagaacttcatgaaagagttaaaaccacagaatttcgaggatatcgttgccggaatttccctgtaccgtccgggacctatggattttattccaaactacatcaggggaaagaataatgcagacaccgttacttacgtgacgccggaattgcagccgatccttgagccaacgtatggatgtatcgtttatcaggagcaggtgatgcagatcgtacagcagcttgcggggtatacgatgggacaggcggacaacatccgccgcgccatgagcaaaaaaaagcagtatgtcatcgatgcggagcggcagagtttcgtctacggagattcagagcgcggcatcaggggctgtgtggcaaatggcattgatgagaaagcggcaaacagtatttacgattccatggtggattttgcaaagtatgcgtttaacaaatcccatgcggcagcctatgcggtcatcagtgtgcagaccgcgtggctgaagttttactatccggtggaatttatggcagcacttatgacgtccgtgattgacaattcggcaaaagccgcggagtatctgctgcattgtaaggaactcggtatttccgtgctcccgccggatatcaatgtgggacagggagaattcacggcagagggaaatgccgtgcgctatggtctgtatgccattaaatccctgggacgtccggtgattgacagcatcatcggggaacgcaaaaaaggtggttcataccgcaccctgcaggattttattgaacgtacggtgcagcgggacatcaacaaacgtgcgatcgagaatctgatcaaggcaggtgcctgtgatgggcttgacggtaaccggcatcagatgtccattgtctatacgtccattgtagatgatgtcgtgcgacggaaaaagaccgggctggaaggacagatgagcctgtttgattttgtcggggaggaagataaaaaggactacgaagtccattatccaaatgtggaggagttcccgaaggaagtgctgcttggctttgaaaaagaagtgcttgggatttatttaagcgggcatccgctggaagattaccttggtaaaatgaagaaaaatgtcacggcaaatgcagcggattttgtcagggaagaggaaagcggcacaattcgtgtgacagataatatgcatgtggttgtgggtggcatgattgcagcaaaaaccgttaaatatacaaggaataatcaggcaatggcatttctgacagtggaggatctgaccggttctgtggaaattattgtattcccaaaagattatgagagatacaaccgctttttgaatgatgaggagaagattttcgtagtcggacacgcaacggtggaggaggaacaggacggaaaagtgatctgcgagcggatcgttccgtttgacgataccagaaaggaactctggctgcagtttccgacaaagagtgatttttctgcgaaagaacagcaggtgtatgagattctccgggattcggacggaaatgatgaagtggtaatttatatatcggatgtcaaggcatttaaaagattgccaagaaaccgtgcggttggtacaaattctgtactcttggcacgtttgacagaatttctgggcgaaaaaaatgtaaaagttgtagaaaaaggcattgaaaatcgcgcgtaataagtatagaataaaacagattaaagaatttcattttaattttaataaatggaggatttcacaatggcgaaagagattaacacaattggtgtactgaccagtggaggagatgccccgggaatgaacgctgcaatccgtgcagttgtccgtcaggctttatccaaaggaaagaaagtgaaaggaatcaagcgtggatacgctggattattaaacgaagaaattattgacatgaacggacagagcgtttcagatacaatctctcgtggtggtactattttacagactgcccgttgtatggagtttaccacaccggaaggacagcagaaaggtgcggagatctgtaagaagcatggaattgatgcaattgtagttatcggtggagatggttctttcaagggtgcacagaagcttgctgcactgggaatcaataccattggtcttccgggaaccattgatctggatattgcatgtactgattataccattggttttgacaccgctgttaatacagccatggaagcgattgataaggtccgtgatacttctacatctcatgagagatgctcaattattgaggttatgggtcgtggagccggacatatcgcattatggtgcggtcttgcaaacggtgctgaggagattcttcttccggaaaaatatgattatgatgagcagcgtctgattgatcaggtagtcaacgcaagaaagaacggaaagcagcactatattattgtaaatgctgagggtatcggtcattcacagagcatggcaaagcgtatcgaggaagcgacaggtgttgagacacgcgcaacgattctcggacatatgcagcgtggtggaagcccgacatgtaaggaccgtgtctatgcaaccacaatgggtgcaatggcagttgaccttctctgcgaaggaaagagcaaccgtgtcattggacataagggtggcaagtttgtagatttcgacattgatgaagctctggctatgaagaaagatgtcgatgagtacatgtacgaaatctcaaagacactggtatagttattccttttattggagaacatagtgcggcagggaattctctctgccgcatttttaggtttgaaatcaatgggattttcaaggagacgggcaatggacaacaccaaggaaatgctcacactggcagtagaaatcggggacgcgatgctgcggtgcggagcagaaatttaccgggtggaagattctgtgatacgcatattggaagcttttggtctggatgattttgatgcttatgttttatccaacggaatttttgcaagtgcaaatgagagcagggaggatgcctgcagtgtggtaaggtatgttcctctttcggcaacccatctggggaaactcgctgctttaaatcagctgacccgtgatatctgtaatcataaatgttcgatttcggaggcatcggagcggttgaaacagtgcaaaaaaattccggtttatgcgaatgcggtacagttactggcatgtggaatcggttgtgcagcgtttaccttcatgtttggagggcatttgccggaagcactgtatgcattttttgtagggctgatagagcagctggcattgtttgtgtgccggaagcgtaaagtttccagatttttaacgaatgtatatgtcagtctgctgatctctttgcttagtctgccagcggccgcgggtgtaatacctgttttgcatgacaaagtggtgatcggggcaattatgccgttagtacctggaattgcactgacaacatccattcgtgatttttataatggcgattatttgtccggaacgatccatctgattgatgcacttcttacggcactttgcattgcagtgggcattgcactgccgattctgttgttgcgatatggaggaaatttaccggtatgagttatgtgcttcagttttttattgcagcgattgccacggttacatttgccattttgtttgcggcaccgaaaaaggaactggttttctgtggcgtatcaggcgggcttgcctggctggtttattttattttgtacaggcagtcggggaatgtggttttgggcagtctggtggcaacctttgttttgacaattttaagtcgtattctggcagtagcaagatgcaatcctgccacgatttatctggtatctgggattttcccactggttccgggagccggtatctattatacggcatattatctgatatccggaatgccggcaaaatgctcggcaaaagggctggaaacttttgagattgccctggccattgtatttgggattatttttggcttctcgattccggaaacactgtttcataaaaggaaacagtaagtaatgggaaaggattgtacggatgatatgattacaagcagtgcaaatcagcagatgaaacatctgtcacagctgatgaaaagggcgaaagaacgaaaaaaagaacaggtctttgttgtggaaggaataaagatgtttcaggaagcaccggcggatacggtggtgtctgtctacgtgtcggaaagttttctggaaaaaccggaacatgaaaaatgtctgcagggataccggtatgaggtcgtgagtgatgcggtattccgggaaatttcggatacacagactccgcagggaatccttgcgattgtccgcatgccgaagtatgatctgcccgatcttttgcagggggatcacacgcatcttttaattcttgagagcgtgcaggatccgggaaatcttggaacgatggtgcgcaccggagagggtgccggcatcacgggaattataatgaataaaacgacggtggatctgtttaacccgaaaaccatacgctcgacgatgggaagtatctaccgtgttccgtacctgatcacggagcatctgccggatctgcttgatgagctgcataaggagaatatccgattgtatgcggcacatttaaaaggagatacatattatgatgcctttgattttaccggggcatgtggcttcctgattggaaatgaggggaacggtctgtctgatgaaattgcagagtgtgcggattgctatctgaagattcccatggagggaaaggtggagtcgctgaatgcagccgtttccgcagcacttttgatgtatgaatgtaagagacagcggggagagcacaatgaaaatatggtttaaaatctgggaaaacacacacttattaaaatcggaaaccatagaagatgatacggaggatacacgtacacataagatttttcatgcacttgaagaagtctgtctgaagtgggatctgggaaaaccgatctggtttgatgcgaatatagcggaatttcaaaggcatgcgcgaacgaggtttggcaaggacaattttgtggaggaaacagaatttgattatctggagatacaggtgatagacgaagattaaaaaaatattaaatttgttgctttctgcgtacagaacgtgtttcttgtgatatgataataccatatgggaaagcacgttaatacatgtgtgaggtctgctttcgcatttatgaaaggaatgtctgccattgtggcaggaaagaggaggaatgacatgggaacatcgcagatgctgggagaagatattgatagttgggaaactatgatgtttttatataattcagcactgaaagaggtcggaacaaaacttgagattttaaatgacgagtttgttcatatacataagtacaatccgattgaatatattaagtcaaggattaaaacaccggaaagtattgtaaaaaaattaaagcgtgacggatatgagagtacgatcgagaatatgagaaattatattaacgatattgcaggaatccgtattgtctgctcgtttacttcggatatttaccgtcttgcagagatgatcggaaaacagaatgacctgaccgtgatctgtgtaaaagactatatcaaaaatccgaaagtcagcggttacaagagtttccatatgcacgtgacggttcctatctttttatcggaccgtgtggttgatacaaaggtggaaatccagatccgcaccattgcaatggatttctgggcaagtctggagcacaagatttattataaatttgaggggcatgccccggaatatatcagccgggatctgcgtgcctgtgcagaaattgtttcaaacctcgatgcaaagatgctgcagctgaatgaagcaattttagaagaaaaggaaaaagaggaacagaagaaaaaggaagaatagttacgaagaataaaactattacggaacagtcggaaagaagggaatgctatggtaccttccattgcacgtcagagtgtgattttaaaatgtaatatgcaaaaatccgtgatgcttggaaactacgaatttttctatgctgcgggactgatgagaaaattatacaacatagagatccggacagatatggaaccggaacagattctggaagcgattctgcagatgcaggataatctggccccgcagagtgaacaggaaaaatatttgatacagatcataaagaattatgagccgtcagcggatcatgatgcacagatggatgagctgtttgcctggggagaacaggaacctgacatgtggcaggtcacgacatcgttccatccggttataaggtaactatgagcgatagttaccttatatttttgcaattttcgtacatactacaagtaattttaaaagaaagatgaggatgtatgaaatgagtaagatgactctggaacaggaagaagtgcgcaatcaggagtataatgagtatgtcgaacagatgacaccgaaacataatctgtgggcaaatatgggaaaagcctttttgctagggggaggtatctgcctgttgggacagattattttacagattgcagccggggtattcggacttaaggcagaggatgccgctctttggtgcagtttacttcttgttcttctttcggtgatcctgacgagctgtaatgtatatgggattcttgccaactggggaggcgcaggggcattggttccgattaccggatttgcaaatggcgtgtgtgcttctgcggtggaattccagaaagagggacaggtatttggtatcggatgccagatttttaagattgccggtccggtgattttgtatggaattttttcaagctgggtgctgggatttatttactggctattttaaattcgctggtatctatgtcgataaaatccatgtaaaagataccagtgaggtatctatatactgaaaatttaatgttcagataccggaaagtctctatggatcaaaaattacgtcttcagataccgcttttttgggaaaaacggtatctggagacgtaattttttctatataggtgacatttgaaaattttaagcattaaaatttcgggaaaacgtcaccttagactgtaatttttcatccatagataccgtgttttatcatcaagtgatttaacaggatgcttttcaattatattttttcaaccaccgtcatatagagaaaacttatgttttttttcgcgtacttttcctgaatttgcacatactaccatggaaaataggtaatcaaagaggtgcagaatgaaagaaaaacagcaaatcgtttatctgaaggccgatcgaaacagtgtctgccatgatccgaaaataaagatacagaatgtgatgtccgtacagtgtgcagatcctgccatctgtgccggaataaaaaataaaacactgtacacctttcagaaaaatgatggaacgaaaaaagaaggaaaaaagaaaaaacgaatggaagttttttctatgctgaaggtcatcgaactgatacagaccgattatccggaggtagaagtggtcagcattggagaacaggattttgtagtgcaattgttagacgtaccaatggcaccgaaatggctggagacgcttaaagttgttgtgatggttgtagtaatctttcttggagcggcatttacgattatggcatttaacaatgacgtgtccgtgggggaagtgttcgaccggttttatcagcaggtgatgggaaaagaaaaaccgaaagtatcagaaatcgaaattttttactgtctgggactggcagtgggaattttggtattttttaaccatatcggaaagaaaaaaatcacttcagatccgacaccgattcaggttgagatgcgaaagtatgaacaggatgtcgatatgacgtttatagagaacgcgggaagaaaggggcatgaacacgatgtttcttagacacatttttatggcgggccttgcgacagcctgcggcattgcggtttctgccggaacgtttgcgtttcttctggtgatcggggtcattccgcgcatgatcaaacgctgcaattttggagaacggatactgatgattgaaaatacggttatactgggggtattgaccggtgccgtattttctgtgatggagtggaaggcgcagctgccgtatccgtggctggcgcatgtcattttgggcgcttatggaactgcagcgggaatttttgtgggatgtactgcggtggcactggcagaaatattaaatacttttccgatcctgttccggcgtctgtatatcaaccgtggactcagtggtgttatgattgccatggcactggggaaaatggctggttctttttattatttcttttttggttacgggcttccaaaatattggtaaatccatattttctaattgcaatcttctttgtgtctggcgtataataaaaggtacgattagttacagactaaaggagaggattttaaatgggcagatatgcattggatatggaaaaatatgcagatttggcaaggactgcatctgcggagggatgcgtgttattgaaaaatgacaacagtaccctgccacttaaaaaaggagataaagttgctgtatttgggcgcatggcgtttcattattacaagagcggacttggctcgggcggactggtaaatacacgctatgtggttggaatccttgatgcgctgcgcgcctgcaaagatattgcgctggatgaagaactgattgggatctacgaaaaatggatcaaagaccatccatatgacgaaggtgagggatgggggctggttccgtggtcacaggaagaaatgcccgtgacggaagagatgcttcaaaccgcatccggggatgatgtggcactggtgattcttggacgtacggcgggggaagaccaggacaatacggacaagccgggcagttataagctgacacggacagaagaagacctgatccgtaaagtgagcagtcaattttcacgcacggccgttattttaaatgtgggaaatatcattgatatgaaatgggtcagagaatttgatccggcagcggtactctatgcatggcagggaggtcaggaaggtggaaacggtgtctgtgatgtacttacggggcgtgtgaatccgtgcggaaaactgaccgatacgattgcagaagatatcagtgactatccatccacgtcaaatttcggggatttacagaaaaactattataaagaagatatctatgtgggatatcggtattttgagacatttgccaaagataaagttttgtatccgtttggatttggattgtcgtatacttctttttccgtgcaagcgtctgcagaagaaaaggacgagcatacggtctgtgtaaaggcaacagtgaaaaataccggaacaaaaccggggaaagaagtgcttgaagtatatgccaaagccccacagggggtactggatacaccggtgcgtgttctttgtggatttgcaaagacaaaggaactggcagcaggggaagaagagcatattactctggagattccgaaaaatacatttgcctcctatgatgacagtggtgtaaccggacacagggactgttttgtgctgctggagggtacttataccatttatgtgggaaccgatgtgcggacggcacaaaaggcaggcagttatccgcagacgtttacggtgattgaacagcttgaggaagtttgtgcaccgcagaaaccgtttgcccgtatgacaagaaagccgggtgatgtgatcggatattccgatacaccggaacggatctatggtccgtatgaccgcgtggaaaaaccggcagagatttcacagactggtgataaaggctatcgtctggaagatgtatatgacaaaaagatttccatggagacatttgtggcacaattgtcggatgaggatctgattatgctgttccgcggagaaggcatgtgcagtccgaaggtgactccgggtactgcagcggcatttgcaggactgactccgtctttgaggaagtttagaattccggcagaatgtgcatcggacggaccatccggaatacgtatggactgcggaacaaaggcgttttcccttccgaacggaacgctgctcggatgtacatttaactgtgaactggtgcgtcaattatatgaaatgacagggcttgaactacggttaaaccgtgtagatacattgctcggaccgggattgaatattcacagaaatccgttgaacgggcgaaactttgagtatatttccgaagatccgtttttaaccggaaaaatgggagccgcacagctgcagggacttaatattgcaggttccacaggaaccatcaaacattttgcggcaaacaatcaggaaacgaaacgacatgaggcagattcgattatttccgtgcgggcattgcgggaaatttatctgaagggatttgaaattgcggtaaaagaaggaccggcccgctctgttatgactacatatggcccggtcaacggggtgtggactgcaggaagttatgatctcaataccattgtattgcgcaaagactggggattttctggcatcgttatgaccgactggtgggcaaaggcaaaccatgagggacagccatcggatccgcgtatacatgcggtcatggcagcggcacagaatgatgtatatatggtgactgcagatgcgcaggatatgcagcaggatgatatgctcgaagaattccagaagggaaatcttacgagaggacagctgcagagaaatgccatcaatatattgcagtttgtactaaaatccccggcgatgctttatgagatggataggatttctccggaagaacttaaagaccggaagaatgctgcaaaagatgatctggatgtctcaaagatgatgaaatttgtggcagatgaacagggaaaaatctgcatttccggtgacggctgggatacacatcagggaaaagaaatacttgcggatctggatatgaaagccggaagttatgaactgcagatgaaagtgaaatcaaatctggatgatctggcacagcttccggtaacggtatatctggacaatattatcaaaggaacaatgtccttccggggatcgaaagggcagtgggtgacacagcagatccggtttgatacattcgagggacatcattatatgaggttatattttggagcaaccggacttacggtagatcatatagcgtttcagctgtccggcggcgcagacaaggagcagtaagatatgaatgttttaaaggtaaaaaagggagaaacgcttgccagaaaacaggacaaggtgatggaatggtatctgattcaggagggatcggtgatccggcagtttgcatttgcagagatcattatgcaccggaatgcaattgtgggtattctcgagaacgaatggtttgcctgcgattatgtggcaaatgaagatacgacattgattgtgattccatgtaaaaatgcacaggatctgcggaagattttgtccgaacatgagaattttcgcccgatttttttgcgtacggcagtggaacagaggcatcaggcactgtgtctgtatgccagtctgcagaaaaaatgcatgcttttacataatgctgcggaaacgttgtacagcgaatacaaaaatctgtgcagcgagaagcttcttgatgaacaggattttccgcgtatggaacagtttgcagctttaaaaatgcagcaccgtgcggaaaactgggagattgcaaacagtaacagtctggtccggagttatctgaaagaatatatgcagctgatgatcaaagatgacagtctgtgtgtgggagcaatcatggaggcggcggcacagatgcgccgtgtgacacagggaatcggcgagatggtaaattatctgcagtacaacagggatattttattttcagattccagagatgatatttttcatctgttttttgcaatggcagtccagcagtcgcagaaaaagcaggacatttccgagatcaaaaagcgtctgttaaatatggtggatgtcatgacaaagcttgatgtatacgacaaaaagcagatggcggaggcacatgagctctgcgagaattacgactttaccaaggagtccgaaggccgtatcaatattatgcgtgaggattgtattgcacatattatggagtatgcaggatatggcagcgatatgatcagggatttccacagcattgtgcagcagtaccgggagctgccggatatgatgtctacagacaatgaggcgagacagctgcgcagggaaatcacaaaggtcttttacgatatttataccaaggcgtttatgagatcagttgaggaactggtcaagccgtcaccgatcatgatgatgtttttcaattttgggtttatggatgcggaggtgctgggggaaactaacacaaatgcactgtataatctgacggattcgcttggattgtttcactctgcaaatgtctatacggtttatgactggctggtacagatttatcagggaaagaaagaaccgtctcgcaatgaatttgaccaggatttcaatgcatttctgctggaagaaaagagaactgggaatattacggaagcgcagatgcaacagtataaaaatgacagcaggcagaaagtacagtttgagatccgcaatatgtttacctccggaaaccgtgtgacctatggccgtgtgactacattctgtccggttctgatggaagaggatttcatcaacaccgtggaaaagatggcagttaccgcagaaaaaattgccgatgccatcaataaggtgcgctgtgtggattattctgcactctatcatgatgtcatgttttccgatccggatcgcggaatcaatcaggaatggatcaaaaaggagattctgccggatgtgattctgatgccaaatgccggaacccgtaccctgatgtggcaggagacatccggtgccaagattgatacaccagcgcgttttctgtttccgatcttttccgcagtggatctcgatgatcagatggtggaatgtatcggccgataccgctgggagatctgcagacgtgtgcagggtgtatactggaacgatatccgggagaaatcgcttacggcggagtactgtgattttattcagtattatcgcaaaaattcagatctttctgcagatgcaaaggaaaagatcaagactgcattgtcccgtgcacggaacagttaccgtgaggtatttgtcaaggattatcaggcatggatgaagtatgaatcacagggaagtttccgactgaataaggtggcaagggatattctggtaaggtattgtccgtttgcaaaggatatccgccagggactggccaccaatccacagtaccagaatgcatttcacagacttgatgcggaaaacagaaagaaactgcagcggttccgttctgtttacgataaatatgaggctgccggcggagagatcacaccggaactgaaagaaaatctgcggttttatcagatgtaggaacggatatggaatatatagcttatgtagagaccccgtataaagaaaaatttggaattcccagacagagtgggctggcggagagtacctgtggggaaattattttcacaccgaaattccggaatccggatgcagtgtgtggaatcgaagagttttcccacctgtggcttctctgggagttttccagggcaaagcaggatacctttcatgcaaccgtagcacctccccgtctgggaggaaaagaaaaacggggcgtgtttgccacgcgttccccctttcgcccgaattcgatcggactttcatgcgtgaaacttgaaaaggtacgcatcgatcagaagcttggaccggttcttatggtttccgggctggatctgctcgatcacacaccgctttttgatatcaaaccgtatctgccgtacgtggatgcccatccggaggcaaaaaacggttttgcggaagaattccgggagtttcagataccggtagtatttccggatgaattgcaggcacagcttccggaacatctgcggggaccgcttcttgaggttcttgcacaggatcccagggcggcatacaacaaaaagccggattatatctacgggatggcatttgataattatgacatccggtttatggtggcagagggaatcctgacggtaaaagaggtcacaaggcgcacgcaggaatggaaaaaagtcaagtgagagttgcgcttgcacggggaaagccttataatagaaacgtcaaaagtcaaaaacgcgaagaaattcgtgtagtagtgaggtaagaggatgaaagagttaaaagagtacattcgcagtatcccggatttcccagagaagggaattattttccgtgatgtcacaagtgtactgcaggatgcagatgcactgaagctttccattgatgaactggcgaaacgcttggagggcgttgattttgatgtgatcgccggagcagaatccagaggctttatctttggagcaccacttgcttatgtcatgcataagccgtttgtaccgattcgtaaaaagggaaaactgccgtgtgagacagttgaaaaaacatatgatctagagtatggtacggcaacgattgaaatgcataaagatgccattcaaaaaggagaaaaggttgtacttttggatgatctgattgcaaccggcggaaccatgaaagctgctgcggaactggtagaggaacttggcggtgaagtggtaaagatgctgtttctcatagagttaagcgatctcaacggacgggaagtcttaaaggactatgacgtggactctgttgtacagttcgagggaaaataaaacctggtttgagacaggcgtaaaagaatggatgaaagcccttcacgctatggggcacacgatggtgtgtcctgtggttgtggggggctttctaatatttgattgtaaataaaaaggtaatttgttattataattctatgatgtatttgtttatgaaattgaatgatgaaactgaaatagtgcattctgatatgaaagaagatggaactgtaaaagtttatattgaaactccggatgaaaaagatggatttcataatatgacttattatttgccgacttatgaagtaaaagatgtcaatggatattctgacaaacaggttgaaaaatttgttgagattataaaatctaaggcacatttaattatagaattggcaaaagaatatggtacaccaaaagggtcagaatagaggaaataccgatatttatattgaatacaaggtaaaaccagtgtcagcaaagccggacagaaagtgacagatacccgacagaagtatccgtttacatctcagcttttatctcatcttccgtagctttcatggcatcaagagtcatggtaagcagtttatcgagttcccagcccagctgatcggcaccgcgctcgatgacttcccgggaacagccggcagcaaatcctttgctcttgtattttttcttaagggatttaagctccatatcctttgtgcttttggatgggcgcataagtgcagcagcccagataagaccggtaagctcatcggcggcaaacaacactttttccatttcgtgttctggtgcaacatctactgtgatgccatagccgtgggacacaaccccatgtattatatcctcgctgactccgccggcgcgaagaagttccggtgctttgatgcagtgctgatttggatatagttcgaaatcaatgtcgtggagtaagcctacaatcccccaatattccgcatcgtcaccatagccaagctcatttgcataccatttcataacagcttctacggtaagtgcatgctgtatatgaaaaggatcgttattatattttttaagcaggtcaaaggcctgatctctagaaatgtgctccattttataatcctcttttcctagcaatatagtatgacttaaatattgtaatatttttggagcaaaaagtcaaattaagatatggatacataacaaattgtggtgcagagagcagatgataattatataagaataaaaccgcacgacctgtacatactatcagaaaaacaaagtaaggagagacagtatggatcagcaggttggatcagggagtctttgctttgcaaaggctccttttattattggaacagcatctgtggttggaaccaaagagggggaaggtcccctggcagatgcctttgactgtatcggaccggatgataaatttggtcagcagacatgggaggccgcagagagcagtctgcagaaagaagcattgacgcttgccctcgggaaagcagatcaaaagccggaagatatgaggtacctgtttgccggagatctgcttggacagctgattgcctcatcatttggattaaaaacgtttgaaattccactgtttggactgtacggggcatgttccacatgtggagaagcgctggcactttctgcaatgacggtagcggccggatatgcggatcgcgtggctgcagtcacttcgagccattttgccagtgcggaaaaacagttccgttttccgctggaatacgcaaatcagcgtccggtaagtgccacatggacagtgaccggaggcggtgcatttattctgtcaaaggatgcgaagcagccgctggcaaaggtggcgggggtcacaaccggaaagattgtagattacggaatcaaagattccatgaatatgggagctgtgatggcaccggctgccgctgagctgattgcgcagaatcttacggattttaaacgaaaacccgaagattatgaccggattatcacgggagacctgggagaagtcggtcagcagattctgtttgatctgctgctgaaaaaaggcatggatatccgaaagcagcatgaggactgtggcatgttaatttttgattcacagacacagggaaccggttccggaggatcgggatgcggatgtgcagcctcggtgctgagtgcgcattttctgccaaaactggcaagcggggaattgaaaagaatactctttgtgccgacaggcgcactgctttctacggtcagtttcaatgaaggacagacaataccggggattgcacacggtgttgtgctggaaagctgtgtttcatccgcaaaaaaggagggataaggatatgcagtatgtaattgcatttgtaacagggggaatgatctgtgcactgtcacagatcctgatggaaaaaacaaaaatgcttccggggcgtatcatggttcttttggtctgccttggagccatccttggatttgcggggatctatgagccgttttcccaatgggcacaggcgggcgcgaatgtgccgcttctgggatttggaaacaatctctggaagggggtcaaagagatggtggacaagaaagggtttatcggtatttttctgggcggctttaaaaactgtgcggcagggctttccgcagcactcgttttttcttatattgcttccctgctctgccagccaaagatgaaaaagcactagcaaatctggaaaattctgttgtataataaatgggaattttgcacacactagctttgtagatcaaataaaaggagatatgtgtgatgaaaaaattaaaagttctgatgatgggcggaatgcttgcagcagggatctgtctgtttgcggcctgtggtacagcaaatgatgacggaacgaacaatggtgtaaacgatacttccaatacacaggttactacacaggaaaacattccgggaacggacaatacgactggaaatggtacaacagacaataatacggatgccggaaattccaaaaacgatggcaatgtcggaaaagatatcggggatgtgggaaaagatgtcgtggatggtgtgaaagatgccggtgatgctgtggcagatggcgtggatgatgcaattgacgcggtagatccggatgcagacacaaacaatggcggtaagaccaataccggacgttagacaggattacctatgaaaaaagaaacttacgttaaaatgacccagccgtttcgggatgacccgaaacgtgcgcgggcgttacatagagcaaataaaatattgacggttgtgatttttgtggcatatccatgcctgcttctgtggctgctgtggcagaaggatatgcggctatataaagccatctgtgtgccgctggacggatttattattgtgacggttgtgcgggcctggatcaaccggaaacggccgtatgaaatatttgaactgccatctgtgattccaaaagatacgaaaggacattcctggccgagccggcatgtgttttccgcggcagtgattgcgtttacgttctggtttgtgtgcccggctgcggggattgtatttttgcttatgacagttgccattgcatggatccgggtagtttccggagtgcactttatcagtgatgtagtggcgggatttctttttgctgcgtttttttctttgtttttttaggataaaaagcgggaatcctcggtaattcaattgccgcagatgaaagcgcgtaaccacaggttacattggagactttaacgtctcctcttttttgaactttaaacagaacacttgttcttttcttggagatgtggtatactatgtgtatgaaggaaaatttaattcattcacgcacttgcgtgtacaacattaattaccatgtggtttggtcggtaaagtacaggcgaaagattctgaatgcggaagttgaaaagtatttgaaagaacatacggcgttatattgaacatcagagtaaatcttattaaggaggaaaagaacatgctgctgtcacataagacagatattcaactgaatacaacagagtctaatatcgtaggccatatgtgctatgcggcatctaaactctggaacgtgtgcaactatgaacgccgcaatttcaaggagcttggaatggcccattaccctgactggtatgatcagaaagcacggttaaaaggaaatatgtggttcaaatccctgccctcgcagacggcgcaggaagtgtgcaagctggtggataaatcatggaagtcattttacgcactgataaaaagtaaaggcatccagaatccaaagccgccaagatttaaacaaagcggtatgacaattacctatatgcagaatgcaattgtacatgtatctggaagcaaaagggtacgactatcacttccgaagcagctaaaggagtatctgaagcatacatatgacatcggtgacaactatctgtatctggaaaataagattttccaaaacacggatgtcatcaaacagattaagatatatccaccggatcggaaaaacgtgtgtcaggttatcgtgatttatgacgtaaaagatgtggaaaaaatgcaggataacggacactatttatcaattgatctgggtctccacaatctgataacctgttatgattctgcgggcacaagttttatccttggaagaaaatatctggaaatctcccagaaatatgataaagaaatcgcaagacttgggcatcaatggaacagctgtcagtcagcaggagggattaagtatccgaagccatccaaacatatgcttaaggtatataagaaaaagcgaaactgtattcacgactatcttcataaagtgaccagagcagtagtgaattattgtaaagcaaatgatatccacacggttattattggtgatatcacaaatattcgaaggaataagaatctgggaaaagtgacaaatcaaaaacttcatgcactgccttatgcgaaaatatatggaatgctggagtataaacttgcaatgcatggaattacacttgcgaaacagacagaagaatattcaagccagtgttccccacatgcaccacaagtaacaaaagaatatgcaaagaaatgtaacagaaccagcaggggattgtataaggaccagttgtcagtatataatgcggatgcagtaggggcatataacattatgagaaaatattttgccggatgcggcaaagagaaaaagatatccgttaccggattatcttctcccctgatcataaaagtagctgtgtaaccccaaaaaggtagcagtaaaggtgtcatggacgcacccagaatctgtatggcgaagccatatatatctgatgctcggtgattcaattaccgatgtagttcactgtggttttcaccggctatgccggaaaaattactggctttctttccggaactggcgcggtgtcatgctgtatttttgtttgaacacccggttaaaataggaaagattttcaaaaccggattccgccgcaatatccagaatggaggagtcggaagttgtcagcagacgcgaggcgattgtcaggcggtagtcccgcagatagtccacgaaagacgttcccatagtttctttgaaataccgcataaaatgagattcggaaaaatcaacggttgccgcgatgtcggcaatcgttattttttgcatgtaattattttcaatgtattttaaaacaattttcattttatcaagcgttttgcggttactgcctgtcgttaagttccggcagcggttgtctaaaataaagaaaaactggtacaactgacttttgatgtacagttcatagccctgtggtttggtcttgctgatttcgtcacaggcatcaattggcatgatgacatctgtgtaataaggatagacaggggtgaagatggttggaaccgtgacttttccgctcataagaggaagaagaaaatcggtggcagtcacatcgttctgccgtggaatcagcatactcggattaaagatgatattttcatattccatgaaggcatcttccagctggtcaatggagtggagctgtcccggaagaataagaaccagagtcggaccttttactttgtattcccggaaatctaccgtaatgcgtcccatcccctttttgatgtagatcagttccagttcatcgtgccagtgcagcggtacacgcggaaaatccagtgggatcgagcatagatatgtattataagggaagatgatatccccatgtgtgatggtttcgtgataattttcatattcaagtatattcatatctttattttagcagaattgtcctatgactgtaaaggacaaaaacgacagaaaacgcatgaaacaggcgaaaacacaggatatgcaggcactgtggaaatgtaccaagacaggtggcacgaaattggtgaaatttaacagctgggggttatttgaatatgaaaaatgatagaatagtatcagtttttgcttgaatacgacaagaaatcagcaggaaaaaatcatatactaagtacatcaaaacaacacgaaatcttgtgggagggaaaacacatgactttagcaaaagcagtatctatgaaatataacaagaccatcgagaagtgctcaaacgaggaaatttactatgcactccttgatatgaccaagcagatggcagaggacaaggtcagcaatgagggaaagaagaagctgtactacatttcagcagagttcttaatcggaaagcttttatccaacaacctgatcaaccttggtatttatgacagcgtgaagtccgaacttgaggcatctggaaagaacatcggagagatcgaggaaatcgagcttgagccttcactcggaaatggtgggcttggacgtctggcagcctgcttcgtagattctattgcaacacttggattaaacggtgatggtgttggattaaattatcactacggattgttcaaacaggtatttgaccacaatttacagaaagagactccaaacccatggattacaccagatagctggctgacaaagacagatgtcacttatccggtacagttcggtggatttaccgtacagtccagattatataacattgatgtcgttggttataacaaccgtactacaaagctgcgtctgttcgatatcgagactgttgatgagagcattgtcggagatacgatcgatttcaacaaagatgacattgcaaagaacctgacactgttcttatatccggatgattctgatgacaagggacgtcttcttcgtgtttaccagcagtattttatggtaagcaatgctgcaagactgattcttgacgaggcagtagagaagggatcaaacttacatgacctggcagattatgcaaccgttcagatcaatgatacccatccatccatggtaattccggagctgatccgtctgttacaggagagaggcatcctgatggatgaggcagtttccatcgtatctaaggtatgtgcatacaccaaccatacgattcttgcagaggcacttgagaaatggccaatcggtttcctggataaggcagttccacagcttatgccaattatccgcgagctggacaaccgtgtacgtgcaaaagtttccgatgagagcacctacatcatcaaggacggactggtacacatggcacacatggatatccattatggatacagtgtcaacggtgttgcatacctgcacacagaaatcttaaagaatagtgagttaaataacttctacaagctttatccggagaagttcaacaataagaccaacggtattaccttccgtcgctggctcatgtcctgcaatccagagctttccgcaatgatcacagacttgatcggtgagggctggaagaaggatgccaacgagttagagaaacttggcaatttcgtcaatgatgatgcggtactggatcgtctccttgcagtaaaggctggcaagaaagcagatctgaagaattatctgaagatgaaacagggatttgagattgatgagaattccatctatgatattcaggtaaagagactgcatgagtacaagagacagcagatgaatgctctctatgtcatccacaagtatttcgagattaaggaaggcaagaagcctgcaactccgatcaccgtattcttcggagcaaaggcagcaccggcttacattatcgcaaaggatatcattcatctgattctctgcttacagcagatcatcaacaatgatccggaagtaagtccatacttaaaggtatttatggtagaaaactacaacgtaaccatggctgagaagatgattcctgcatgtgatatctccgagcagatttcccttgcatccaaggaagcatccggaaccggtaacatgaagtttatgttaaacggtgcactgacacttggaaccatggacggtgcaaacgtagagatcgcagagcttgttggaaacgagaacatctttacctttggtgaggattcccagaccgttatcgaccgttatgacagaggcgattacaactccagaagctactatgagaaggattctgagttaaagaaggccgtagatttcatcgtaagcgataccgtaaaggccgttggatgcagcgagaacttagagcgtctgtacaatgagctgttaaacaaagactggtttatgacattcccggatttcgaggattacattgcaaccagagagaaagcgtatgcagcatataccgatcgtaaagattgggcaaagaaagcactgatcaacatcagcaaggctggattcttctcctctgacagaaccatcgatcagtacaacaaagaaatctggaaattatcttaattgaatataggaatacaaataaattgttattctcctccttagatgggaaccggacggatggtccggttccttttttagcgttttttggattgttaaaatttgcaaaaacaatacaaatgtattgaaatagaaatgatttagcattataataaagaaaatgaatggaagtggaggtgctgaatatggctagtacaattcaagtcagggtagaagatgagttaaagaataaatcagatgcattatttaaagatctgggtacagacacaacaacagcaatcagaatgtttttaacacaggctgttgctacaaatggatttccttttgaaatcaaaagacaggcagaaacaaatccatatgcaccgatgactgagaaagagatgcttgcaaaattgaaaaagtccagagagcaggggaagttcgcagatgcagatgatgtgatttctgatatgaggtcaaagtatggattataagattgttttatcaaggggtgcggaggaggatcttgacggattcgttgcatatcttttgtttgaaaagaaaagtgaacaggctgcaagaaatttattaaacgattttgaggcaacaaagacaagtttgtcaaatgttgccggaagtctgaaactctgtgataatcccaaactaagagagttaggatactacagaatcaatttcctatcgcatcgatattttatgttgtatcgtattgaaaacgatacagtttatgtggataatgtttttcatgaattgcaagattatgagaataaattaaattaaatatttaaaaattcctatctatggggtatcttttaattttgaatattatttaggagattactcaaataggtaggaattttttatggaaaagaatccaattgctgaatgtaataagattcaaaagaaatattatccagagttgtttgctaaattttctgggggtgaatgatcctcgaaatcagagttatatagattatccagtcagggtcatgctgggaaccatgtactacaaatgcataggtggaatttcaaaaagactgcttctgtatcaatgaccgctatggaagaattttgtatatgcaggactatgccagttatgtaaaagatgacatgatttccgagctctgtgatctgagccgggatctgatgttatccattgatatcctgcccgtaccaacggatgaggcagtgcggtttttatcatactgattttaattgtagtattatcggcggagctgcttttatggggaatttccagagcgcagagcctctaagtgcagaagtactggcacataccccgacgatccagaggtatgtcagcaaatatggaatcccggagtatgttgcggtgatacaggcaatcatgatgcaggaaagaggaggaaggggaacagatcccatgcagtccagtgagtgcccttataataccgagtatcccaatagtccgggagcaattcaggatgcagactattccatcaagatgggaattcagtattatgcagactgtatccgggagccagcttggaaatgaaggcggtcagaagttctggtcgtggtggggatttacccagagggaagaatggtgtgcctgctttgtcagttggtgtgcggaacaggcaggactacttcaaaatggagcagtaccgaggttttcgtattgtccggatggagtggactggtttcaggcacagggaaaatggcaggctgccgggagcatcccaacagcaggaagtattatcttttttgactgggatcatgatggtgttagtgaccatgtgggaatcgtggaaagctgtgatggaacgacagtctatacggtagaaggaaactccggagatgcggttaaggagaatagttatacggttcattcagcatctattatgggatatggaattgtttcagggatgtgagagtctatatcgtagaggcaaaagcatatgagagaattagttctttagtttcggcacatcagccactacttcatatttcagtgtaatacgctggttcattatttgcttacgtgcatattctgccacaggcagatttgctgtttgggcattttctgtgacaatatcatattccatatcgttgagacggagcatgatgtgatggtttcgttttagttccttctgtttttgtattagtgaaaggatagagttgagataatactgctttagaagtaaaatagatggtatcctatagacaggataaaatttaaaattatagggtttgtttttgaaaatggtgcaaataagcactttataacaggagatagatatttatgaaatatattttattagttgaggatgacctgagtttaataagcggattgtcttttgcagtgaaaaaagcgggatatggactggatattgcacacaccaaaagtgaagcggatgagatatgggaggatggaaaatacgatttagtgattttggacgtatctctgccagatggttctggatttgatatatgtaaaagcatccgggaaatatcgaaagtaccgattatgttcttgactgcaagggatgaagaaacagatgttatcatgggactggacatcggcggtgatgattatattacgaagccgttcaaactggctgtgttcatatcgagaatcaatgccctgatccgtagaagtgataactttaatcaggcagatgtggagttgagttccggtggtattactatccagctcttaaagcgagaggtatataagaataatgagaaaatcgacttgacagcgaatgaatataaacttctgtgcctgttgatggaaaactcaggacaggtgctttctccggaacagattttggggaaactctgggactgcaacgaagattatgtggacagcaatacactgacggtctacatccgcaggttgcgtaccaaaattgaggataatccgggaaaaccagaacggattgtgacggtacgtcgcatgggttataaatggaattcggtggagtgaggtgaagtgtaagtgaagatactggtaaacaagaaaatcaagagtttgttctgtaaaataacggcttgtattatgctgtttactttgtcggctacgctgcttactatttttgagataagacctacggtgttagttatcttcttgtgcatgattggaatgggaattgctattgtcgttttctgctatggttattttaaggaacagaacgagattatggaaacagcggtggcacagattacagaatatatttccggaaaccataaggcccgcattgactgtgatgaggaaggagaggtgtatcgttttttccatgaggtaaattctttggcggctattctaaatgcacatatagagcaggaacgcagatcaaaacaatttttaaaaaatacgatatctgatatttcccatcagttaaagacgccactggctgcattaaatatctacaatggacttttgcaggatgagaccgctgatatgccagaaattcaagagttcgcattgttatcagagaaagaacttgatcgaatagatacactggtgcagaatcttttgaagattacaaagctggacgcaggctctattgtgttggagaaaaagccagaaaatgtggcagagatgatgaaggatgtagaactacattttgcgtatcgtgttgagcaggagcaaaaagaattgttactatctggaagagaagatgttttgctgtgttgcgaccgtgactggatgctggagacggtggataatattgtaaaaaatgcattggatcatacagaaaacggagataccgtggagatcaagtggcagaagtctgcttcgatggttcagattcagataaaagataatggatgtggtatccatccagaagatattcaccacattttcaaacggttttaccggagtcgtttttctaaggataagcagggattagggcttggtcttcctcttgcaaagatgattattgaagcacataacggtacgatagaggtaactagtgaacttcaaaaaggaaccacgtttacactcaatttcttaaatcctacaaaattgtaggctaagagtcatgttactgtaggatttgggtggtatgctttctataataatcaaagaaagaggtgcatagtatatggatttattagaagttcagtctatttcaaaaacttatggcagcggagaggcagccgtacacgctttgaaaaatgttagtttttccgtaccaaagggagaatatgtggcgattgtcggggaatccggttccggcaagagtacgctccttaatatgattggggcactggataatcccacatcaggcaaagtattgattgaaggcaaggatatttttgcgatgaaagagagtaagcggaccatttttcgcaggcggaatataggatttatttttcaggcatttaatttgataccagaattgacggtggaacagaatattattttcccgatactgttggactatcaaaaaccaaatcaaaagtatctggaagaattgcttgaggtactgaatttaaaagaacgccgtaaccatttgccgggccagttatctgggggacagcagcagagagtagcaattggacgtgcactaatcacgcgcccttcgctgattcttgctgacgagccaacaggaaatttggattcacagaatagcagcgaggtaattgctttattaaaaaatgcgtcaaagaggtatgcacagacgattattatgattacccataatcgaagcattgcacagtcagcagacagggtattgcaggtatcggatggcgtactgaccgatatggggaggtgcagtgaatgaaaagctatttaagcctcgtgcctatttcgtcaaaggtacatggacgacagagccgaatgacacgtatttgtattattcttgcagtgtttttagtgacttcaatcttttcgatggcagagatgtggaatgaatctgaactgacagcaatgcgtagaaatcatggagattggcatattgctctacagaatcttccggaggaaaaagtacaacagattatgaaaaattctgacattgcattttcttcatggtatgatgagattaatgcagacacggatcagggctattatataggtggtaaaaatgtagttttatatggtatcgaagagagatatgttacagacattatgaattatccatctgagggctcttatccgcagacggaaagcgaagtagccctcagtatggacgcaaaagaactttttggcagtaaaattggggatcgggttatcttaaagacacctgagggcgattttgaatataccatttccggtttttatgaggatgataaggagttcaatgatatgattcagggatgttgtgtgtatatgaacaggacttcctttgatgaaatctgtagcacaaatggggtggaggaggattcgcagttttatattcggtttcaaaaagaaaatggattaaagaaaacgattgaaaatttgaaagtgcaatatcaccttacagatgaacaggtcagtgaaaatacagccgtattgggatttttgggagccagtagcagtgaaacatttaattggctttatccgctggtggcagtttgtctggtaatcatattggcggcaggagttttaatggtttcgggctgtatgaacagcaatgtggcacagcggacaaagttttttggtatgatgcgttgcatcggggcaagccaacagcagattttacgtttcgtaagatttgaagctctaaattggtgtaaaacggcgataccaattggatgtgtgcttggaacggtgatttgttggatgttttgtgcgattctgcggttttttgtaaagggcgagtgggcagacatgccgctttttgcagttagtccgggaggtatcctctgcggagctatggtcggcatagtcactgttctgattgcagcccattcccctgcaaagcaggcggcgaaagtttctccagtggcggcagtatcgggaaatgcgggagaaacaaaaaagcttgttcgtgcggccaatacgaggctttttaaggtggaaacgtctcttggagtttaccatgcgacagggagaaaaaagaatttattcttgatgacaggttcttttgcccttacaatcgtgctgttcctgacattttctgcctgccttgatgtggtaaataagcttctcccatcagcagtgagcaaatttacaccggatattacgattgcaagtgagaatgatacaaattccatagacgggaatcttttgaaagaaattgaacaaattgagggcgtggactgggcttttggttttgggctgtatgcatcatatcctgtagagataaatggaaatgagggtactattgatttgttttcccacgataaggcattgcttgacaagttcaaaaattcggtagtcagtggtgatatagagaaggtatatggagacggaaactatgcgatggcggtatataatcaaagcaatcatttaagtgtcggggacaaaataaaaatcggaaatcaagaacttgagattgcctgcgtcgcatccgaaggaataggaagtgtcagtaacgcaccgactgtggtatgctcagaggagacatttacccgtctgacaggagactgtggtttcgttacaataggagtcgtattgaaaaaagatgtatccgaaaccgcagtaaagaaaatcgctaatctggcaaacggaaatctcttttcagataatcgggaagtgaatagtgaaaacagtggttcctattgggtgttccgaattgcagcatatggtttcttaacaattatttccttgataaccgtgttgaatattatgaatagtatttccatgggcgtgtctgcaagagtgaagcaatatggggcaatgcgtgctgccgggatggaaaaccgccaggtcacaaagatgataacagcagaagctgttacatacgctgtctgcggaatgattgtaggaattgtatttgggcttatgttacattatttgatttatgcgaaaattgtcattactcattttggcggcagttggaatattccatttagcaccattggaattgtatttttgttggttacattttcatgtattatttcggttcatggaccggcaaaacgtatgagaaacatggcaatcacagatacaattaatgatttgtgattgaaaggctggttaaaaactgtggtacagcggacaagaaaatctgctgtaccacaaaatgttttacacatcaaatttagaatgagagaatggagtattttgtcttggaaagtatggtgaaaaagagaattactcaggaatacatcaaaagaattgaaaaggaataacaatttaagctgtgcgaagaagagatgcgatttgaaaaagatggcatcttttttttatatttatatgtggatagaaataagcctcagtaatcatgattataggaaaaaagtggacgttgctaaaagagaaatgaagaagataaaggagtatgcagaacgaggatacactcatgcggtggcacttgatttgtcgaaatactttgatacactcaaccacgaaaagctcctaaatctgttacgtagagatataaaagatgaaagagtgatacagtggattaagagatatctgaaaagtggtgttatggagaacggagtagtcatggaaacagaagaaggttcgccacagggtggaaatatctcgccattgttagcgaacatctatctgaatgagttcgaccaagagtatgagaaacgcggagttaaatttgtcagatatgcagatgatatcgttcttcttgcaaagagtgacagagccgcaaaacgattacttgaaacaagcacgaaatatcttgaaggaacactgaaattaaaggtgaaccaagagaaaagtcgagtggtcagtgtaagagtatatgcgagggtggctgaattattatggggttgcagatatgaagaagaaaatagatgatttaaataaatggctatatcacagaatccgtatgtgcatctggaaacaatggaagaaaccgaagacaaagataagaaatctgctaaagatgggagtaccaaaggacttggcatggcaagcaggaaacagtcgcagaggatattggtttgtgactcatacgatagcggtcaatttagcaatgacaaaagaaagactgataaacagtggcttttatgatttagccaccgcctatcagtctgtgcacgtcaactattgaaagcgccgtgtaccgaacggtacgcacggtgctgtgagaggacgggagttagtcactccctccctcctactcgattaaattacggcattgtcgtctaatcattcttcaatggaaccaaatattatctttgtaacagaaacgctcttgggtgctgacatattttttactggaaaataagaggaaaattagctataatcgtagtaagagctaggggagaagaaacaacaggaatatataatgtgcgaaggaggaacgctatgaaatggaaagggcgaagactgcttgccatggcacttaccggtatcttgcttgcaggatgcggggcagccggacaggtcgatgattatgcaacgaatgagggaagtacacaggaggcttccaccaaaacaacgggaactgaaagcggagggatttcaaaggacaagatcaaggtaggggttttgcacttatcggatccggcagaaggcagtggatatacctatacacatgatctcggcattcaggcaatgcagcagaatcttggattatcagatgaacagattgacagaaaaataaatgttgatgattccgataaagaggcaaccgaaaaagcgattcaggagtgtgtggatgatggatgcaatattatttttaccaccagctggggatatatggatgctacggaggagatggcggaaaaatatccggatatatattttgcacatggaacaggatacaaaagcaacggaaagaattttgtaaactatttcgggcgaatctatcaggcaagatatttaagcggaatcgtagcgggaatgaataccaaaaccaataagctgggatatgtggcagcgatggattcctccaattccgaagtgacaggaggtattgatgcctttgcacttggggtgtattccgtgaaaccggaagcaaaaatctatgtaaaagtcacgaacagctggtttgacccggatgcggagaaagcagcagcacaaaccctgttaaatatggactgtgatgtggtcacgcagcactgtgatacagaatatccacagacaatggcacaggaaaaaggggtgtatggtatcgggtacaattccgatatgagcaaaaatgctccggatgcctgtctgtgcagcgtgatctggaactggggtgcttattatacagcagcggtgcagagcgtgattgacggtacctgggatggaagcaattattatggcggtatgaatgaaaatctggtagggattacgtcactttctgatttttgcacagatggaacacaggaggctgtggatactgcaaaagaagatattttatccgggaaaaacggtgtgtttgacggtgtgattgaaacaaataccggggaaacggttggtgaagaaggaaaaacgctggatgatgccacaattacaggtggaatcaactggtattttaaaactgttgaagtggtagaatagggggcatatatgagtatacgaaagaaaattcttgcaatcagcatagggccggtgcttgtattaggggtaattaccctgctttttatgcttacgatggttaaaagctccctgatggatgaggtacaggatgcattaaaaggtaccgcggcagccacccttgccgcctatgaccagaataccggggattatctggaaagtaccaatggggatatctggaaaggaagctataatatatcaaagtcggagagccttgtggaccggatcaaagagaataccggtatggatgtaacctttttttatggaaacaaaaggattatgacatctgcactggataaaaaaggaaaccgtatccttggttcagaagccggagagcgtgtggtgaatcaggtgatcaaagggaaaaagccgtttttcagtacaaatgtttcactggatgggacgagaaattatggatattttattccagtgtatcagaatggaacgacagatcaggttatcggtatggtgtttgtcggaaccaataaggcacgaaaagatgcaattgtcaataaaatccttggaagtattatgatggcattgcttgtagtgatgcttttgtgcattgttacggcgatgcgcatggcagcctctatcagtaaaaatatcaaaaacagtgttgctgttgtaggaaaacttgcagatggtgatttaaatgtgtgggtagatgaaaaacttctgaaacgaaaggatgagattggtgatctgtctcgcggaaccatgacattaagggatgccatgaagtccgtaatccgggatatttcagaaaatgcaaagcagctgctttcaacgtcacagattctgggtacggcagcagacaacaccaatggaacaatgtcacaggtacagcaggcggtcagccttgtagtggataattccagtgagcaggcgaaaaattcgagaaatacttcggatcatatgaaaattatgggggagaatatcacggaaactacagcagaggtacaaaatctggatcaaaatgccacatttatgcattcttccagcgaaaatgcttccgcaacgctggaaaaactctgtgggatcaatgaacaggtggagcagatgctggcacaggttcagcagcagaccgaccggacaaacgattctgtacagaagatccagcaggccacaaccatcatttcttctattgcagaggaaaccaatctgctgagcctgaatgcctccattgaagctgcccgggcgggagaaagcggccgcggattcgctgtggtggcaggtcagattaaaaaacttgcagagcaatcggatcagtcgagtcaggaaattgagcagatagcgtcaacgctgatcagggattcttcccttgctgtggaaagtatgcagagtatgcagcagattattaccagccagagtgagagcatggcagaaacgcagaatattgtaaaagaagtgctgggcgaaattaacagttccatgcagagcatcaaacagatcaaagcaagtaccagacgtctggaagattccagaaatgaagtcgttcaggcagttggggaattgtccggaattgcggaagaaaatgtggaaagcacgaaaaaaacctacgatggaacacaggaagttgtgggaacgttccagcaggtctatgtaagtgccgagcagctgcgtgagatttctgataaactggtaaaaggaatcgggtattttcatatttaaaagaaacacagagtgtcggaaaattccggcactctttttatgtcatgaatctggtataaatcctgtgattctgatattcataaatttgtgaatccgttacaatagggtaaaaagcttgaaaattgaaaggttggaggtttcacatgaattttggatattttgatgatgagaaaagagagtatgtaatcacacgcccggatacaccggcgccgtgggcgaattatctggggtcaccggagtatggtgcgctgatttcaaataatgcaggaggatacagttttgccagatctggtgcaaacggaagaatcctgcgttatatttttaaccagtttgatcagccgggacgctatatttatctgcgggataatgagagcaaagactactggtctgcatcctggcagccggtaggaaaagatctggaaagttataaaagtgagtgtcatcatggaacagcatacacaaagatgcttgcagattacagtggaatccattctgaagtatgttattatgtgccgttgaatcagacatatgaggtctggcatctgaaagtgaccaatgcgtcagcgtgtgaaagaaacctgaccatcaccggttatgcggaatttaccaacaacaataattatgaacaggatcaggtaaatctgcagtattcccagttcatcacgagtacggtatttgagacaaaccgtatccggcatattattcacggtaatctggactgggtgaaagaaggagaggaagtggataacaagcttgcaatctcccgtttctttgcactgaccggtgcaccggtggacagttactgtggagataaagaatcgtttcttggacgctatcacggatatcataatccggtgggggtggaaaacggaaaattatccggggaaatgtgctacaacgaaaacgggtgcggagcactggcagctcagatgcttctgaaaccgggagaaacaaaggaaattgcatttcttgtcggaatgaaagaacatgaggaagcagaagcaatctgtaaccgctatgcagatgtggcagcacagtgtgagacggaactgaaagaactgacgggctactggcatgaaaaactggaacattttcaggtacatacaccaagcagggaatttgataccatgatcaatacctggaacgcatacaactgttttatgacattcatctggtcacgtgcggcgtcgtttttctactgtggtctgcgaaacggttacggatatcgcgataccgtgcaggatattcagggtgtgattcatcttgcaccggagatggcactcgaaaagatccggtttatgctttcggcacaggtggataacggaggaggacttccacttgtcaaatttacacacaatgccggacatgaggatacaccggatgatgcttcctatgtacaggaaaccgggcatccggcatatcgtgcggatgatgctctgtggctgtttccaacggtatataaatatattgcggagtccggaaatctggcatttgtcgatgaagtgattccgtttgccaataaagatgaagccactgtatatgagcacttgaagagagcacttgcgttttctgtgaatcatctgggaccgcacggacttccggcaggactttatgcggactggaatgactgtctgcgtctgggcaaaaatggagagtcctcgtttgttgcactgcagttttattatgcaatgacgattttaaaacagtttgccgcatacaaagaagatcaggcatatatggattatctggaagaagaacagaaaaaacttggaacattaattaacaatctctgctggaatgaggatcgttttatccgtggatttacggaagccggagaggtgattggaaaacgcacggatccggaagcaaatatgtggctgaatccacagagctgggctgtgatcagtggactggcaacaaagcagcaggcagaactttccatggaaaatgtaagaaagcggttaaacacagagtatggagcgattctgatggatccgccatatcacctgcatgcatttgacggagcactggctgtgatttacaatcccggtacaaaagaaaatgccggtatcttttcccagtcgcagggatggctgattctggcagaagcattgctggggcatggggatcaggcatttacctattttatggaaaatgcaccgtctgcacagaacgatcgtgctgagatccggaaactggagccatactgttatggacagtttacggaaggaaaagacagcccgcattttggtcgttcccatgtgcactggctgaccggaactgcttccactgtaatggtaggatgtgtggaaggaatccttggcatgcgtccggactttggaggacttcgtattgcaccatccattccggcggactgggatcagtttaccattgagaaggatttccggggaaaacatcttcatattgtggtagaaaatccagagcatgtacagagtggatgcaaagcgttgtacgtgaatgaggaaaagatggaagacaactacattccggtagaaaaaatgaccgatcagacgaaggtacgccttgtgatggcatagaagggagaagttatgaaaaacgatatgcagtttacaggaaaaaacggagaatttcaaatccgtcatatggttgaaaaaacacagctcaattttccggtggcaaatgaagagggaatcaaaagcagcgtgacgcagaccttcggcggcgattgtaagctggatcagaaccattttctgctggaaccggtgagcatcgaaaatctgcacaataacagaagtacccgcaatgtctggtgtacaatcaaccggaaggaacatgtgtcactgaccggagtttcggcgcaggcagaatatgcacatttccttggaaaagaggaggaagtgacattcgatgccggatttatgtggcaggagacgaagcgggaattaaaagaacagaaaatcgaggcagccgtgcggatctttgctccgcttggagtaccggcagaactgatgcaggtgcgcgttaccaataaatcggatatggatatgtgtgtgcgcgtgacttctgctatcccaatttacggcagaagcgcggataatctgcgcgatcaccgccatgtaacttccctgcttcaccggatccgtactaccggacgcggcgtgatctgtaaaccggtattgtcatttgatgaacgcggacatcagaaaaatcatatgatttattttgagatgggcagtcagggagatggaacaaaaccggaatcgttcttcccaacggtggaatcgtttatcggagaaaccggaacatttctggcaccggatgcgcttaaaaataaagaaaaaggctgtccggccggttgtaccgtggatggaaaagaagcaatgggggcgatggcatttccggagattacccttgcagcaggagcacatgtcgattatattctgcttggtggcatgacagaggatccgaagctggcagaacaggcagcagaaatgttttgcacgaccgaacaggcagatgctgcctttgaacaggcaaaaaattactggaatgggctggtcaatatttcctttgaaaccggaaaccccaaagaagacagttatctgaaatggatctgtttccagccggttcttcgcagaatctacggatgttcgtttttgccgtaccatgattatggcagaggcggcaggggctggcgtgatctgtggcaggattgtctctcccttctgattctcgacccgaaggaagttcgctccatgattttaaacagctttgcgggtgtccgttttgacgggaccaatgcgacaattatcggggataagccgggagaatttgttgcagaccgcaacaatattacaagagtctggatggatcatgcgtactggccgtttgttaccacaaaattgtatctgaaccagacgggagatctggatattctggatcagaaagtggcgtattttaaggacccacaggcaaagcgtggaactgccagggacgcagagtggacaccggcatatgggatgcgccagaaagatgtaaatggcaatatttacgagggcacggttttagaacatctgcttttgcagaatctgtgcgctttctacgaggcgggagaacatggaatgatgcgtcttcgcggtgctgactggaatgatgcactggatatggcagcggaaaaaggagaaagcgtggcttttacctgtgcgtatatcggaaatctccgtgatttggcagatacccttgaaaaatacgaagcggcaagcggaaagaaagagattacactggcaaaagagatggaaattctgatcagacaggaccgcacatcgtatgattcggcagaaaaacggaatgttgttttaaacaattatgtgagtcagtgtgtgcataatatttctggagaacagatttctgtggatatcagtactctggtgcagaatctgcgggagcgtgctgactggtataccggattgatccgtacgcaggaatgggtaacggatgaaaacggaaatggctggtttaacggatattatgataatcacggcagaccggtggaaggcaaaagggatgatcatgtccgtatgatgctgaccggtcaggtattttctgttatgggaaatgtcgcagatgatgcacagaccgctgcgattataaaaagtgcagacctgtatctgtataaaaaagaggtgggaggctaccggctgaacacggattttaaggaagaaaaatttgatctgggacgaatgtttggatttgcttatggcgaaaaagaaaatggtgcggttttttcccatatgacggtgatgtatgcaaatgcattgtatcagagaggttttgtaaaggaaggatatagggcattgtacactctgctcgaacaggccatgaacacaccggtgagcctgatgtatccgggaattccggaatattttgatgcggacggaaaaggcaaatatccgtatctgaccggggcagccagctggtatatgatgacaatggttacacagatttttggattccgcggagaatggggagatctggtactagaacccaaaattctgttgcggcagtttgacgaaagtggcaattattcggcacagttcccattccgtggacagacatacgcagtggtttaccagaatccacaaaagaaagaatatggggattaccggatcacggaagtatggctggatggtcagcggtatgccggagaaacaaatacaggcatctgcattccgtttgccgtacttgaaggaaaagaaaaccatacacttcggatcgttctgggatagcagaattttaccatgtgcttttgtacttggaactgcggtattgttttggggtcataccgacatagtgctggaatgtctggataaaatgactctgggaagaaaatgataaatagtttgcaatctgaatgtaggtaaaatcggaaaagcgcagaagattctgcgctttttcgatttttttttcgcggatataatcactgatcgacacaccgaggttctgcttaaacaaccgggacagatagctggcagacaaattggtgtagaccgcaagatcttccacggtgattcttgcactgatgtgggcatagatataatcaatacactgtgcaaccggtttggataatgcggcattcttctgcagaaggcgcatttttccagtgaagtcaagagccatctcatgatgcagatctgatatttcctgaatggtgctgcaggcatccatgtgaataatgtaaaagtcgctaagacggtaggcctgctctgtttccatgccgccgtcaatgcaataccgtgtgaccagtgcaacggtaacaacaaaatgatattttaagtttgtcaggggatttttggaaagaattcccatgccttcgggattggtaaacgcttcttcctttaaatttttactgactgcttcgatgtttccgtcttttacggcttcaaaaaaggaatattcctcggaaagcgcacgatgatggattgcgtattcgctgtcttcgatttcttttttgctccattgatttttcagcatgacaagacctcctatttatatctgtagattatgtcatgaatctgatatatttgcaagcatttttgtatcagaacccattggaaaactctataataaaaccatgcttaaagcagaaaagaaaaggaggaaatttactatgaaaaagaaagcagtcagtgcattattatgtgcagccatggtagcaggaatgcttgcaggttgcggaaaaggaagtgattccggtacaccgtcagatacatccaagggggatgcgtcaaacgcaacagaaagtgcttcatcaaatctgaaagatgatggaaaggtattaaatatttactgctggaacgaggagttcaagagccgtattaccgcacactatccggattacaaggaagtggatgcaacacacggaaaaatcggagatgtagatgttgtatggaacatcacaccgagtgatgacaatgcatatcagaataacctggatgcagcactgttaaatcagcaggatgctccggcagatgacaagattgatatttttctggtagaagcagacaacgcattaaagtatgtagatacggattacacagcaccggtaaaagatcttggaattaccgatgcggatctttccaagcagtaccagtacacaaaggatatcgtaaccgattccaagggagtgttaaaaggagtttcatggcagggctgtccaggcgttcttttctataacagagaggctgcaaaggatgtactgggaaccgatgatccggatgaagtacagaattatgtatgtgactgggatactttcaatgatactgctgcaaaaatgcaggcaaaaggttacaagatgatttcatctgtaaatgatacataccgtgtatactccaacaatgtctcaagcaagtgggtagaagacggaaaagtacaggtagatgacaatatcatgaaatgggtggacgattccaaaaaactcgtagatgcaaaagaggcaggaacctttgatatgtggtccgatgactggtcaaagggattttatccggacggaaaagtattctgctactttggaccggcatggcttgtaaacttctctatggcagctgataccgaaggatctatcggttacaacggcggatggggtgcagcccagggaccacagggattcttctggggcggtacatggatctgcgcagcacaggatacagataatgcaagtcttgtaaaagacattatgttaaagatgacaaccgatgatgacgtcatgaaagacattgttttagatgatgatgatttcgtaaacaacaacaccgttatgaacggactggcagacggatcaattaaggcaaaagacggaaaagaatatagcagcaagatccttggaggacagaacccactgtctatgtactgcgcaggtgttgagacactgaatctgagcaacatttccgcatatgaccagggctgcaacgaagagttccagaaagcaatgaagaattactttgaaggaaaggcaaccaaggacgaagcattagagttattctacaaaggtgttaccgagaaatatccagagcttacttactaatttttgttacacataaggtctgaagccggagtcacctctcccatattatggctccggcgggacgaccgccaataccgcggaggtagaaatatgaataagagtaaaggaaaggtcgttcgttacaacaaatggggctacatttttctgatcccgtttattgttgtatatgtcgtttttcagctgataccattgatcagcacaatttataacagctttttcgaaaattatatgtccggtctcaaccaggttggaccgacatttgtaggtttagataattacagagagttattcaaaagtggagacgtgtggatttattttaaaaatacaatgatcctctggattatgtgttttattccgcagatctttttttcactcctgctgggcgcatggttctccgatgtacgcctgcgcttgaaaggatcacgtttttttaagaccgtgatctacctgccaaatctgatcatggcatctgcattttccatgttgttttttacactgttttcagatgcaggtccgattaactctcttttgatgcagattggatttatctcagaaccatataaatttttatcccataccggaagtgccagaggcctgattgcactgatgaactgcctgatgtggttcggaaatacaaccattcttctgatggccggaatgatgggaattgatacttctttatttgaagcggcagaagtggatggagcaacttccacacaggtattttttaagattacactgcctctgcttcgcccgattctgatttatgtagtgattacttcactgatcggtggattacagctttttgacgtgccacagattctgacaaacggaaccggaaatccgatgcgttctaccatgacactgatcatgtatctgaacaagcatctgtacagcaagaactatggtatggcaggagcactttccgtggtactgtttatcattacaagtcttttgagtctgcttgtatttaaagtatccggaaacgataagagaaaggggtgattgtgatggcaaaaagtaagaaagatgtggaaggcggacttggtattcatgccagacgtgccatcgcatatattgttttaattataatttcatttttctgcctgttctggttttatatcatgtttatcaatgcgacgcgttctaaaggtgagctgaaagcagggtttacggcattgccgagcgatcatttgctgacaaactggaacaatctggtacatggaacactgccgatctggtcgggcatgtttaacagtctgatcattgcagcagcaaccgcagttttgtgtgtatatttttctaccatgactgcatatgccattcatgcatacgattttaaattaaagaaatttatttatccgtttattctgatgattatgatgattccgacacaggttacggcactcggatttatcaaactgattacaggcatgggactgatggattcctttattccactgattgttccggccattgcatctccggttacgttcttttacatgaaacagtacatggagagtgcgcttccgctttcgctgatagaagctgcacgtattgatggttccggagagtttcgtacgttcaacagcatcgttctgccgttgatgaagccggcgatcgccgtacaggcaattttcagtttcgtcagcagctggaacaattactttacaccggcacttgtgctgcatgatgacaagaaaaagacacttccgattctgatcgcgcagctgcgtggtgcagactggctgaagtttgatatggggcaggtatatgtcatgattacattctcgatcctgccggttatcgttgtgtatctgattctttccaagcatattgtacagggggttgctctgggaagcgtaaaaggataatagaaaaagaaaggggtttttacagtgaaaaacaaaacattatggaaacaggtgggagcggcagcaattgccgctgccatggtaatgagtaccgtaccggcgacaccggtacaggcggcaggcggtaaaacgcttgccgtttcttctcaaaagcagctgaatcaggcattaaaaaccgtaaaagggaagaatgcggtcattaccgtaaaagcagggaaaaacgtaaagattacgattccaaagggaacttataaagtgaccattcgggtggtcggaaaaaaggcagccgttgtaaataatggtaccgtcaaagaaattgttgtaaacagtaagggaacggttgcgatcaagaacaatggtaccataaagaaagtgacggtacagaatgcaaaaagtgtttccttttccggaaaccataaaaaggcagtgccggttgttgtaaatgccgaagacgtttcgatgattctggcagcaccggcgaaaataaccgcaaagaaagatgtgaacattgtgctcaaaaaaggtgcggaaaaatcatccataacgtgtacaaaaaatgtacaggcacaggtggataatcagacaaagaaagcaatatctgtaaaaattgcggatggaacaacgctgaaagtggaatccggtgaatcctgcaccataactccgaagggaaagaaagaagacacttccggagaagacaagacggatggaaaagaccagaaaacagacgatacctcggacggaaatgcttcttccggcagttcttcttcgggcaattcttctggtggaacaacagttgagacaccttcaaagctgaccgaagcggatctcttaaaacagggctatcaactgaagtggcaggacaactttgacggaaattttttaaaccgtgcagactggaatgtggaactgcatgaaaaaggctgggtcaacagtgagtggcaggaatatgtggattctgacaaaaatattcaggtcaaagacggaaaactgctgatcaagccggtggaaacggtgaatgcagacggaaccagaagctacacgtccggtcgtattaatacacagggcaaacatgattttaagtatggatattttgagtgccgtgcaaaagttccgaccggaaaaggctatctgccggcattctggatgatgccgacggacgaaaatctgtatggacagtggccaaaatgcggtgagatcgacatcatggaagtgatggggcaggaaacaaataaagcatatggtaccattcattacggagaaccgcatgatcagagtcagggaacctgtacggtagatgcaaaaaataattttgcagatcagtatcatacatatgcctgtgactgggagccaggaaagattacctggtatattgatggtgtgaaatttcatgaagagtccgactggttttctgcaaagagcgggcagggagaagtggcttatccggcaccgtttgatcagccgttttatatgattttgaatctggcggtcggtggcagctgggtagggtatccggatgattcgaccacctatgccgatcagcagtttgcagtggattatgtgaaagtatatcagaaagacagttatgacgaaaatgtggaaaaaccggtaaagaatgttattttaagagagccggatacaacgggaaattatattaacaacggtgatttctccatagcagagaatttaagtgatgacaaaaactggaaatttcttaccactttagatggtgatggaaaagcagaaattaagaatcatgagatggttatttctacagtaaatatgggaaccgcagattacagcattcagctggtacagccggatgtgccgttacaaaaaggcggaacatataaagtaacctttgatgcttatgcggatgaggcgcgtacaatgattgcagatatttccggaccggatcataattatacgaggtattggaaggatacaaaagtggaacttggaacacagaaaacgacatatacttatgtgtttcagatgacaggttccgatgatgccaacggacgtctggaatttaatctgggaaatgctgcttccacagcagcagtgcacctttccaatgtgcgcattgaaaagaccggatatgaagaaatcaaagaagacaccacaaagaaagtgcttgcagacggaaattatgtctacaacggttccttccaggaagggaagaaccgtctgggttactgggacatcacgaaaccggaaaatgcaaccacagaggtaaccggtctggaagatggacgccgtctgaaagtggtaagcccaaaaggaactgtggtaacagcaggacagcaggggcttgctctgagcggggatacagaatatgtgctcagtttttcggctcaggcaaacgaagcagaaactatgacagtacatgttgccggacagaaatttcaggcagaacttaccaatgaaaagaaaaattaccgtttttcctttcagacggcagcggatctgacagataagaatatttcctttgatctcgggctggggacaaccgtatatctcgacgatgtgcggattgatgaggacagtctgatcaaaaacggaagttttaatgcaggtatggcaggttttgaagtctattgctatacaccatccaatgtaacgtatgttgttgactccttaaacgaagacaatgcggcagatttcacaattaacgataccggagaagctgactggcatatccagttaaagcagacaggggtaaaactcgaacagggacaatggtatcgactctccctgaaaatgaaatcttctatcgaccgtaaagtgtcttatgcgttgcagagagatggaagcacccataaggatgcagatggaaatgaggactggactccatactgccaggaaaccgtagatctgaccggcgaatatcagacgatcacgaaagagtttcagatgaaagaggatacagatctggaaacgatctttaatattgccatgggtgcagtcggtggaaaacagatcacacagcagcacagaatctgtatggatgacattgtgctggaaaagatagaggcaccggagatcaagccggaggaaaccggaaagaatctgctgaccaatggagatttttcggatgaaacgagtagatggggcattaatacaaatgatggtcagacggcaacaacagtagttactcatggcggtattgtgtttcatgtgataaatccgggcgtatatgactgggatgttcagcttaatcagcatggatttacacttgaaaaaggatgtaaatatcgtgtaaaattcaaagtcacttcgacgaaagcacgaaccataaaactcggcttaatggataacaattgccagaagtggtatggcggagaagatatttctctgggggaagcagaggaaaaggaagttagttgtgaatttacgatgcagcaggacacagataatgattcgaacatgcttatttccatgggaaaaatcagggatgaaaatacaccagcttcagacattacactgacgaatttctctcttgagaagatcacagagtagtaccagaaagatagtttaaaaagaaaacagaaaagacaccatgacagaatccatttttacgacagggggcgtgtcatggcgtttttctgcatattgggggaagaaaagggggagaagaggagtaataaaaggaggcatttgaatgagaaagaagagttggaaacaggtagcggcaattgtcatatgtgcggcattattaagtggatgtacgggagaaaacggacagaaaaaaaataccgggcgtaaggaaggacaggttgtaaatatttattgctggaatgatgagtttaaggaaatttatgacaaatatgcatcagatcttgctaaaaaacacgatgttgaagtgaattttgtcataatttccagtgataacaatgcctatcagatcaatctggatgaagcattaaaagagcagaatacatgtattgatgatgacaaagtggatttgtttttaattgaggcagattatgcatcaaaatatgtaaagtcagataattccattgatgtaaaaaaaacagtgggactgaccgatgaggatctgaagcagcaatatgattatacaaagaaaattgtatcggaaaatggaatacaaaagggagtgacctggcaggcaacgccggggttgtttgcgtatcgcaggtccattgcaaaaaaggtattgggtacagacgatccggatcaggtacaaaagcaactgaaggattgggataagtttgatcaggttgcacagaagatgaatgccgccggatataaaatgttatcgggatatgatgattcctatcgggcattttccaacaatgtctcacatccctgggtggtcggtaacaagattgttatagatgaaaatatcaagaagtggattcgtcagacgaaggaatatgctcaaaaagattataacaatcataccacactgtggagtccgcagtggacgcaggatcagggaccggatgggaatgtttttggctttttctattcgacctggggtattaattttactctgatgggaaatgcattggcagacagtagtaaacccgcagaaaaaggaaatggaatttacggagattatgccgtgtgtgaaggtccacaggcatattattggggcggtacatggatgtgtgcggcgcagggaaccgataatattccttttatcagggatttgatgaagcgtctgacgtgtgatatcaaaaccatgaagcagattacattggatacgcaggactataccaataatgagaaagcaatggatgagattgcaaaaagtaactatcagtcggatttccttggtggacaaaatcatattgcactttttgcagaggctgcaaagaaaattgatatgagtaatatatcagattatgataaggactgcaatgagcagattcaacagtgtctgcatccgtattttgaaggtaaaatttcacttgcgcagggaatggacgatttttataaaaagatggagcaattgcatccggaattatcccattaatttaggcagaaagagaggaaatacctatgaagtggttgaatcagatcagtattaaagtaaaggttatgctgccaatttgtattttgggaattgttattcttttggcaagtatttcaagtcttgtaaattcgaaaaggctgttgcaggcgggggttgtaatttcgcaggattgttcgaagagtattgaactattgatggatatgtcatccgagctggaatccatggggaaaaatatgtatggacactgtgatgcggaaaattctatttccaaagaaagctttgcaacaaccatccatgaaaagctggaatctatggatagttattttaaacagtataaaaaacagaaaaaaacagcgcgggaaaaagaatatttcggggcattacaaaatcgctttaaaaagtataaagaaggaatggaacaggtccttaccgcaagttcaaaaggcgatgcggatggtgcaacggaggcaatcaatgtgatacagaaaccttcggaagattatcttgcaaagaaaatcagcagtctgattgctatgcggaaacaggcaatgaatgattcattacaagcacagcaggcagcatatgaattttcaagagattctgctattgtattcgttgcagtttcaatgcttatgattttgttttctctttggatttgtctgagagggattgtagcaccgatgcactatatcagtcagacattgcagaaaatggtggcagatattgaaaaaaatcagggaaatctttctgtaagattaaagatttcaggaaaagatgagattggtaaagtcggaaggaatgtaaatgcatttattgatacgcttcaaaatgttatgggacggattacagacagttctttgcgtatgaaccagattatccgggaggtggatgacaaggtacgtagttcaaacgaaaattcggatgatatttccgctgccatggaagaattatcggcatccatgatttccgttgcggatatggtttccgggattacaaaaaatatgaaagaagtggaagatcgtacgaaagaactttcggaaaaatcggatggtcttttatcctattcagatacgatggatcagaacgcggataaactcaaaaatgatgcaattttaaataaaaaaaatacgggagaaattgtcactgatattatcggaaaactgcaaacaacaattgaggaaagtaaaaaagtagaaaaagtcagtgaacttactaatgatattttaaatattgcagatcagaccaatctgcttgcattaaatgcatccattgaggcagcacgtgcaggggaagcaggacgtggttttgcagtagttgcctctgaaattggtaaattatcggaatccagcagggacgcagcggttaatatccagtccatcaatagtaccgtgattggaaccgtgcaggaattgataaaaaatgctaacgcgctggtaacttatatggaacagaatatacttccggattatgacaattttgtgtgcgctggggcacagtataatgatgatgcagtctatattaatgaagtggttgagaagtttcatcagatggcggcagatttaaaacagcgcaccgagtcagtaatggaatatatttcacagattcagagggcggtagaagaaggctctgaaggtattaatcttgctgcaaaaaatacagccacgctttccgaagaaatttcacacatttccagccaaatcatgcataataaaaaaatagctgatgtactcagtgaagaagcagaacactttatttaataaaggacacagatggagaaggtatgaaacgaaaaattgcaattattgcagacggatggcgcagacatattacatatgtctggattcggggatgcaggaattacatcaaagaacatgagctggatatagaaatttcggtatttcacagtttcggaaattttagcagggatgaaaaattcaatgcaggagaatacaatatcatccatctgccggatttgtcacagtttgatggtattattctggaagttacgaatatgctgaatcagaaaaagaggcagcagatcatacggattattcaggagtccggggtaccggcagtatcgctgcttgaaaaaattccgggattgtatcatgcaggactggacaattacgcaacaatggaacagatggtggagcatctgatagtggctcattcctgcaaaacattaaactatgtgggaggaccggcagacagccaggaaaatcttttgcgtcggcaggcttatgaagatgtcctgcaaagatatggaattccgcttgaaaatgacagaatctggaatgaaagctatgaagtggagagcggtgtccgtgcattcatacattttcaggaaaaacatctgctgccggatgcctttgtctgcgcaaatgagaatattgcggtggggctctgccatcaggcacagcaggaaggatttaaaattccggctgatttttgtgtgacaggatttgataattttgataaagcatcttattacagaccgcggattacgacggtgtcatacgagagagaagtcattgctgaggcagccatggatcttctggtacagatctgggggcagaatacaacagctgactgtaaaacggttcctgtacaaatgttgtttcaggatagttgtggctgtaaaccagaacaggtaagaagcaggagtgaatatattgaagaccggatttttcaggaagtgagggaaattgatctgcacaatgagattatggaattaaagcacaatcttatcgagtgtgaagattataagcagatggcacagtattttacaaaatgtgtctgtggtctgcgttgtaaaggcgtgcgtatctggatgaatcaggatctggtggaggaatcattgagcgattccacgggtgaggcttcttatattacagatggatatccggataccatgcacgtgatctgtgaaaagggaatggagcaggaatattcattgtatgtgtatgtaccactgcatttccgggagcgggaagtagggtatgttgttctggcagactgcgattatatgcttgaaaatcagttcttgtttgaaacaatgaatacgtatctggaatccctggaatatctgtatcgcaaactcaggcttcgaaaagcaaacgaaaaattatcccggttgtatgtgctggattctcttacagggttgtataaccgtatggcataccaggagtttgcagagcctttgtatgaaaaatgcagattgcaaaaaaaagcggtgacggttatgttcattgacgcggatcatctgaaatatatcaatgatacgtttgggcatgatatggggaatctggaaattcgtgggatagcggatgtgattcgtaaagtatttccaccggaagccgtttccatgcggtacggtggagatgagtttgttgtactgcttccgggatgcgaaaaaacgcaggctgaaagtttaaaggcagcgtttttaaaagcattggatgaaatatcgaaaagtcttcatgctgaatttgatgtggaagcgagtatcggatatgaggtagttctctgcggggaaaaaagtctcaatgaatgtatcaataatgcggatgaaaaaatgtatcagtttaaaaaagcgcggaaagcacagcgcgaataagtgctgtttctgggaaccggatgtccggttcccattttttctgaaatgattgcaaaagtacggaaaataccgtaagatataggaatgaagaaggagaacggcatgtat

SEQ ID NO: 968 - DNA, 971 bp, Unknown
  gut microbiota DNA sequence
tgttcaggttctgagaaaagaaccgttgaatattgaaaacagaataggacacgcatatcccacgagcttatatcgccttgtctatgacagggtggcagaatcccatttcgtgcgatgactatcctcagagctgtagccgattatgagaaacgtaacagcaggagcctttaaggataagagcagagggttgtgcctaccggattagcagccggaggtaatgagataataagtgcacctgaatttcagcaaaacgcattttcagagagtggctactttcgtaagtccagatgggcaggaaactacgaagtgtttgtggctggcaaaggatatgttacccgatacggggatggttaagaaaccgggaagatagtattttatcttcccacacaaactgatttatggtcaccgacagaaaagaaatgtttaggtgtgatggtgtggagagtactgataagtcagcttatgtgaggagataaagtgcgcacagtatcaaatcaatattatttataaggagattttaagatggaaagagcaattatatattgtgcaaaaacaggattagaggctacagatcattttgtgccggagctgcttgaaaagtattgtaaggataatggctatgaaattgtagctatgctttcagagcctgcttctacagaaggagtttcatttccgatgaaatatgcctttatcggtttaaatatggaggaagatgttaatacaatcataacactttcaaaggatatgattggtgcaacagatgagaccgttattgatacacttggaaaactcagcgaatatgatatctatgtggaggatattaatggagaacttgaagagtgttatgagatgatgcacaaagagcctgttcaggaaagtgatataagagggctggtgcttgatacggtatcaatgttctatcataacatcagggacggcagataggaggcaatatgcaggattccagagaa

SEQ ID NO: 969 - DNA, 89029 bp, Unknown
  gut microbiota DNA sequence
tgggaaatactaccgtgatggatacaacctgtacaaaaggatgaaaaagtataagaaagatcatcttcttttcctccataataagaatgtacctgccacgaataacgaagccgaacggctgctgagaaaatataaaagaaaacaggcgcaggctgtgtcattccggagtccgtcaagcatcgaccatctctgtaaatgcatgagcatgctggttttgatgcgcagaaaagagcaggccaatctgttccgcgagattgcagaaatatttgcataagaaaaccgatggttttgactacgattagtctataccatcggttcttttgttacaagtttacctctgaacagtaacgaaaattccgcaaaggtccgtgatgatgagcaaagtggtgacagcaacagtatcataaaccagaagaaaatgctggagaaatatgcaaccgaacagggatttaccaatctgcttcattattttatattctgaaacgttcgaagcatgcgaaatacctgttccaccgtatcggtcatattctgttttgcatggtcggtctgcatggcatcttcaagcgaaataacgccccgcacaatcggaaaaaaggcatcaattcctgctgcatgacaggcttttgcatcctctgtcacgcagccggaaaatgcaagcacaggtttttgaaattctctggcaatctttgcaacgccgacaggcgctttccccatgacggtctgaccatccagacagccttctccggtgatgacaatatctgcattttttatatagtcggaaagatgtgtttcttccagaatgatgtttacaccggattccagagtggcatggaaaaaggtgagaaaagcaaacccaagaccgccggcagccccggctcctgcatgcgcgggattcgttttcggaaagctttttccggcgagtgcggcataggaggaaagccactgatccatctgctggatcatggcaggatctgcgcctttttgaggaccgaaaacggcgctgcatccctgcgaaccgcagagcggatttgtcacatcacaggcaatccgaaacgtacattctttcagttccggcagcgcatgggagtctgaaattacagccagatcctttaagcccagagcaccatgacgtaccggaaccccttcctgatccagcaggtcaaatcccagtgcctgcagcataccgattcctccatcgtttgtggcacttccgccgattcctataataaaatgtctgcagcctctggaaatggcgtctctgatgacttccccaaccccgtaggttgttgtatacaaaggattccgttcggtttcggaaaggagtgtaattccggcagctccggacatttcgatgactgcagttttgccagcatccagaatgccgtaactgcaaagcaccggtttttcaagaggcccggttacgcatacctgtgtgcgtgtgccgccacagccaagcgtcaaagcttccaccgtgccttcgccaccgtctgcaagtgggcggatggtgatatctgcatccggatatatgcgccggattccggcagaggcactctccccggcctcaagggaagtcatgcttcctttaaaagaatcaatggcaataacaacgttcatgtatactctcctcctgatatctgatggttgtattacatgtcaccaggcggaaccggatgacatgcttcattataacatgaaaacagcggagaggaactggtgaataaaagaagtatgcatattatttgacacacgtcaaatgatattagaagttatatttgacgtgcgtcaaataatataaaagagggagaagtgctgcacgcgatgtggtaaatgatgtgaaccgctgccggagtcgggcaaagcccatatctttcatgtcgtacgaaacccaaaccggtctgaaactgatataataggtacgtaggtcaggaaagttccaataaggaacgtaccttaaatcaatcagtacagaatttggtacaattgtgagaattgtatttcaattgatcaaaagcgagacataaaaatactgcaatgaaaaaagataaaatgtggttacaacaacatattcttttcccgtttttgtgtatattgtaacggaagaatgaaaaaactgtttgtaagagagtctatataaatgggaaaggataaaatcatggaacacaacaagcgggtagaacagatcaaaacatatctggagcggctgagcgccggggaagaattggaaaaagtaagggcggatttcgcaaaagaatttaaagcggttgatccggcagagatcatgcaggcggagcaggaacttctgcaaggtggcacaccgcttgagaccgtgcagaaattgtgtgatgtccatgcggcactgttccgcggcgcaacgagtgaggagaaagttgccaacgcggaaaaagcggttgcggcatcggtaaaagagaaaaagctggcggctaccgcggctttaaccggaatcaccggacatccgctgcagacgtttactcgcgaaaatgaagtgttggaaaacgtcatccggaaatgccggaatgaaatagaggaaaccaataccctttcaccggagctgtttggaaagctgcgggaagttgcgatccattatgcaaagaaaggggatcttctgtatccgcatctgaaagtaaaatacgggatcagcggcccgtcggatgtgatgtggacaaccgatgatgagatcagggatgaactggcagcgctggcaaagcagctgccggttcaaaagacggaagatcactggctggaacgttttcgcattgtgttgcagcgcgtggaggatatgatctacaaggaagccaatattttcttcccgaactgtgccctgaatttcacggaggaagagtggtttggaatttaccgcgattcgaaagattatccggtctgctttggtgtggaaaatgcgacatgggaggcggcagagaagtatctgcatacagaaaattgcagtaaagatgtaaggaatggagaaatcatcatgccgggcgggcacctgaccgttgcacagcttaccgcaatgctcaacacgatcccgatggagatcacatttgttgatgaggacaatatcaatcgctttttcaatgaagggccaaaggatttcaaacgtccgggcatggcgatcgaccgcgaggtattttcctgccatccgccgaaagtggagcagcaggtgcggcacatcatcggggaattccggaaggggacgctcgacaaagtgccgatctggatggagaaaaacggaaaaaccatgctggttacctatatggcggtgcgggatgccacaggcacatatctcgggaccatagagctggtgcaggatatgggctttgccaaagagcatttcctttccgacgtaaaagcaaaagaagcagcgctgcgcgcaggtatggaagattaacttatttttgtttttccatatgatttaattccggaatcacggtagcaagcatcgtgagaaagcacaggcttccaccgatcacatttgagaccggttccgccataaacacacctcttgttcccatgccaagtgcatatgggagcaggtaggtcagtggcacaacaataaatactttacgaagcagggagaaaaaaattgcctgcttctttttatttaatgatttaaacgtggtctgtccgatgtattgcagatccatgaaaataaatgcggcaaaatacagttttaaggcaggaaccgcgtctttgatcagttcactgtcggaactgaaaatcccgatcaggaaatgtggtgcaacgataatgaccgaccacatggcggcggtatacacaaagatcataaccgccattgtaccgattgcctgttttacacgcttcgggcggtgcgccccgtaattgtagcttaaaatcggggaacttccctcattcatggcataaattggtgtctcgacaagctgccggacgctggagatgattgtcatcacggagatatagatatcgcctccggtcacggagagtacgttgttgcagcagatgctgactaaactgttggtaagctgcataataaatcctgcggttccgaggcttacgatgtttttggcagtttccgtgcaccgggagagttcgcttctggtcagaaaccgtacgttaagctccgatcgttttttcagaaaatagaggacaaatgcagcggagagtgtctgggaaatcacggttgcaattgcagcaccccggattccaagcgaaaagacgaagatgaaaactggatcgagaatgcagtttgccaccgcgccgatggcaacggatgtcatgccggtcatggcatatccctgcgcgttgataaacgaattcataccggtggagatcatggacggaagtgtgccgaccagatagatcatcaggtatggataggcataaacaagtgcggactttgatgccccgaacagaacaaggatcgggcgtgcaaacagaagtccaatgaccattaaaacaattgcgccgccgcagaccatcgtataggaggtattcataatttcggaagctttccgggaattattttccccccgccggatggaaaaaagcggagcaccgccgctgccgaacaggttgctgaaagccgtgatgatcacaataatcggaaaacataagccgaccgcgccgagagcggttgtgccaatatgcgggattcttgctatataaatgcggtctatgatgttgtaaagcaggcttaaaagctgcgcaaccagcatgggaatcgctgcgtttaagatgttgccggggatggagccatgttcaaaatcaattcgtttcattttttccttaaatccttttctttctgttgacatttagtataccatgaattaagatatatgaaaaatattacttttatgtcttaaacaaataaaaattatataaggagaagctatggatgtaaaacaactggaatacttccgggcaattgtggatgctggtacgatcagcggtgcggcgcgcgttctccacatgacacagccgccgctgagttatcaggtaaagatgctcgaagaagaacttcaggtgcagctttttttgcggggcaccaaaaagattacattaacggaagcaggaaaaacactgtatgacagggcgggcagtcttcttaccatggcggatattaccaagcgggaagtcataaaggcaagccaggcggcaacaatccacatcggatttacgccgtccacggtttctatgatgtccgattacctgatccgtttttccacgtcgcatccggatattcgctttgatatccacgagggatcgacatttacgctgcgagagcagttggaaaacggcgtggtcgatatcacgacactccggacaccgattgtgctcaaaggatgtgagagcaggactttgatgcaggaaaagctgcttgcaatggcggctgcagggaacccagttttagaaaaaaacaaagatgggatcacgctcgaggaactgtcagagcagaaactgatcctgtcccaccgctaccgcagttacctgttgtccgcgttcgaaaaaaaggggcttttgtgtgacatttactgtgagtgtgaagacgccagaacggcgatgactttggcggaaaaagggcttggaatcgccattcttccggcttctatgcacaagttgtcggatcagatgaagtcctgtgatattctggatgcggatcttacgacggaacttcttctcgcgtggcgaaagggacgcatgccggaggaagtgaaagcgtttcttgaaatgtggagatagaagtatcgtgcaattctcccgaaatttatccggtatgccatggaataatataaaactctgggcgcaaatgtatatgtgcccggagtttttaaattgtaaatttaaatttatcgccgatacataactgcttacatctttgaacaagtgagcaatcagtattatagattgtactctcgattcgaagaagtggataaccttttgaaatccccaaaatttttgcttcctgtgcggaggcaaacacaatatctaaagttttgtcggaatgatcaaaaataatattgtggttttgcagcacatcataaagggaagtgtcatttaaattttctccaaataaaaaagaaaaggattcaggaaaccggttgatttctaacaataccggtttttcatcggcataacgaatacgttccaatacgagaatctttttatcgggtgtaatatgcatgagttccatgtctttttcggtaggatcttctattgcaattttaatggttttcgcacctggaactgctcccattgtacggcacatttcagaaaatccggtaacaccttttgagatatttcgctggattcttttttcggcaacaaaagttccttttccggatttgcggtccagatatcctaattctgataaacctgcaagagcttttcggacagtgacccggctgacattgtaggttgtacttaactcattttctgttggaagacggctgcctgctttacgttttccggtgtcaatctcttcttttaactgatcctcaagttgtttgtatagtggtttggcaattgtattgtttaattccatgaaaaacctcgtaatgtgttttgatttgtattatacaatatattataatacaaagtttcagaattgtatatatttattttaaaagctgttttatattgacaaatgtattatattgtattatattttggatagaaacaaacgagacaaataaaaaaaggagaaatgaatatgagttatacaagcaaagacattaaaaacattgtagcagagattttggagaacaaaaaagacaaaggaggtgttaagagcctgtattttgttggttgtggagggtctcttggagctttgtatcctgcaaaaacatttatggagaaagagtgttcaaatattaaatccgcgctgatcaacagcaacgaatttgttcacagtacaccaaaagattttggagagaattcgatcatctgtctgtcctgccataagggaaatacaccggaaacgattgcagcagcaaagcttggtaaggaaaaaggagcagcagtaattattcttacatggctggaagaatctgaaattgtggagtttggtgactatattatccagtattcatttgatgcaagtccggatcatctcaaaggtgatattgattatgctggagaaaaaacaatgtgtgcgttgctcgtagcagtggaaacacttcaacagaccgcaggatatgaaaattatgataaattctacgaaggacttggtatgattaccggaattatccggaatgcaagaaaacatgtacaggcaagagctgaacagtttgctgaaacatacaaggacgataccgttatttatacgatgggaagcggagccggctatggggctgcatatatggaaagtatttgcattttcatggaaatgcagtggcttgattccagcagtattcatacaggagaatatttccatggaccgtttgaaatcacagatgcaaaccgtccgtttatgattcagatatcagaaggatctacccgtgaactggatgaaagggctttaaaattccttcatacatatgcaaagaggattgaagttctggacgcaaaagaacttggattatctacaattgatgcttctgttgtggattactttaaccattcactgtttaataatgtatatcctatttataaccatgaactggctgaaaagaaagaacatccgctttcaacacgtagatatatgtggaaagtagagtattaattcagaacatatttaattcgggcaaaagaatttataagcagacaaagacattgtatcctatgtttttgtctgcttattgtattgtagatacaaaataatacatacgcgatactgaaatagcctgagaacaaaaatatgcacaaaaatcggaactaaaatataggataattgacgaaaaacacacaggttcttgacaaaggtatgatacaaatataatattaaagcagatacaaaacaatacaaataagagcgatgtacgagaattgtattaaagtttgtattgtacggatatgcgcacatccaaaatgtaactgaaaaagacataaaagagagggaggacatgaatatgttctgggtagaattaatacttgtacttgccattatatttttgggggtacgtaagggtggtacatttttagcaatggctggtggtgttggaatgttaattatgacatttttctttcatgttacaccggcagatccgccagttaccgttattttaattatgattgcggtaattgtagcagctgcaacaatgcaggcatgtgggggattggatttcctggttcgcatagcagaaaagattcttcgcaggaatcctaggatgattacggtacttgcaccggttgtagcatatatttttacatttatgtgtggtacaggtcacattatttacagtttgcttccggtaattaatgaaatttctattgagacaggagttcgaccggaacgcccgatttcagcatccattatagcttcccagcaggcaatcacggcatgtccgatttcagcagcaacggtaggtattctggcttttatggctgaagcaacgaactataaaacggttaatatttttacactgcttgtagtctgtatcccggcaacactgattggtacagtcgcatgtgctcttgctgtaatgaagaaaggaaaagaactggcagaagatccggaatttcaggctcgtgtagcatccggacaggttcagactcttgtgaaaaacgagaatgctgcagaagttaaaacaacaaaagaggcaaaaatctctgttgcagtatttttggttgccatggtaggtattgtattgcttggcgcagtaagtgcattagttccaacactttcagatggaagcaaattaccgcttaccacagtaattgagatttttatgctggttgcagcagccgtaacggtattaattacaaaacttgacagcaataaggtactggatcagccagtatttaaaacaggaatgtttgctgttgttctggcatttggtctttgctggctggtgaatacatttattgcagatcagtcatcgtttattacagataatatgtcagttctcacgaatgaacatccatggatttatatcatagcagtgtttattgttggggcaataacaacaagtcagtcatcctctacaatgattatggttccgattggtattgcattagggcttccggcaaatattattgttgctggctggattgcatgttcatcaaattattttattcctgcttccggtcagtgcgttgcagcaattgcgtttgataccgcgggaacaacaaaaattggaaaatatgtgttaaatcacagctatatgcttcctggccttgtatgtactgtagtttcagtagtgtcagcaattttgataggagcagtagtattttaaaacataaggagaaaatctatgaaagaaccaaaaattatagcgattggagataatgtatgtgataaatatttatctcgtgggaaaatgtatccgggaggacaatgtgtcaatacatgcgtatatgcaaaatggaatggtgtcaattcggcatatcttggaaaatacggtaatgatgaagtagctgaatgtgtgcaggagacattaaaaaaattagagattgatgatacgcattgccgacattttcagggagaaaacggtttcgctttggtaacactgaaagaaacagaccgtgtttttcttggctcaaataaaggtggaattgcaaaagatcatgcatttgatttcaacgaagaagatatggattatattcagcaatatgatttgatttacacaaatcttaacagctatattgaacaggatctttcaaaattgtatcagacaaaggttccgattgcctatgatttttcaatgcgctggacagatgagtatttgagggatgtatgtccgtatgtaactgttgcaattatgtcatgtgcacatttgtcagaagatgaacgggagagagaaatgaaaaaggcacagaaatatggtgtttctgttgttcttggaactgtcggagaagaaggctcttatgtattatataaagataaatttttatatacaaaagcagtattggcagaggatgttatagatactatgggagcgggagattcttattttgcggcattcctaagtgatatgttaaaaaattccccacaacataagattttagatggttcagatgaacagatgtatgtaaaaattcaaaatgcaatgaaaaaggcatcggagtttgccgcaaagatgtgcgcaaaagaaggtgcatttggatatggagtaccaattacaggaagaacagaaatttagggaggtataagtatgaaaccagatatgtatgaaaataacgaagagggaattttatgtgtctataaaaatccaaagtggcttgtatgtattaaaaactggaaaccggacaatgatattaatgggattaaacacttggagatccatcattcgaccgatgagcagtttattcttgtacatggtaaagcgattctgattaccgcagaaaaaaaggaaaatggtttttctattgatctgacattgatggagcagggaaaagtatataatgttccggcagaatgctggttttattcaatcacccagaaagatacaaaaatagtatatgtacaagattccaattgctctatggaaaacagcgatttttgtgatctttcggaagaagaaatagcatggattcaggaaaaagcatcacggctgctggcataactaaaggatagatttatatgaagaaacaatatattctttttgattttgatggtgttattgtaaacacggaacctcaaaatgcacattatctgcaggaaactctcaaatcgtttggtgtatatatggatcacgaagagttaaaaggatttattggagttaacagccgtgaaaaaatattgcattatttgagccggtcgaaagaaaatgtttcatgggaaatgtaccagaaaagaagaaaagagatgggaaatacctatgaaaatgatgccatctgtcccatgccgggattacaggaattatttcaatggatgaagggacggaatctgaaagccggattggtaacatcaacgagcgcgaaatatattattacggctttaaaccggatcaaaatgacagattatttttcagttattgtatgtggggatatgtgcgaaaaaagaaagccctatccggatgggtacttaaaggcgatacagttattgcaggctgaaaaagatgaggttgttgcaattgaggattcctcaaccggtattcatgcggcaatacaggcaggaattgatgtgattggttatactggctcaggaataaaacaggatactggagaggcaactgctgttttttcttcatttcaggacattcagctttttttggaaacagcaattttataagtgtaacagcatacgttatatagcaggcggcagatgatttctgccgcctgttaagtttatcaatatttgtagttatagctcctctatgcaaaaagtctgacagaagaacaaaataggacatataaagaaaaaagggcaaaaatatccctttgtgtaagacaaatgggatatatggatgaaaaggtgcctaaaatgtcctgctgtgatatctgtatgggacatatagacaaaaagataataaaaaagtccttctgtaaaagtcaaacgggacatatggacgagaagatgctacaaatgtcctgttatgacatttgtatgggacataataagaactttttttcgcatatgtcccagctgacaggaaaagcaggacataatatacaaatttttctccatatgtcccggtttttcatagaatccatattcataaaatatgaaaaagtattatggacagaaaacatcaatgaacagtaagtatttgtaaaattatgaatagaatatcataaaggaaagcaggacaaccgctttacattattcagaccgtgtgatatactatataaaattcaacaactgtcacggatatctgatgacaggcgtttgtcaggagttttgtatacagagaatacagactgcgcgttggcgggatattgccgatgcgcagtcttttttagtgatgcagttgaggagagaaacaggtatatggggatagctcgggaaaaaaagaagaaaacattaaaggcaaaaatgcttggcatattgacgatgtgtgcgatgacaagccttctggctgcgggaattgtatcctatatggcactgagaatgatacagaatgaccgtatagagaataacatgaaaatgtatctggatcagattacgaagaatacggatgaagcctattatgatatgctcagtattgtgaactatatgggaccgggcggtctgatcggaaacgtaacggacagttatcttgatgctgtggataattttgacaggtttgttgaacagagatctcttagacaagaactttcgggactcggatatgtcaacacaaaactggtaggcgttacctattatgacaaggaagagaaaaaggaacttatcagcggtatgaatgtcagaacactggacggaagacagaacgcactgcctaaggttgtgaagtgtgcgggaaatgttatgcaggcagcccatgcgtcttttcttgggagtagtgagaaaacagttttttccgtcatgagggaagtagtttttggcaatgggaaaagactggaaatctacacagaaatagaggctgatatgaagaccccggaagaaataaataaggaaggatatccctacacttatattcagacggatgagagaggggttgcacaatacagcgtaaatcctgtcattatgcagggacagaaactgttttctgcatcactctcaaagggggagtatgaagtccagacgagagagggctataagatcatggcataccggagtcagatgggatacattaatgcagtggcactgccggacaatatatatcagaagaagattaaccagtggagaatgatgatgacactcatcatagttgtaacgtttctgctcttttccatgtctgtcctctatctttatcgtatgatctgccgaccgctgagtcaattccgcagacagatggtgcagattggggatggcactcttcaggcagtacatgaagagtcggacattgcagagtttgacagcctgatgagggaagtagaacagatgaagagacagattgagaatcttatcagcaatatggtagaaaaggaaaaaagtatacagaagatggagtttgagaaacttctctatcaaattaatcctcatttccttctcaatacactgaattcgattcagtggatggcacaaatgagtcaccaaagagagatcagtgagtttgtacagagactaaagaagcttctttcctataatctgggcaaagaaggccgccagacaacgttgcggatggagttggagattgtaaaggaatatattgcacttcagcagatgcggtatgattttattattgagatgaatatagaagatggcagttatcttgaccagccaacggtccgtatgctttttcaaccacttgtggagaacgcgatccgctatggtcttggggatgatgagaagatcagcatccaggtgtttgaagatgtggcaaggcatcttgctgttgtaactatttctgacagcggaaagggattgaatcaggaggagatagatgagatcaaccagccgtttgattatgactgggaatactggaagaatgagaacagaggtatcggactgcgctacgtcaaggctatgctggaatcattttatgatggacagacgagtttgtttgtaaacagcaaaaaagggttcggaaccagaattacgatccttcttcctgtccggaaaccggaagaaaaaaaagagaaagacaaagaggttacattggaagaaaataaggtgggacagacagatgaaagtattgattgtagatgacgacaaacttgccagaaaaggtctggtcgctattatggactgggaaaagtatggattcgaggtagtgggagatgtacagaatgggagaaaagcccttgaatttctccgaaatcatccggtggatattgtatttaccgatatagatatgccggaaattgatggattggaacttatgcagatgtgcggagaggaatttccggaaattaaatttgtaattctttctgtatatgagaatttcagttatgcacagacggcaatccgtatgggtgcgttagactatatctcaaagatcagtttttccccggaagagtgtggaacgatactggaacgggtcagtgaaaagtacatgcagacatgcagagatggacatgcagaagaggaaaatcaggaaaaagttgaagaactgaacagaagatggatgcacaccagatggattttcagtgagaaagaatttgaagatctctgtcagaaaacaaaagaaatcagtttgcggagtgcggagaggatttttgttaagagttttcataatattcagctcctgtcagatgaagaagtggaatttccatcgctggatacggttgaagagatgctggactgggtgcaccgctggagggaacatatttatgaagagagtcttagctcatcacagaaaaatgatatcagtgcttttgcagcggttatcaagtatgtggatggacatatcggggaggatcttcgctctgaagacgtggcagaacggatagggatgagcaggagttattttagtacaaggtttaaggagatgacgggggaaacatttcaccaatatgtgatacaaaggaaaatgaagactgcggcggaatggatagaggagggaaagaagagcattacaaggattgccgtagaacttggatatgataattttcattattttgcaaaagtatttgcacgggagcatgggtgtacgccttcggaatacagaaaagagagtaaaaatgtctgattttcatcggacattttttttgtgataaaaaatatttggtaagattagaaacaatatcatctagcaggatatgggggaagaagataaaataattaaaaaaaggaagggaggtatcatggtgtatattaaacaaaaaggaagggaggtcctggaatgtatatcaaacgatttgtgaagcattattatattatgctgattccggcacttttatggctgtttttctttagcattgttccgatgttcggtattgtcatggcatttcaagattataatccgggccagggtattttgcattctaagtttgtcgggcttgaaaattttaagtacatgtttcaaatgaacgatgtcaaacaggtactgtgtaataccgttgtaatcgcggtaggaaagattattgggaatattattttcccattgatttttgcacttctgcttaatgaattctgtattaagcggctcaagcgtccaatccagacaattgtttacctaccgtattttctgtcgtgggttattctggcaaagattgttttaaatatctttggatatactggtccaattaatcagctgatggaggcatttggtagaaatccgatcaattttttcggggagccatcattgttccagcctctggtgatcggcacagatatctggaaaggatttgggtacaatacggtagtttatctggcagcaatacttggggtagaccagagcctttatgaagcagcagcggcagacggagcaggaagattcaaacgtatctggcacataacgctcccgggaataaggacaacggtagcccttctggcaattttgtcacttggaaatgtgctcaatgcaggttttgatcagatctacaatttgtataatccgcttgtttattccactggtgatatcatagacacatgggtataccgtgcaggacttgagaacctgcagtactcgctggctacagcagttggactgtttaaatcggtgatcagcgttatcttaattgttataggatataagctggcagataagtttaccggttacaaactattctaaggaggtgcagtaaatgatagaaaataaaagtataggatcaaaagtattcgacgtagtaaatgttgtgatccttattttgatcacactggtctgcatcctgccggtatggtatgtcctttgcgtttccttaagtagcagggaggctgtcagtgcagggaaagttgctctctggccggtgggatttaatctcctgtcatataagaagatcttgggagaggggaatttctttacttcttttcttgtgtctattaaacgcgttgtgttaggtacaggagccagcatggtgtgtatacttttggcagcatatccgttgtcaagaacaaaaaaacagtttccgaagaggggcatcttcatgtggatctttgtattctgcatgcttttcaatggaggtactgttccgtggtatatcacaatgaagaattacggtctcatggacagcatatggggacttgtccttggtatggggcttcaggttttcaacgtcattctggcagtaaactttttcaagaatctgccagttgaactggaagaggcatgctttatagacggtggtggaccatggaggaatctgatctcaatttacattcctttggcaaaaccgatggtggcaacgatctcgctttttacgattgttcagtactggaacgagttctttcagggaatggttctaagtacaaaacaaagcagctatccgcttcagacatacatacagcagatggtagtaacattggattattccagtatgaatgttgaacagatcgcacaggcaatgaaactaaataaccagtcgctggacgcagcgaagatatttatcgccatgatcccggtgctgatcatatacccgtttttgcagaaatattttgtatctgggatcacgttgggatcggtaaaaggatagtatccggtcagaaagagtctggccaaaatagagaatagtaaaaacgaaaaggagaaaatggattatgaaactaaaaagaataattgctatagcgtgtacggcagctatgacggtatccttgatttcaggctgtggtggtgcatcagacaaagggcagaaagaagcggtcaaggaagcagaaggaacagcgaaagaagatctgcctctggcaaaatacccggagacggttacggtacatctgggcggaaaaatgaatccgaatgcaaagattccgaaaggaatgtcatttgaagacaactcctatacaaggcttctgaaagagaacctgaacatcgaggtagtatatgactggactgcatctacatcagactatgatgaaaaaatgagtctctgtatcggaagtaataccattccggaaatcatgaatgtaaatgcaacccagtacagggctctgttgaaatacgatatgatacagcctctggatgattattttgatgattatgcatctgacgcacttaagagttatgtaaaatctggcggcgatgagctgacggactgtatcacaaatgatgaagggaagatcatggcgattcctgccccgaacctgacagcaggcggtgtaaacgaaatgtggattcgtcaggactggctggatgctcttgggctggatgtaccacgcacatgggatgaactggcagaagtggctaaagcatttgtgacaagggatccagatggaaatggagagaatgacactatcggtattcttggaccaggaaattcggaccacatgaatgcagtaggcggcaaccagtttggacttgacccattgttcagctgttttcagtcatatccgcagtactggctgaagagtgaggacggatcggtagagtatggttcgattcagccggagacgaagactgcactggaaaatatctccaaactttatgcggatggtgttattgatccggagacacttgtcagaagtgatagcaaggagccacttcttgctggaaaagtaggaatctttttcggaccgtggtggtgtgcatatacatttgcggatacaactctgtcaggttcagcagactggcgggcatatttcacacctctttctgaggatggaaaatattatacgcatatggctgagccaacgacacagtatgtcgtagcgagcaaggactgcaaaaatccggaagctgcgtttaagatcattaactacctgattgcaaatgagcagacatgggtagaagagggcgtaacatctacggagatgggaaccgcagatttctatcctttgtttaatgcgtatgacaatgctgatgagatagagacatcttatgaaacgctgacgaaatatcttgcaggagatatcagtatggatgatgtagatttttcgacacataaactgctgaagaacgatatggaagcagttacggaacttaagaaaaagccttacgatgatttcagtcttaaatattggaatctggatagtgatctggcaaaaggcaatctgcctcgtctgattgcaatcatggtaggtgacgcgccacttgtaaatgaggaatatgttccggtttacaacgcttacaacggacagacggaaacaatggaagcgaaatgggcaaatctgaagaagatggaggaagagactttcgcaaagatcattatgggaaaagcagatatcagcgaattcgatactttcgttaaaaactggaagaatcagggtggtgatcagattctcaaagaaatcaacgatgaattaagtaagtaaaagagacggcggctgatggtgttcattagccgctgttccttaattggaggtataaaatgcgggaaaacaaagtaatctacggactgataggatatggtggaatgggcagatggcatacagaaatcctgtcaaatgtaccggaaattgaaattggtggtatctatgatatcaaggaagaaaagagaatagaagcaaaagaaaaaggtttttctgtgtatggatcggaagaggaaatgttatcagacccggatattgatgtcgtgctgattgccactccaaatgactgccataagccgattgcaatccgtgctatgcatgcggggaaaaacgtgatatcagagaaaccggtgactctgtcatcttctgatcttcaagagatggaaaatgttgccaaagaaaccggaaagttcctgacagtacaccagaacaggcgctgggatgatgatttcctgatcatacgaaagcttgtagaggagcagaagctggggcatgtcttccggatagaaagccgtgtgcatggttcaaggggtattccgggtgactggagaaaagaaaaaatacatggtggcggaatggttcttgactggggtgtacatttgctggatcagattctgtatctttacggagatagaaaaattgaaactgtatatgcatcacttacccatattaccaatcaggaagtggatgatgggttcaccacaatcctgacatttgaaggcggaacggaagtcttagttgaagtaggtaccaataattatatttccctgccaagatggtatgtactgggtgaagatggtactgcggtaatcagggactggcagttaaatggtgagatcatacggaaaacaggcataaccgaagagaaagtagtgccggtaaagacagcagcaggtctgaccaaaaccatggctccgagacgggaagatacaatcgtgaaagaagagctgccacatgtgtccggagatattgcggatttccataggaatgtagcagcagttataagagatggggcagagccggagattaagctcttccaggtgatgcgtgtaatgaaactaatggaagctattttccaatcagcagaaacaaaccaggtgattgattatagacagtatgaatcataagtatttatgaaggaacaggagaaaataagtatgaaacagataaaaataggaacatgcgttcctggagctaaggcagaagaatggttaaagggatttattggaaaaggatttgagacattttctcttaatttccatatgtcactggaagggactgaccttgataagctggcattgagcacggaaaaactgttgacaggtacggattccaaaatcacgacagttggatactattgcaatcctatccagtatgcagagcataggaaaacactggaaaatgtaatctgcactgccggaaaattcggagctacacatgtgagtacttttgcaggagcgtgggaaggaaagccggtagaatccgcatatgaagagtttggcaaggtattccgggaactggctgatcttgcagaagaaaagggagtgaagctgggaattgagaattgccttatggatggaacatgggaacatgcgacatgtaatatcggttttaaccctaaagcgtgggaagtgatgtttgaggaagtaaagaatgataacttcggactggaatgggagccgacacatcagatggtacagcttatcgatccggtaacagagctgagaaaatggtgcaaaaaaatagtacatatacatggaaaagatgcaacaatagactgggatgctgtaagacatagtggcatatcaggcgcagtcccatttgtatggcatcgtatgccgggctttggtgacacgaactggagagatatcatttctattttaagaagtaacggatatgaggacgatatctgcattgagggataccatgatcctgtatattccggagaactggagatgaccggacagcttcatgcactgaattatctgaaatggtgcaggggtggagattttacaccaactccatgggcaaaatagggaaaacagatacaggaggatatttctatgaaacttgggtttattacatcaatccttgacggatggacttatgaacaaatgatggattttgcttcagagcagggatttgaatgtgtggaagtggcatgctggccagaagaaaaagcagaaagaagatatgcgggtgtaagccatatagatgcagaacgggtaaaccaggatgatgaatatgcagcccatattatggcatatgcagaaaaagcgggagtagaaatctctgcactggcatattatcctaacgtaatgacggcagataaagagaaaagaaatgctgctattgaacatctgaagaatgtcatacgtgcaagtaaaaagttaggtgttggcatgatcacaacatttatcggaagggatcagaccaaaaatgtacgggaaaatcttgaacttgtaaaagaaatatggccaccaatcataaaactggcagaggtatgtgacgtaaaaatagcaattgaaaactgcccgatgctttttggtgaggaacagtggcccggaggacagaatctgatgacaactccgccaatctggagagaggtcttcaagatcctggacagtgataatcttggcattaattacgatccatcccactttatctggcagatgatcgactatatccgcccgctttatgaatttaaggataaaatattccatgttcattacaaggatatcaagatatacagggataaattagagtcctgtggcatcatggcttatccgctggaatatatgtcacctaagattccgggacttggcgatgtggactggggaaaatacgtgtcagcacttactgatataggatatgatggctgtacatgtatcgaaatagaagataaagcatttgaggattccaaggaaaaggtggagaagtctttaattctcagtaaaagatatctggagaaatatgttatataacacagaaaagtgcaaataaggaggaaataccatgagaaaattaagagcaggaatcgtaggctgtggagggattgctaacggaaaacatctcccggctatgcagaaaagtggtctctatgaggtggtggctttttgtgacatcatcatagagcgtgcgcaggaaacaaaagaaaaatttggcacagaagatgcaaaagtatttgaagattaccgtgaacttctaaaagaagatctggatgttgtatatgtaactaccccaaaccgttcccatgcagaaatttctatagcagcaatggaggcaggaagagatgtcatgtgtgagaagccaatggcaaaaaattatgcagaagcacagaagatggtcgaaactgctgaaagaacacacagagttctcaacataggatatcagaaccgttatcgtacagattcattgtatctgaaggaaatgtgcaaaagtgatgaattgggagaaatctattttgccaaagcacatgcactcagaagaagagctgttccgacctggggtgtgttcctgaatgaagaagaacagggcggcggtcctctgattgatattggtacacatgcactggatctgacattatggatgatggataattatgaagtgcagtctgttacgggagcttccttccacaagctgtctgatcagacagaccagggaaatgcatttggtaactgggatccggataagttctgtgtagaagattctgcttttggatttatccgtatgaaaaatggggcagtgatcgaactggaatcagcctgggcactgaacacactggaggttgatgaggcaaaaacaagcctgtgtggtaccaaagccggagctgatatgaaagatggccttaggatcaattacatccaccataatgcacaggtagtagagaaaccggaattatcaagcggtggagtagcatttttctcaggaaaagaaaagtcagcagcagactatgaacaggaattgttttaccacatcgttgttgatggggcagaacaggttgtgaagcctgcacaggctgcagttgtcacacgtattctggaagcggtgtaccgttcagcagagagtggagaaaccatttattttgattgagggaaaagaagattatggaacaaagaaaattaaaaaagttgttgtctgagatgtcattgcgtgaaaagattgggcagatgatacagctgactggaatttactttgatgatgatgcggtacttaccggggaggtgggggaagaccagccacctcagtgggtgactcagtatgctggttctgtactaggtatgatcggggcagaaaagctcaggggaattcagaaaaaatatgtggaagcgcatccgcatcatattccattgctgtttatggcagatgtcatacatgggtgcaggaccatagctccgattcctttgggacaggcttgttcgtttcatccggaactggttagaaagatggcgggacatgccgcagcagagtctgcttctgaggggatcagggctacgttttctccaatgattgatgtatccagagacccgaggtgggggcggataatggagtctttcggagaggatccttttctgaacggagttatgggaaccgcaatgcttagaggatatcagggcgaagaaggaaaagacccggcagggaacaaaaaaataccggagtccggtatcgcaggctgtttaaagcattttgcaggttatggtgcagtgagtgcgggaagagaatacaatgatgtggaaatatcacagagaaccttccgggaacagtatctcaaaccattccgtatggcaatgcatgcagatccggcaatggtgatgacagcgtttaatgcagttgaccgcagaccggtcagtggaaacaaggaactgcttgaaggcactctcagggaagaaatgggtttcagtggcactgtgatttcagattggggatccatagggcagttggaggaacagaatgtagtgtcaagccagaaagaggccgcagaggccgcagtccgtgcgggagttgacattgacatgatgagtccggcatatatgttccatctggaagaactggttaaagaagggagtattccaacttcgttgatagacaaaagtgcatggaatgtgctggtgatgaagaatcggcttggcttgtttgaaaatccatttgcaggaatgcagggagaagaaccgttgtctgctgaggcaaagaaaaccgcgcttgcgctggcatgtgagagttcggttcttctgaaaaatgatgatatgcttcctctgaaaccggagaggaaggtattttggggcggaccttatgtggagtcaagggaattgctgagcagatgggcaattttcggccgttatgatgatgtggaaacgatcagagaagtcctgaaagcccggaagatgccggttcgttttctgccagaatgtgagattctgacagaagaggaaaggaggctgtggcaggctgaaaactgtagaattcaggacagcggagaacaggataaagagatacctgaaatatgcgtgaatagtggaaaacaatatgccacactggatgaaattgaaccggaggataccgtggtacttgtacttggagaacatgaggcacagtcaggtgaagccgcgagcagggcatttcttgatctgccggaagggcagcagaagttttttgatgcagtagctgaccgtacctcccatattgtgacggtcattctatctggcaggccgttggatatacggaaaatagcggagaaatcccaggctgtcctttttgtctggagaccgggaacaatgggagctgaggctgttgttcgcttggtgtatggagaagagaccccatcagggaaactgtctgtgagcataccatggtgtgtgggacaggtgcctgtcagttactgggatgtaaagaccggacaccggatggtagaaacgaatccggagaatcgctttacgagccggtatatggatattccgaatgaaccgctttatccatttggattcggtctctcttacacagagttcaccattacgccccccatatttgagaaacaggaaagagaggataagattgacatatcctgcaaggtgaagaatgtgggagaagtgcctggggcagaagtcgtgcagtgttatgtggagacactttgtgctcctgttgtgcgaccggatagagaacttatccggtttcggaaaatttttctgttgccgggtgaagagcaggaagtaaaatttacggttaatcggaaggaactagctttttatggagagaatatggaactcatagatggagatgtccagtttcgttttattgttggaaacagtagtaggtcagaagcggggagtatcctttatgccttttgagttgacatttgatgaatgattctccgggcattttgagaatctcaaatgtcaggaagaacataatttaaagcaggggacattgtgatggaaagaatcacaatgtcccctaaaattttttcgggatatacaaatccctaccccaaaaatatgaagaaagtattatggacagaaaacatcaatggacaggaatcatttgtaaaatcatggatagaatatcggaagaaatataagtgcaaagacagaatgtttgtggtatgctaaagacaggaatctggtcgtgacggttcgttggtaaagcggtggatggttacgaatgacattacggaggtgtcaggcatgggaagttatctgaatccgggctgcaaaggctttgaggagagcttaaattccgcaatttatgtagataaaactgggttaatcgaaaaaataaatgcggttgttaacacacggcagaaatatatttgtgtcagccgtccgcggcgatttggaaaatctatggcgacggatatgctggcagcatattacgatcagagcgtcgatacggcgcggttgtttgatactctgcagattgcaaaggcagagacttatcagaaataccggaatcaatatgatgtgctgaaagtgaatatgcaggaatttttaagcatgacgcacagtatggatgaaatgcttgcggtttttcaaaaacgcatgattgcagatctgaaaagaggatatcctgattatgtcatggatggagaagacagtctggtgtttgcgatgaaagacgtatatgcacatacgaagtgcccgtttatcatactgatcgacgaatgggactgtctgttccgcgagtacaagcaggataaagaggcgcaaaaaaaatatctggatttcctgcgggtatggatgaaagatcaggaatatgtggcacttgcctacatgaccggaattttaccgataaaaaaatacggttcgcattcggcactcaacatgtttacggaatattccatgaccaatccacgcgagatggcggagtttttcggttttaccgaagaggaagtgcacgcattgtgcgcaacatacaagcgcaattttgaagaagcgcaggcgtggtatgatggctatgaacttgtcgcaatggacggagaaaaccccaaaatctattccatgtacagcccgaaatcagtggtcgatgcaatgttaagcggtctgtatgataattactggaatcagaccgaaacatatgaggcattaaaaatttatatccagatgaattttgacgggttaaaagatgccattgtgcggatgcttgccggggatcgtgtggaaatcaatacagggacattttccaatgatatgacaacattccagaaccgggatgatgttctgacactcctggttcatctgggttatctgagttatcactggatggacaaaacggtgtcgattccaaacaaagaagtgtcacaggaatatgtaaatgcaatcagtaccatggactggcatgaggtgattgattctgtcgaagcgtcgaaaaatctgctggaagcgttatggatgcaggacgaagaggcagtggcagcaggcattgataaagcgcatcgtgagatttccattttgcagtacaacaatgaaaattcgctggcatgtacgatcaatctggcgttttattttgcacgggaatactacacgatcataagggaatttccgaccggaaaagggttcgcggatctgtgttttattccaagaaaaatgcatgcagacaaaccggcggttgtgattgaactgaaatgggaaaaatccgcacagggagccattgcgcagatcaaagaccggcactatacagatgccttaaaggagtatcggggaaatctgctccttgccggaatcaactacaacagagagacaaaaacacatacgtgtgtgattgagcaattaacaaaagaagactgacaggaggaaaccaaaatgagcaacgtattagaagaaatgaaaaccagaagaagcatccgaaaattcaaaccggatgccatcccgcaggaaattttagacaagatcattgaagcgggaacctatgcggcaaacggcagaggcgcacagaatgtcatcatcattcaggtgacaaacaaagagaagcgcgatgaaatcgcaaagaagaatgcagaaatcatgggaagtgagggtgatccgttttacggcgcaccagcaatgctcatcgttttaggcaaaaaagactggccgacacatgtctatgacggcagtcttgtgatgggaaacctcatgcttgcagcccatgatctgggaatcggcagctgctggattcaccgcgcgaaagaggaatttgaaagcagctggggcagggaactgcttgcatcccttgggattgaggatgaatatgagggaatcggacactgtgcgctcggctatgtggacggggattatccggatgttattccaagaaaagaaaaccgcgtattctatatcagatagggcggaactgccatgagagaagagtatcgcgtttattatgaaaattatgaagaactggcccaagaagaacctggtgcagagattcctttgcaaaaggatattgtgtgggaaaataaaaattcccagagtgaacgatggaaagcattgtcggtttttgcctgtccacaggggctggtactggaactggcaaagcaggtggcgtcaaaacagtaccttgcgttttatgagaaatggaaagaggcggacgaagaccggcttacggaccggcagctgtcgcagattgaggcagaatccccacttggtgaatgcccggcagtgttgcttacctgtaatggggaggaactgcaaagcgacggaaccatggggatgggctggtatccgtcagacattctggaaaagctgaaatgggaacaggatccggaggcagaagcctgcaggcagcattatggtttagatcctgcatacctctggtggatcgggcgttttcattttatgtggaagcagccggtaactgccagtaagatacaaaaccttgtgctgacattgcaggcagaagaaaaaagaatctatggagaagaaagttttattcttcgcacaggcgatcagatccgtttttcacatccggtcacagggcagacctaccggctggatgtgctggaaatagcagaggaagaaataccggcagaacggatgccggacgatgatatgtgttacccacgttttgcgcagagcatgcgctacaaactgacacccgatgatccggccgtttctctcgaggacgattccccggcagaaagaatttataaaaagaatccggacggttcccaaagcgaagtgagtggggcgatttcattttttcttatgggaaaattgaaaccagagaagcagaaccgtctgacaaccggaaatctgcattatgccccggttacggagaccgcgtggattccggtatttgaggtgaaacgaaaggaagacattacggtcgaagcgatgcccggacacaaaaattaaggtagaaggacaaacgccggattgcgataacgaaaaaaggagataaaaaatatgccttgtacaacgatattagtaggaaaaaatgcaacctatgatggttcaaccatgattgcgagaaatgatgatgcgggtggaaatgatcactttacgccaaagaaaatgattgtggtgcagccaaaggagcagccacgtgtatacaaagcggtactttcttctgtagaaattccgcttccagaaaatccgcttcgctatacggctatgccaaatgcagtggaagggaaaggaatctggggtgcatgcggagtcaatgaagcacggaccggaatgacggcaaccgagacaatcacatccaatccacgtgtactcggtgcagatccgctggtggaaaacggcattggagaggaagatattgtatcgttagtacttccttatatccacaatgcaagagagggtgttcagcgattgggagaacttctggaaacctatggcacttatgaaatgaatggaattgccttttccgatcagaatgaaatctggtggatggagaccattggcggacatcattggattgcacgccgtgtgccggatgatgcgtatgtggttatgccaaatcagcttggaattgatgcatttgatctggatgatgcatttaccatgcaggaaaatcatatgtgttccgcagatatgcgggagtttatttcggatcatcacctgaatctatccatggatggcactttaaatccgcgcgaagcttttggcagccatgacgatgcagatcatgtgtacaatacaccgcgtgcgtggtatatgctgcgctgcctgaatccacacacatacaactgggatggaccggatgcggattttacaccggagtccgatgatctgccatggacactggtaccggagcgcaagattacggtggaagatgtgaaatatgtgctttcctcgcattatcagggaacgccttacgatccatatggagcgtatggagatccggggcagcgtggcatgtatcgttccatcggtatcaaccgcaatgattttgttggtctcgtgcatatccgcccggagcatggagaggatgccaatgtactggaatgggttgcgtatggttccaatgcctttaatgccatggtgccgttttatgcacaggtggagaaaactccggaatatgtggccaatacgacagcagaagtttctacggataatttttactgggtaagccggatgattggtgcgatggcagatgcctcttataagaaatcagtgttccatgtcgagcggtatcaggagaaagtgctgtctaaaggacatgagattatcaatcattatgataagctgctggaaaaagaaactgacgcaggaaagcgcatggcacttaagacggaagcaaacaatgcggtggcagatatggtaaaaaaagaagccgccgatacactcgataaagttctgtttgaactgtgcggacagatgaagaatgcatttgcccgttccgatgcttaacgcatcagtttccgccgcagaagcagatatgccgtgatcatagccgtaccggtcagtacccaggagatcggatagataatcataacaacccagaattcatgtacggcacggcagacggtgttgatccagatgaggcgcagcacgcaggagccgaccacggtgatcagagccggtgtcagggaatggccaaagcctcgcatggcaccgccgctgatctcgtaagtggaggtcagaagttccagtgtggtgacgatcagaaggcgctgtacggcaaaagtcaggacattcggatcggttgtgtacaggcgaaggaaaaagtcccggccgagtacaaaaacaccggataacaggccacagaatatcacggaaaaaatcatgcagagacggtatacttttttgcaccgctgaaaatccccggcaccgtaattctggctcgtaaaagtaacggtagtctgggcaaatgcgtttaccataaaatacgcaaaaaattcaaagttcagtgcagctgcagatcctgcgatagcgtttgatccaaaactgttaatcatgctctggatgcagacgttggcaagggaaaagaccatgccctgcagaccggcaggaacgccaatgatcaggatttttttcaattcgccccagtcaatggacaagccacagagtctgacacggattggttcctgttcatgcagtaaaatataaaacagaataccggaacttacaatattagaaacaacggtggcaattgcgacaccggatactcccagatgaaatacaatgacaagaatcaggttcagtccggtattgatgattccggcggcaatcagggcatacagtgggcgacggctgtcaccgatgctgcgcaggattgaggaactgaaatcataaagcatgataaatggcatgccgagaaaatagatccgcagatataaaactgccagatcgataacatcttttggagttcccatcagtgtcagtaccggtctggcaatgaactgccccagtacaagcacgaaaatgccgctgcataaagcgacaacgatggcggtgtgaattgccccttttacatgttcttcggctttctgtccgatgtagcgggaaataattacgttggaaccgagtgaaattccgatgaacagattaatcatcagtgcgatgagcgaactgttgcttcccacggccgccaatgcacggctgcttgcaaaacggccgaccactgcggtatccacagaattaaataattgctgtaagatgctgctggcagccagaggcagagcaaaaatcagtaatttattccacagtgttccgtgggtcatatcaattgtatttttctgctttattttcatagttataaaaccttctttttatcctgtttactggcaaacacgattataatcccgggcaaaaacaaaagtcaatagccaggcagacgggttttgaccttttgcataattgggtatataatcaacaaggagacagggagaggtatatcaaaataaaggtggggtatgaaaaagaaaagaagaacgaagaaggtagcgttttccattcggagcaagctgctgttattgctgtctgtatcaatgttgccatttctgctgattgcagtatatctgttaatttccatagctaattacaaccagacatatcatgagattgtggatcgtcttaccattgcaaacacctacaatattcaattcaaagaacagatggatgaaagtctttacaaagtcgttgtgggatatgtttcgatggacaatattgcaaatgatgagacgcttaaagacccgtatgtgcttatccggaacctgaagaagagctgtaccggtttgcgggatgtgacgagtgattatgaaagccgtatgtggctggatagtctgctgcgcaatgtagatacactcaaaaaccgtgtggatgatattgcagaaaatgtcaaaaagggtgatcgctacgatgagaacatccggcagctggatgacaatatctatatcctgacagaactgattcaggaggacattcagtactatatttattatcagacaaattacatggaggctgtgacaaacaccttaaaccagcagatccacacatttgttattgtgtttgctgtagttcttgcggcactggggattgttgtcgggggcgcaggtttttttgttacgtccggaatattacgcccgctgagacagctttacaatgcgaccggagagatttcggagggaaattttgctgtgcggacacacgtaaaatcgcacgatgaagtggcggtgcttgcacacggatttaacgatatggcggaaaatatacagattctggtgaataaggtgcgtgaggatgaacagaaaatgcggaaggcagatttacgtctgctgcaggagcagattaatccccattttttatacaacacactggatacgattgtgtggctgattgagtgtaacgagacagaacaggcaacggaaatggttgttaccctgtctgattttttcagacttgtactcagtcatggtcaggaatttatcagtatccgcatggaggaacagcatgtcaggagttatttgcagattcaggagacccgttatcatgatattatggaatatcatattttaatagatccggagctctatggctatcagattcctaaaatgacattgcagccaatcgtagaaaatgcactgtatcatgggatcaaatgcaagcgctccaaaggacagatctgtatccgtggagaaaagaaacaggatctgctgatattgacggtgacagatgacggcgtggggatggaggaagccgatctgcaggatttgcaaaaagagattgaaaagccatgcaaacagacggatcgtggctttggactcgcaaacgtcaatgaacgcctgcacatgtattttggcgcggaatatggggtaaagattgcatccagaccgggggaagggacgcaggtgacgatcgtgattccggcggtgcacaacgtaacaggggaggcgataacatgaaaaagaaaggcagatggataccggtcatcgggtgtttgatgctggtgctttttctggcaggttgtggaaaaatgatagatattcaaagtacggcagagcaggagattcccagtcagaatcaaattgtggtaggggtgtcacagcttggcagcgagtccatgtggcgtaccgcaaattcggcatccatccaacaggcactgtgcaaagaaaacggttattttttactgtttaacaatgccaggcaaaaacaggaaaaccagattaaagcaattcgcagttatatttcgcagcgtgtggattatattgtcttttcacccattgtggaggatggctgggaaaccgtgctgcaggaagcaaaagaggctgatattccggtgattgtcatggatcggaatgtcagctgtgatccatcgctgtatacggcgtgggtcggttccgattttacggaagaaggaagaaatgccgcgcgctggctggaggaagacctgaaggggaagaaatttgatcaaaaggaaacggtacatatcgtggtactgcgggggacttctaatgcatctgcaacgttagggcgcacaaaagggtttgcagagattgcaaagacgcatccgaactgggaaattctggattccgacgatgctgattttaccacggcaaaaggcagagaagtgatggaaaaatatctgcagaaatataaagatattgatgtggttgtatcgcagaatgatgatatgacgtttggtgcaatcgaggcaattcgtgcggccggaaagacgaccgggacgggaggcgatattacgctgatttcttttgacggaacgaggagtgcacttgaaaaagtaaagtccggcgtgatcaatgtggatattgaatgtaatccgttgcagggaacatacatacaggaaattatcaaccggctgggagacggtgagccggtagacaaaattaattatgtagaagaaaaagtgtatacacaaaaaaatgtgctttctgttttgggagacagagtgtattaaaggggataaaacaaatgttaaaagtatttttggtggaagatgagaccgttatccgtgaggggctgcgggaccggattccctgggaacagtatgggtatcggtttgtcggggaggcagcagacggtgaagttgcactgccgctgattcgaaagacacgtccggatgtactgattaccgatattaagatgccgtttatggacgggctgtcactcagccggattgtgcgggaggaattcccgaagacaaagatactcattatcagcggttatgatgattttgaatatgcgagagaagcaatttccattggcgtggatcagtatattctgaaaccggttacgagaatgagtctgcgcaaggtgctgcaggaattaaaagaaaaaatcgaggcagagcaggagcaggaagattttcagagcaaactggcaaacgaaatgcacgaatatgagcagttttccataaggcatttctttgagcaggtgttagaaggcgagctttgtgtaacagaaatttatgatgaagctgccaaatggtcgctggatctgtcagcatcgtgttacaatctgctgtttttgtacgtgcagcaggaaaaagagaatggttccgagcgggagatgaatacttttgtgcacctgcaggaagaaattctgcagtattttctgcgttttccgcaatatatcctgtttcgctggaacgtcaactgttatggggttttagtcaaatgcgatgcggaggaaatggaagattatacacagcgggcgattgcacagatccagatgaactgcgagtcacaaaacgccaatgcagactggtatgttgttgtgggaacacctgtggaacggctgtcgatgctgaaagagtgttatgatcgtgtaaatcattatggtgcatatcgttttttgtatccgcaaatgcatgtactttcggaagagacattaaaaagttatctgccggcgcaggatgacacgcagattgcggaagtagatgcaacaaaaatgtcaccggaaattatctcggaatttctggcaaaaggaagcagcaaagaagtatacaactttgtagagtcttatctgcagagcatatccgaggtaatacattccgtgatattccgtgactatgttgtgcttaatatccggtttacggcgattgcgtttatggagcgaaacggtgtgacaaaagaagaatttctggcgcatatcggcaaatacggaaccaatgtgcatgtgcagcaggacgaggtatttgaatatttcctgagtattttacagacggcaatcgatctgcgtgatgaacagaacaccaatctgagcagtaaaacgttaaaaaaagcacttgcttatattgatgagcattacacgagtgagaatttatcgctgggtaccgttgcgtgcgaggtacaggtgggcgctaattatttaagttctgtcttcagtcagaatatgcagaagacatttaccgaatatatttcggaaaaacgtatggaaaaggcaaaaaagctactgaaaagtacggaacttccgacatcggaaattgccgcacaggtggggtacaaagatcctcattatttcagttttgtatttaaaaagacgcaggggtgcagtccgcgtgaataccgcagcggtatttaaagtttccaggaaatttctgtggaagagactaaaatcccctgcagctggtggaggagaaccccggcggcgcggctgccaggcgcttcggccggggtcagggagagaaactctgtgtgtccaaagtggcacaggtagctgtggtcaaaggaggcaaccgtaatctccggtggctgtggcaggtctgagacagcacggcaaagtgcataggcaatggtatcattataacagacaatagcggtgcaggaagaaatgagtttctgcatcgctttttgtatgccatagtccggatcatcggaaaaataccagcatatcagggaatcttccggaagtgcatctgtgtcccgcagggcatgcagcatcccctggcagcgcaaaagtccggaacgcatatccgcaggaaagatcgcaccgatgcgggtatggccggtggcgagcagatgccgggtgagcaaaatgccaccgccaaagtcatccatggtgacgcatggacaattggtcagttccggataggattcctgtaaaaagagaacagggcatttctttttctgcagtttacggtacagatccagattcgggttcgtgcgcgcggtttttacaccttccacaagcagggcgcgtggcggctggtggagaatcttctgtaaaagagtatgttctgtggaaaaggtgttttccgtgatgtgtacagtcgtggaaaagccctgtgctgcaagtgtttttttgatgtcatgcaaaagcatcggatacaaataagcagagtcactggagagcagaaggtcgatccggtcctctccgcggctgcgtcccgtgatataggacccgcttccctgccttttttcgattaatccctcctgttccagaacggacagtgcctgccgcacggtctggcggctcactttatagcgctggctgatggcagcttcggttggaagccggtgaattccattggctgtataatccggtaattgttcgcgcagacgtcctgccagccatttatatttgattgccataaaatttttcctttctttgatggaaacaggcgtgtaattattttttttatcaaagaaaattttacctttttcaaaaacaatccacttttccagagaaatttatcgttttcaccaataagatttcagacagaatctcatcagaaattacagaaaataccataaaatcaaaagattttccacctcaaatcaaagatctttccacataaaaataaatttgtattttttttagatgatatcatacaaaatatgtattgtaaacatattacaaaccgtttaaaacaggcataaatcagattgaaacagaaaaatacggatggtatagtaaatgcacaagcaaacaaaagatttcatattgggaggtaaaagggtatgaaaaaaagaatcttagcaatgttgacagcaacaatgatggtacttggactggcagcctgcggggccaccgatacaaaggacggagccggagatacatcagcagccggcagtggttcgagcggagatctgattaaggtcggaatcattaacaatgatccaaacgagtccggatatcgtaccgcaaacgataaagacatgaagaacatgtttacaaaagaaaacggttacgatgcatcatttgcatacagcttaaagaacgatgaacagattacagcagcacagaaattcattcaggatggtgtggattacttacttctttccgcagcagacacatctggatgggattccgtattaaaggatgcacaggatgcaggaacacaggtaattctttttgaccgtgttatcgatgcagatgaaagcctgtatgcagcatcaatcgtatctgatatggataaagaaggacagactgcatgtgactggttaaaggcacagaatcttgatgagtataacatcattcacattcagggtgttatgggatctgcagcacagaaaggaagatccggagcattaacagatacagcagcagctgaaggatggaacattgtaaatgagcagactgcagagtggaatgcagaaaaagcacagcagatcgtacagtccgttatcgacagtggagagaaattcaacgttatctatgcagagaacgatgatatggcaaagggtgctgttgccgctcttgacaaagcaaatatttctcacggtgttggcaaagacgttgtcgttatgggatttgactgcaacaagtgggcattacaggaactgttagatcagaactggaactatgatggacagtgtaatccattccaggcttcttacattgccgatgttatccagaaattacagaacaatgaggaaatcacagagaagaccatcatcatggatgagaaaggttttgatgcaacaaccatcacagaggatgatgtaaataaatacggtatctaaacaaaacaggaagcatttggcgcggcgccgcgtatgaggaaaacgcagcgccgcgttttctaaccaaaaaagcaaggggtgaataagctggtgaaagaaaatgttgtattacaaatgaaaaatatccacaaaaactttacaggggtaaaggcattgcaggcggttgatttctccctgcgtgaaggagaaattcacgcgctgatgggtgaaaacggcgcgggaaaatctacattgattaaggtgctgaccggcgtatatgaaaaagatgagggagaaattttcctcaaaggaaacgacaaagcagtggcaattcattcgccgcaggatgcacagaatcttggaatcagtaccgtgtatcaggaaattacgctttgcccgaatctgtcggtagcagaaaacatgtttatcggacgaacaaaaggaagaatgcagaactggaaaaaaatgaacgccgatgcagacagaattctgcaatcactcgatattccggcaaaagcaacacagcagctggcaaactgttccattgcaatccagcagatggtagccattgccagggctgtagacatggattgtaaggtgcttatccttgacgagccgacgtcttctcttgacgataaagaagtgcagaagctgtttgggttaatgaaagacttaagagccagaggtgtaggaatcatctttgttacacactttctggatcaggtatatgaggtatgtgaccgtatcaccgtgttgcgggacggcaaactggtgggagaatacgagattgaaaaacttccacgtgtgcagcttgtagcaaagatgctgggcaaagagctggacgatgaggcgcagatcaaagatgagacgcaggtatatcatgcggatgaaaatgttccaccggtatttgaagtggagcagttacagagtaacgcaggcatcaaaccatttgatttctatataagaaaaggagaagtcaatggatttaccggtctgctgggatctggaagaagtgagtgtgtgcgtgcaatttttggtgcggaccgtatcattggtggaaagatcaaaaagaacggaaaagaaatcaaaattacaaaacctatagatgctatgaaaaacggaattgcttatctgccggaagaccgaaaggtggatggtatcgttggagacctctccgtccgcgataatatcattcttgcagcacaggtgctgcgcggtttcttccgtccgttcagcaaagcgcaggcaaacaaatttgcggacgaatatatcaagctgctggaaatcaagacggcatcggcggatacaccgattaaatctctctccggtggaaatcagcagaaagtaattcttgcccgctggcttctgacacatccggaatatctgatcctggatgagccaacgcgaggcattgatatcggaacaaaaattgaaattcaaaagctggtgttaaagcttgcatccgagggtatgagtgtgacctttatttcttcggaaacagatgaaatgctgcgtacctgctcccgtctgatcgttatgcgcgatcgcaggaaagtaggcgaaatctcaggtgaagacttaacgcagagcaagattatggataccattgccggaggtgaaaaaaagaatggctaaaacaagaacattacaaaaaaagaactttatggatatgttcagcggaaagcagattctgattccgatcgtggccctggtgctgctggcggtatttaatctgatcgccgatccatcgttctataaaataacactggacgtaaacagcgccggaaatcatgtattatccggttatctgatcacaattttggactacggctcagaacttgccattctggcaatcggtatgacgttagttacagcagcttccggaggacaggatatttctgttggtgcaggtatcgcgattgccggttcggttatccttcgtgtactttgcggcacaaattcccgtccggattatctgcaggctccaatcattgtagcctttctcgtaagctgcgtggtagctatgctctttggtgcatttaatggtattcttgttgccggatttaagattcagccgatggtagcaaccctgattctttatactgcagggcgttccattgcagcatggatcaacaataacgaacttccggtaatcagcgatccgtcgtttggatactttggtggttttattccgggaattccaattccgactccgttttttattgcggtagcatgtatgatcgttatgggactggttatgaaatttacaagccttggtttgtatacgcaggcagtcggtattaatgagagttcttcacgattaaacggattaaatccggcatttatcaagtttttgagctttgttattttaggactttgtgtggcagtggcagcactgatcaaagtaagtcgtatttccacaattaactattctgttattgcaaaagatattgagatggatgcgatccttgcagtagcacttggaggaaattcattaagcggtggcaaatttaatctgccggcatctattctgggtgcatatgtcattcagtttttaactacaacactgtataagttcaacgtaaaatccgaagcaatctctgcttataaggcaattgttgttattatcctagttgtcatcagtgctccggtggtacgggaaaaatttgcatctttttcacagaagatgaaagtaagaaatgcaaaggaggtaggctaatatgaaatcaaaatccttaaaaaaggtatcactttccgatgccaacctgcttttgacaatcaccatcgttgtatttttcctgatgtatatcggcgcgatgatttttgagggcggcggatttttaaaaccacagacattttttaatattttaaacgccaatggcgcattgatcattacagcatgcggacttagtctggttatgattaccggaagcattgatatttcagtcggcggtgtcgttgcacttgtaagtatgtgctgcgcggtatatctggatttcaagggcggaaatgtgtttgtatctctcctgattgcacttgccattggtcttggatttgggctggtacagggatttttggtagcgtatctggatattcagccatttatcgtaacacttgcaggtatgttctttgcaagaggtatgacttctatcgtacatacagatccgttcaatgtacaaaatgaggcatttgtgaaattgaaagatacccgtgtaattgttccgggaatgggatctgtcaaccgtattggcaaatatgtgaatgcatatgtggaaatcggtgtgattgtggcaatcctgatcgttgtgattatgtttgtcatgcttcgttggacgaagcttggccgttcgttttatgcggttggaggtaaccgccagagtgctcttatgcttggaattaacgttaaaaagacacgttttcttgcgcatctgctgagtgggttgctcgccggtattgcaggctatgtatatttcctgcatgtcggttccggtgcggcaacacatgcaagcgggatggaaatgaacgcgattgcatcatccattattggtggaacactcctgaccggcggtgtcggaaacatcattggaacattcttcggtgtactctccctcagtacgattcagaatattgtttcctccgccggactggatcaggcatggtggacaggtatcacaattgcagcaatgctttgtctgttcctggtgatccaaagtgtcgttcttgcaagaaaaaagaaaaaatagttgaaaggtgtattgacaattgttgaatcaagtgctatgttttttgttaacgaagagtcatagagcaaatgcatagaacggaatacgatcacaatatacttttttccagagagttgtcgggcggtgtgagacaacagacagatatggtgaccatcctctgtgagctgtgggctgaattccgtcaggacagtaagcttcaccggtattctaccgttatcaggaaccttatttctgcagaggggagtctgttgagatgagagtgagtggtcgtttcatacggcaaataaagtggtaacgcggaagcataaaataagccttcgtctttatatactgataagaggtatatagggacggaggttttttattgtatgtctgaactctttgtgaatctttaagaagggagtcgccaaatggcgaaaaaacaatgaatggtttagttatcgtattaattgcaattgtggtacttggtgccggctatttgttttacggacgctggcttgccaacaaatgggggcttgatccaaaggcaaaaacccctgcttacacacatgaggatggacaggattacgttccgtcttccaaaatgacggtatttgctcatcagttttcttcgatcgcaggtgcaggacctgtcaccggaccgattttagcatcggtattcggctgggttccggtactgctgtggcttttaatcggaggtctgttcttcggagcggtacaggatttcggagcattgtatgcatctgttaagaatgaaggaaaatcgatgggaatgatcatcgaaaaatacatcggcagaaccggacggaaattatttatgctgttctgctggctgtttacactgcttgttatggcagcatttaccgatatggttgccggaacatttgtcggaaaaggtgtcgagggaatgacaaaggcaacaagctatgccaattccgctgcagcatcgatttccatgttgtttatcgtcgtagcaatcatttttggtctgatccagaaaaaagtcggaaagatgaaagagtgggtgcgcgccgttgtcgcaatcgctctgttggttgttatgtttgtcattggtatgaaacttccaatgtatgcaacaaagacagcctggatctacattgtaatggcttacctgttccttgcatcggttatgccgatgtggctgttgatggagccgcgtgattacatgacaacattcatgctgctcggtatgattattggtgctgttgtcggtgtcattgcagagcatccgactatgaagctgaatgcatttagcggatttaatgtagatggcagttatctgttccctaccttatttgtaacgattgcctgtggtgcggtatccggattccacagtctggtttcttccggcacatcatcaaagaccatcagtaatgagaaagatatgccgatggtcggttatggtgccatggtggtagagtcactgctcggagtcattgcactggttgttgttggtgcggttgccgtaaacggaacaaagccggagggtactccgttttctattttctctgctggtgttgcaggatttttcgaaaaattcggtattccggtacaggttgctaccgtatttatgacgatgtgtgtatctgcactggcactgacctctctcgattctgttgcacggatcggacgtatgtcgtttcaggagctgttttacggggatactactgacacttccaagatgccgggctggcagaaagttctgaccaataaatattttgcaacaattattaccttattctttggttatttactgactcttggcggatacaataatatctggccactgtttggttctgcgaaccagctgcttgcagcacttgtactgattgcacttgcggtattcttaaagacaaccggaagaaccggctggacactttacataccgatgtttgttatgctggcagttacgtttaccgcactgatccagaagaccattgcactggtttccaatattgccggtggtcaggcaactttcctggtagacggtctgcagtttatcgtggcaattcttctgatggttctcggtgtactcgttgcattcagctgtttaaagaagctgtttacagcaaaaaagacagaagtctgattatttgtgctggtttctccattcccgcggggaaacaccatagatatttttaaatgcgcgggagaaatgaagctgattttcatatccgaccgcagatccgatatctgcgatggatagggaagtcagctttaataattctgtggcttttaccatgcggtagttcatcaaaaactcctgcggagattgtccgacggagtttcggaatattttcccaaaataactccggttgataccacagacagcggcaatgtcttcaatcgtaatcggattctgaaagttttgttcgatataattcattgcttcttttatataataatcactcattctgccacttgggacaatccgtgtcgatttagcggattgtaacaggttatccagaaacaggtacaggtgtccgatcagatgaaatggcggctcctttgggtgatgaatgatataaagcatttcttccgcaagtttctcccgcagttctttggaatgggaatgataaacgggcgcgtctttgcacaaatctgtgacacttaaagcctcttttacacgtaagccgtcaaattcgatccacatatattcccatggaagctgttcatcggcaatgtaagtattgatctgccccgggaaaatcataaacccctgtccgctttttacagaataggtccgtgtttctcctttggaattgtctgccatgagtgttccggttccggaaagaatgtagtgaaacaggtagtggttgcgtgttgcaggtccgaaagaatgaccgggatcacactgttcgtatccaaactgatacatgcacagatcaataaaattttcatttggaaaaatattaaaaaatgtattactcataaaacactccatatataccaaaatgcgatattagtatctattatagcacaaaatattgcatttaggtataaaattaaaaaaatatgggtatttaaggacgcataaaggtatgttataattagattatcaaaaaggcaagcggatatatttaagaaaaggagagaggaatatggcaaaaaggaatattttccgtggtcttgcggctgtgcttgcacttggtatgtgtatgacaggacttgctggatgcggaagcgaaaaaagggcggatggaaaaacggagattgaagtggtttcctacaaaccagaagcagttaaggcatttgaaaaaattgaaaagcggttcaatgaaacacatgatgacattcatttgacgatttcatctccaaatgaagcaatgaccattttaaagacacgttttatccgggaggattatccggatatcatcgcaatcggaggagacatcaactattccaactttttagatgcagatctgtttgaggatatttccgatctggatgaagtccagaccgtaaaacaggcatatctggatatggataaggaactggagtttattccaaaggatggcacgtatgcacttccatatgtggcaaacgcggcaggaattttatataacaaagatctgtttgaggaaaatggctggaaagttccgaccacctggcaggaatttaccacactgtgtgatgaaataaaacagagcggaacacttccgctgtatctgggatttaaagatacctggacctgtctggctccgtggaatgcgctggcagtcggacttaccgattcggacacctgcaatcaggtaaatatgggaaataccacatttgccaggacttatgaaccggtagcagaaaagatgcgtgcgcttttggattacgcagaaaaaaatccgtatgcatatggttataacgatgcctgtacagcatttgcccgtggggaatctgccatgtatccgatcggaagctatgcgattccgcagatcaaatcggtcaacccggacatgaatatcggctcttttacatttcctgcaaatgatgaggaatcagacaatgtattaaattcaggaattgatttacagttttctgtgatgaaagcatgcaaaaacaaagaagcagcatatgaagttttaaaatatctgtatgacgatgagaccattcagatttatctggatgatcagggcggaatcgcctgcaaggatggggattttgcaattccggaaacactcgaggatatgcgtccttacattgaaaataaccgcatggcagattatcaggatcaccattatccgagtgagatgagtgtggatgccatgatccagacgttcctgctggatacaagcgataatgcacaggaaaagtttttgaaaaaatttgattccggctggaagcgctataaccgggatctgattcggaaagtacaggattatcagaaagaacaggaggatgcacaatgaaaaagaaaatgtcaaacagggacaaaacattctgggcggttgtcataccggttgtaatcttattttttgcattcaatacacttccaatgatcaaaggtgtgatttacagttttaccaattataaaggatatggaacttacgattatgtcggattccggaactatgcagatctgtttacggattcccgcgtgggaaaaagctatttgtttacgtttaaatatgcactggcaggaacgatactggtaaatgtgctgagtctgatcatggcagttggattaaacagtgcaatccgttttaaaagtgcactgcgcggtatttattttgtaccgaatattttaggaggacttgtcatcggctatatttttagttttatttttacttacattcttccaactgtgggaaatgtgttccatattggatttttacagaacagtattcttgcaagtgaaaaatacgcatggattggtgtgctgattgttggtgtatggcaggcagttgccatgaataccattatttatatttccggtctgcagaccgtcccggaggaagtttacgaggcgagtatgcttgatggagcaagtaaatggaaacagttctggaaagtaacatttccactggttatgccgtttgtaacaatcaatctggtattgagcacaaagaattttctcatggtattcgaccagatcatgtctttgaccaagggaggtccggcacagagcaccgaatcgatctcttacctgatttataaaaatggtatggatggcggacagtttggattccagagtgcaaatgcagttattttctttattgtgattgtggcaatttcacttttccagatgacagtcatgaataagaaggaggagcagttatgatgaaagaaaaacagaaaacaaaccgggtacttacgattgttctgattttggggacggttaccgtattttttccactgtatatggcagcgatcattgcgtttaagaaaccaagtgagatgacaaacgatgtggcgggtgcactttctttcccgaaacaatggagttttgaaaacttccgtcaggcaatggaagtgaccgatttctggcgttctcttggaaacagtttactgatcactctggtaacgatcgtactggcaattctgatccactcgattgcaggctatgtgatcgggcggggcatggcaagaagaaaaagtttccgttttatctatttgtatattgtcagtggtatgtttgttccattttccatcttaatgatgcctctggtaaaacagacggcacacatgggacttggaaaccgtgccggtgtcatcgtgttgtatctggtattttacatgccaatgaatgtcctgctttacagtggatatttaaaaaatattccggtagcactcgaagaagcagcagatattgatggggcaagtacctggacgacttactggagagtggtattcccgatgatgaaaccgatgcatgcgacggttgcgattctgacagcccttggaacatggaacgatgttatgacaccgcttgtgatcatgtccggaaccggacagaatacgctgccgcttgcacagcttaacttccagacacagtttggaaccaattacaatcttgcgtttgcctcctatattctggcactgatcccgatcctgatcttttatatgatctgtcagaaacagattttaaatggtgtggcaaacggtgcagtcaaaggataaagaataaacgaggtgacttctatggcaattatatacaatccaaataaaaaaatctttaccctgcatacagcgcatacaacctatcagatgcaggtcgacccactgggatatctgctgcatctgtactatggggaaaaaacaaacagttccatggattatgtcttaacctatgcagaccgcggattttccggaaatccttatgcagccggtatggaccgcacctattcgttggatgcgctgccacaggagtatccgtcccttggcacaggggattaccgcaatatcgcgctgaatatcaaaaatgaaaaaggggtggaaagtgcggatctgctttttaagagctatgagatccgaagcggcaagtatcagttacagggacttccggctgtctgggcagatgaaaacgaagcacagacattggaaatagtccttgcagatgaaaacgcacaggttgaagtgcatctgctgtatggcgttttagaagaaaccgatgtcattacaaggagtgtacggattaaaaatacgggaaccggacagattacgatcgaaaaggcagcggcagcctgtctggattttgtacagggagagtttgatgttttgcggttttatggaaagcatgccatggagcgcaatctggagcgcaccccgctgggacatggaacgattgcgtttggcagccgcaggggaacatccagccatcagtataatccggcagtgattctggcagaaaaagggacaacagagacggcaggcagctgctatggcatgctgtttgtatacagcggcaatttctcctgtgaggcggaaaaagaccagttcaaccagacgcgcctgcttcttggattaaatgaagaactgttttcctacccgctcgcggctggagaaacctttacggtgccggaagtcattttatcctattcggcagatggattgtctgcattgtcgcagcagtatcataactgcatccgcaaccatgtgtgccgcagcaaatatgtccatatgcagcgtccggtgctgatcaacagctgggaggcagcctatttcgattttacgggagatacgattgtggatctggcaaaagaagccgcttcccttggaattgatatggtagtgatggatgacggttggttcgggaaaagaaatgatgacaattcttcccttggggactggcaggtcaacgaaaagaaactggggggcagtctggcagatcttattacccgtgtgcatgagcagggcgtgaaatttggcatctggattgagccggagatggtcaatgaagacagtgatctgtaccgggcgcatccggattgggcaatccggattcccgggaaaaagccggtgcgctcgagaaaccagctactgcttgatttttccagaaaagaagtgcgcgactgtgtatttgaccagatctgtgccgtgctcgatcagggaaaaattgattatgtcaagtgggatatgaaccgcagcatggcagatgtttatgccggaaatctttcctatgattatgtgcttggtgtctatgatttcatggagcgtttgtgcagccgctatccggatcttctgctggagggatgcagcggtggcggcggcaggtttgacgcaggaatgctttattattccccacagatctggtgcagcgacaataccgatgcgatcaaccgcacaagaatccagtacggaacttcgtttttctatccggtttccgcgatgggggcgcatgtttcggcggtgccaaatcaccagaccggacgggtgacaagtttccatacccgtggggtgacggcgatggcgggaactttcggttacgaattaaacccggcgcttttatcggatgaggaaaaacagcagatccgggagcagatcaaaacgtacaagaagtatgaaacgctcattaacgagggaacgtactggcggctgtcggatccgtttacggatgaaattgcggcatggatgtccgtctcagagcaacaggatcatgcactggtaagcgtagtgcgtcttatggcagaggcaaatcaggcgaccgtttatgtccgcctgcgtgggttaaaaccggatgccgtgtatctggaagaacagagcggcaggcagtattccggtgcagcactgatgcatgcgggaattccgcttccgccgtttaccggagaatatgaggcatatcagttttctcttacagagctgaaagaggctggaacattatatgaaaaagtgcagaaatggtgtgacaggaatgccaaaaatcgagtggtcatcagcctttacggtggttccggttccggaaaaacaacactcgcaacggcattgcagcagtactttttaaatgacggaacgggttgttatctgctctcgggcgatgattatccacaccggattccaaaacgcaatgatgaagaacggatgcgtgtgtataaagaaacgggggaagatggactgcgtggatatctcggaacaaagaaagagattgacttcgaccggatcaatgaagtgcttgcggcatttcatgagggaaaagatacgatcacattgcggcatatgggacgggaagatggcgagatttcatcggaagaaaccgatttttccggaatatccgtattacttctggagtggacacacggaggcagtgacgatttacatggtgtggatctgcccgtctttctggaaagttccccagaggagaccagggagcggcgtatccgcagaaaccgcgatgagaatgccgcaagcccgtttatctgccgcgtggtagaactggaacaggaaaaacttgaagtgcagcgcaaaaatgcaggattaatcgtgggaaaggacggaagagtttatgaaccataaaccgatgctcaatgcatatcccgacagtcttggaggaaatctgggagatattgtaacattgctaaaaactgaggcaatgcaggatgtattttcttctttttacattctgccgagcctgtatcattccgatctcgaccggggattttccgtgatcgactatgacctgaatgagcagcttgccaaccgggaagaccttgaccagttaaagaatatggggattgacctgaaactggattttattttaaaccatgcttccgcacagtccccacagtttcaggatcttgtggaaaaaggggaggcttctgcgtaccgcgattttttcatcgactggaaccgcttctgggaagggcatggaaccatgacggaggaaggctatatccagccggaggaaagctgcctgaagcagatgtttttccgcaaacccgggctgccgatcctgatggtggaatttccggatggaaaaaaggtgccgtactggaataccttttatcaggaagtgcatggcagacactatctcggacagatggatgtaaacatccagtcgccaaaggtgtgggagttttatcgtgaaacactggagaaaatagcttcttacggagcggcgatcgtgcggctggatgcctttgcctatgcgccgaagacaccgggaaagaaaaacttcctcaatgatccggagacatgggaacttttacagaagattcatgcgctggcagaacctttgggacttacgcttttgccggagatccacgcagcgtatgacgaaaaaatataccagacgcttgcagaaaaaggctatgcgacctacgactttttcctgccgggactggtcattgatgcgattgagaacaggcgcggaacataccttgcggcatgggcgaaggaaattgtggaaaagaagatctccacggtcaacatgctcggctgtcacgacggcatcccgcttctggatttaaagggactgcttccaaaagaggagatccagtcgttaattgaccggattgtatcccgtgggggcatggtcaaaaatttacatggacaaaagaatctgtattatcaggtaaatgccacatattacagtgcacttggggaatcggatcagaagatgcttctggcgcgggcaattcagatgtttatgccgggcaaaccgcagatctggtatctggatctgtttgccggaaaaaatgaccatgaagcggtgcagcgtgcgggggaatccggacataaggaaatcaaccggacaaatctttccgttgatcagatcgcggaaggactgaaaaaagatgtggttcaaaaacagcttgcgctaatccgtatgaggaatacccataaggcattttcggaaggtgcagaggtgacaatctccggagaggagagttctctggaaatccgctgggaatatgacggggcatatgccgaattgcatgtaaattttgaagaggggacttatacaatagaaagtaattgagaacagaacgatattacatgtaaaaaataacatgaaagcaagaaggagatgcaggaataccggtatctccttcttatgggtttaaatccataagctcattgccatgttcccgtaaccatttgcgggaaaccttatagtctggaagcacacgctccacctgtgcccagaagcgtggtgaatggttcatctccagccggtggcacagctcatggacaaccacgtaatccagcacttccggcggtgctttcatcagcaggcagttaaagttaagattgccctttgcactgcagcttccccagcgtgtacgctggtttcgtatggtgatcctgccataggtcacgccgacaaccggggcataaaactgtacccgttccggaattacgcgcagtgcttcatctgcaagcacctgcaattccccgggatttaaaggtgcggctttcgggcgtgcagcttccaatttttgtttttgttccatttcccggagatgggcatacagccagtctgatttttcatcgacaaatttacggatctgccagtctgccatccagtaaggtgcccttaccagaaccgataaatccggacggatttccagtgcaacggtttttcttttgcttcggattattcgaatctgtgctttttccatttcatttccatttccaacaatatatgtaaaacagatgttttgtgctatgtcatcattgtaccatcattttattggaatgcaaaggggacaaaccagggggggagttctgagtgtggaaaaagataaaattcgcatattttcgacagaaacattgcagtgggaggaaaaaaggcgtatgataaaaatagtgttttaaagcggaataaagaaaggaacagagaaaatggaaggacgaaaaaaaatggaagagttttaccgaaaactgaaggtaggaatgaagttgaagtatgcatttactacagtcattgtaacgtttgctgttgctatggttgtttcgcttgtttccattgtaatgatgaatgtggatacttataagttttacaagcaagcatatgctaacagcacattgcagatggaaatccgtaaagatatacagcttgtgggaaaatatattttgtggtcgatgacaaccgatgatacagcttccacacagagttatcttaattcggcacagcagtatgcagatcaggttggaaaaaatgttaccacactggagaagtcttttcatgataaaaaggaagttgcggaattaaaagatgcgatagaagaactgaaaaaacagcgggtagcgctcatggaactggcgcagcagaataaaaatgacgaagctctggcactgtttaattccgattataatgatgcaacagagaaacttcaggatatattggttgatatcggaaaagtggcatccgcagaggcaaagagtcagtatacatctgccagggtaacgggaattgtgagcattattctgatgattctcataggaacaggagcagtggctttctccactgtcatccggaccaccattaccggaattatgctaaagccaattcaggaactggaaggtgcagctgagaaactgaaagcaggacagcttgatgtggaaataaattatgaatctccagacgaactcggaaaacttgccggtaatttccggcaggcatgcaaaactctggaggtgattgtgcaggataccagttatcttctgggagaaatggcagaaggaaatttcaatgtatccagtaataatgcacagatttatattggtaatttcagacagcagtatgagtccataagcaaattaaaacatgaactgagtgataccctgacacagattaatgaagcatctgagcaggtggcatccggttccgggcagctggcaggcggggcacaggctttggcagaaggtgccaccgatcaggcaggtgcagtggaagaactgacagcaacggtagagagtgtcagcggaattgcagaatccagcgcagagagcgcttccggggcttaccagatggtacgcactgccgtagaacaggcagatcaaagcagagaagaattacaggcattgaccaatgccatggagcggatcagcagtacctcacaggaaatccaaaacatcatcggttccatcgaggagattgcaagtcagaccaacctgttgtccctgaatgcttccattgaggcagcacgtgccggggaagccggaaaaggttttgcggttgtggcagatcagatcggaaaactggcgggtgatagtgcacaggcggcagtcaatactcgcgatctgattgaaaaatctctgcaggaaattgaaaacggaaaccagattacagaaaagacggttgctgcattaaataagattcttgaatccatgaatgattttgcgaatgcggcaaagggcgccagcgagagttctaccgagcaggcagatatgttaaagcagatcgagcagggaatcgagcagatttccagtgtcgtacagagcaactccgcagctgcggaagagacttctgcaacaagccaggagctttccgcacagtcggaaggactgaaaaatctggttggcaggtttaagctggcagagtaggagaacataataaaaaggaatcctgtccggaaagatatccggacagggttcctttttttgtaacctttccgatttttcgtttgtattattagtgaaaggcctttgaaaatgaaacataaaggagcggctcatgagacaatcagtacagggtaaacgcatttttccgggtggtcagaattccttcgtcccgcattttgccaagctctttggaaagcgcactgcggtcgacattcagatagtccgccagcccctgtcggtcaaacggaatcttaaaatgattgctgccggcttttgccgcctggtttgacagatagacaagcagccgcccgcggatcgttttcggggttgtacagaaaatccgctgggagagcgcgagatttttgcgcagggagatctgtagcagattccggataaattttggctgccaggtgcttgcgggatgcggcgtgtggacgagaatatccagattccagaatagaatatcggtctgctgggcagcaaccgcatcgaccatcagtgtttcgcggaaaaatgcataggtttccccgaaaacctgtccggcaccgatgttgctcaaaatgcttttgctgccccacaggtcgagattttcaatattaacgcttccggacagcaccagcccgatctcgtgcgtggtgcatccggcagacaaaatcacttcatttttttcaaaatgtttctggcgcataccgcccagagcgagcatttctttatattctgattcttccatgccaaggcacaggggattttttaaatagatcatgggtttctcctgatgttatttgataaaataagtatatgcaaatttgtgtcacagggcaagaaaaagtgaaccgcccaatggagattctactgtgaaaaatgaggatggaacgtatacatataccgtgtattgtcctgtgaacatgaaataagaacaataaataataatgaaaattataaagaaaataatacaatttttatattgattcttggcttgttcctgcatataatataagtgaaattaaacaatggaggtgtctgttatggcaattgcatctgattttttacagagtcttgttccaatttcacaatttaacaaagggcaggctgcaaagatatttgatagacttcgttccgaaaaagaactgattgttttaaaaaataaccagccttctgcaattattctgtcacccgaagagtatacaagattaacggagattgaggaagattattttcttttgttggaagcaaataaacgtttggatgataacgggaataaagagaccgtttcatatgattcagtgatgaaacatttgggcatcagtgaagcagaacttttggaagcggaggatgcagatatcgaatgatatggagtattgagtttttagaggaagcggaaaaggatatgaaaaaacttgaccattcagctcagatacaggtgttaaaaggaattaaaaaagtcagccagaatccgttgtcagtgagggaaggtggatatgggaaaccattccgggcagacatttcatgtccggtgcagaaaatacggcagttctcgctttatgtcgtggtttttgccggaaaaaacaggtattgtaatctgcgaaaggaggagcagatttacatggatggaaagcaagaggagatttcattatggatcagaaaaagacaggttattttttaaaacaactgcgcaatgaaaagaagctgacgcaggagcagcttgcggaaaaatttcagatcacaagccgcacggtgtcacgctgggagacgggaagcaatatgcccgatatcagcatgctgttggaacttgcagatttttatgaagttgatatccgggaaatcattgatggagaaaggaaaagcgagcagatgaatgaggaattaaaggaaaccgtaatcaaagtaacggattatacagagacaaacaacgcaaggctcttaaaacgggtacggatcataggaattaccagtgtgatcacaatactgattgcaatggtcatggacgcaggtggactggcagtgtctccgttttgggaaagtgtgaagcgggatctgtatgcgtggacgcttggcacgcttattgcaaacatactgtatacaacgggatggctcaaacggataagtgagaaaaaagatgtcagcagaaagatgcggataagcggtgtggtatgtgcggtcattgtgattatgtcactgattttgcaggctgttttatagaaaaacacatgacgggaggcaaaagcctcccgttttttatatcacacgcccattttcttctgaaacaggaaatggtcggacatcagaagataatgaagtgattctttcataaaaataaaaagtctcctttgttagtattctaattattagaagcctaataaataatattacataaagtgagaaatgttaaatacaggtttttccacaaaaacaaatgcacaatattgttcaacataactaaaattgtttaaagaaatctaaaatagttgcattttatgttcatcctctatataattttaaatataaataaaataatttataaaattataaaatatagtggagaaaacatatggataagagactgaaatttaatgaaccctggattctgcagagagcagatccgtatgtgtatgaaaaggatggctggtattattttacggcatcggttccggcatatgacagcattgtactgcgccgggcaaaaaaactggcagatcttccacaggcagaggaagtggtcatttggaaaaagcatgagagtggtccgatgagcaagcatatctgggcaccggaactgcactatctggaaggaaaatggtacatctattttgccggtggtgaagaagaggatatctggaaaatccgtccatatgtgctggaatgtcaggggcaggacccattggcagatgcatgggtggaaaaaggcaaaatgcagcgtgcagatggggatgaattctcgtttgaagcattctccctggacgcaaccgtatttgaggatgccggagattattactacgtgtgggcagaaaaggttggagtaggcaagcagatttccaatctttatattgcaaaaatggagtctccgtgcaagctggcaacggtgcaggtgcttcttacaacaccggattatgattgggaacgtgtgggattctgggtaaatgagggaccggcagtgattcatcacggggataaactgtacctgacatattcggcgagtgacacaggggttgcctattgtgtcggtatgcttactgcaaccagcggaacggatctgctggatccgttaaattggagaaaggagcgtcatccggtattacaaagcagttatgaaaaaggaatttacggaccgggacataattcttttaccaaagatgaagacggaaatgatatcatggtataccatgcacgcacagaaacagagatagagggaaatcctctctataatccaaaccgtcatgcacatctaatgcaggttcaatgggatgaaaacggaaagccggtgtttgcgtatgattaagaaaaaaatggttcgtgtgttgaccgttgcagggcttctggcatgccttgcatccggttgtgcctccggcggttcttccgttgggaaggaggctgcggcagatgagataaaaaaaggcggatttacggttgcagcatcctgtcacgatccgcagatcatcagggaaggcgatacatattatatgttcggcagtcatatggtaggggcaaagtgtcaggacctgcgtaaatggaattattttgcaaatggtgttgatgcagcaaatacactgtttgacaatttgctgacagagccgtacgctgcctttgattttgtcggaaagaacacagataatgggtattctgtctgggcatcaaatgtaatttacaatgagacaatgaagaaatatgtcatgtatttctgtacgacatcttcttatgtgaaatcgactctctgttttgcaactgcagacaatatagagggaccgtatacttatgtggatacgattttatattccggatatggaaaaagcaatatcagcgaaacgaatttgtacgatgtactcgggaaaaatgcagatatttccagatatctggaatatggtggatacaacaataaggagtggccaaactgtattgatccggcgatttttaccgatgcagacgggcggatgtggatgaattacggctcatggtcaggtggtatctttctgctggagattgatcccaccactggatacccgatttatccggtggatgacaaggatgccgatccgtattatggatatcggctgattggtggtggacatcactctgctgagggtccatatatccagtatgacgcagaaaacggctattattatctgtttgtttcttatggagacctgcagagtgatggtgggtatcagattcggcagtttcgcagtgaaaagccaacgggaccatatgtggatgtggcaggaaatacactggaagatcaggacgatcatttcaattatggtttaaaaatgatggggaattatacattcccgagtttaaattatacctatatggcaccgggcggtcagtccacatttcaggatgatgacgggaaatattacattacatatcatcagcggtttgacgatggcacagagtatcatgaaccgcgtgtacatcagatgtacacaaatgaggatgggtggtttgttgcagcaccatttgccacaatgggagaaactctctcggaaaaggggtacaaaaaatcggatgtatccggtacattttatgtagtaaaccatggaacagatatcagcagtaagattcgcgaagcggaggcatatacgtttgcggatggaaaagtaaccggtggagaaaaaagcggtacatatgaggtaaaggaaggcacagattacattaccattacactggacggtgtcgtttataaaggggtattaatggaaatgaccgatgaagcggaaaatccggtgttttgtttttcggctgcaggagacaacgaggaaactctctggggcgtacaatatatccaaaaggagtaaagagatatggcaaagttaatgatcaacagaaataaaaaagaaggtaccattgcaccggagatctacgggcatttctcggagcatctgggcagatgcatctatgaaggactctatgtgggtgagaactctgaaattccaaatgtcaatgggatgcgtacagatgtggtggaagcacttaaagagattaagattccggtattgcgctggccggggggatgttttgcggacgagtatcactggaaagacggaatcggaccgaaagagaaccggaagaaaatgattaatacccattggggtggtgtggtagaagacaacagtttcggaacgcacgagttctttgaactttgccgtcagcttggatgtaaaacttacattaacggaaatcttggaagcggaaccgtgcaggagatgtcggaatgggttgaatatatgacatttaacggtgtgtctccgatggcagatctgcgcaaaaaaaatggacatgaggagccgtggaccattgattattttggtgttggaaatgaaaactggggatgtgggggaaatatgcggccacagtattatgcagatgagtaccgcagatatcagacctatgtgcgcaattatgatccgcagaaaccgatccaaaagatctgtggcggagcaaatgtggatgattatgactggacaaggaaggtattagagacaacccatgatcacaccgttcctgaatttcatggatttatggatgggctttccctgcattattatgtgcatccggaaggctgggaaatcaagggaagtgcaacggattttgatgaagaagtgtggtataagacattaaaaaaagcactttatatggaaactcttgtggaacgccacggaaagattatggatcagtacgatccagataaaaaaatcggaatgatcgtggatgagtggggctgttggtttacagttgaaccgggaaccaatccgggctttttatatcagcagaacacgataagggatgcgttggttgcagggatcaccctgaatatctttaataagcactgtgatcgcgtgaagatggcaaatcttgcacagatggtaaatgtattgcagtctgtcattctcacagaaggaccaaagatgattaagacgccgacgtatcatgtattccatatgtaccggcaccatcagggtgcaacgcttttgaacagtacactgacaggagtgggcgaaaccggtataggagaatggaaagttccggaggtgacggaatctgtatctgaggatgcggagcatatcattacggttacattaaacaatctttctgcggatgaggaaaaagaaatagagattgcgattgccggagatgaacacgtatattctgtgaaggaagcaaaggttgtctcggcagagatgcacgcacataatacgtttgatgcaccggaacttgtaaaagaagaagagtttaccgcatataaaaagtgtgcagatgggataaaaatcatgcttccgccatgcagtgtggtggaactgcgcctgcaataatgcaaaatggacaggatcatatggaagaatcagaacggtattgcagaaaatgcgaactggcaaaacaatacgggggcggtctggaggaatatcttttgcggtaccttgcacagcttacgccggaagaacaggcagaagatgtgacgtacgcaaggcgtctggcatgttgtgggaaatgcacatggtatggggagcatatgtgccgtgcctgcggatgctatgtgcagcttcgtgctgcggtaaaaggacagaactgtccctatgaaaaatgggaacaagaaggagagacgcatgatacacgatccggcaatattttatgatgaggttagtggaaattattatacatacagtacaggtgctatatgccagaaatcaaaagatctggtgcactggcaggaaatcggaaaagttgtggaacgtccgccgcaggagtcggtggaatggaccggcagtgaagatatctgggcaccggatatcgtaaaggtgggaaaagaatatcgtctgtactgctccaattccagctggggtgtacgccagtcctgtatttttctggcagtggcagaccgaccggaaggtccgttcgaacccaaagggtgtgtgcttaaaacaacagaaaaatttccgcagagtgttaccaatgcaattgatgcaaatattatcgaggatgcaaaaacaggggagcagtatatgctttatggctctttctggggtggctgccatgtattaaaactgaacaagactacaggttttgccgaagaagaaggaatcggggtatgcattgcacgacgcccgaagtggcagagcggcagtatggaaggcccgtatatggtatacaatgcgcagaataattattattatctgtttgtttcctacggatctttaaaatccgattacaatatccgggtgggaagaagccggagtatctgtggaccatttattgatttccacggaaaggatctgattgcagatgaggatgaggataacagcacaggattactcgccatgtgtggatatcaatggaatgaagggcaggcatatatgggtcccgggcataattcagtgttacatgatgtaaacggacggtggtatcttgtatgtcatatccgcaggaaaaactttacacaacaggaagaaccgtctgagatgcagatacgtgaaattttctggagtgaggatgggtggccgtttgtggcagcacagccccttgcgaagacagatacaggagacgggataaagccggtaacgaaagaacagatatgcggtttttatgagcggatcacgcttgcgccggcactgccgcagggaattacctgttctgtgccaatgaaacttgcaccggatggatattatgagaactgttctgttcagggaaaatgggagtatactgcagatcacaggggcatgattacatatggaccttatacggaggaggtgcgggtttattgtggctgggatgcacagcggaagtgtgaaacaattctgttgtgcggactacgcagtgatggtgttgcattctgggcgaaaagaatcggaaatctggtataatggatgctggttaaaaaggcttttgcatggagaaataacatgcaaaggccttttttaataaaattattcttcaattggtgcgtaattaatgctgactttaatatcctgtccataattaccgaaagatttaccgaaaatcgtgagtcctccaacgtgttctgcattgtcattgactgccatgcgcagcttcatgctgctgcgatagtccagattaaagtcccggatggtgacatctgaaatctgcaatccgtctatgaaagttccctttttattgatcacaagcatttttaacaatccatactggttccagttcggaaaccaccagtctggagtgaaaataccgcggacatctccgaaatctcccggggatgtccaggtgccgatgcagacatcatttaaataaaaactgatatcggatggccagacgttattgattcccggggcttcggaactgagctcggcagagattaaaatctgcgtgattttctgggaacctggaataaagtttggaatttcatattccacaaatcctttggaaaaccagagaatatctgcattgtagcgatcaggatgtgcaaagtagcgcgtatcatccacttcaccgatcagatgggaagcggtagccagcccacaggtcggatagacttcataattgcagtaatgtccgacctgaagttctgcattgtaaacattctgcgcttcttccggtgcgtccagatcaatgagaattttatccagatgcagagtacagattttctggtttccgtgcccgctggaatcattggacgtattgacaattccgcatgcctccagtttttttatatgtcccgtcagagcaccgttcgtaatgttcagttttgctgccagttcgttcatgttcatttctttgttttcaatcaacagttttataatttcaatccgaacatcggagccaagtgctttaaaaatgtccagtccatcatccagtgaagtgatgtgaagcataaattaccccctttttatttgttgtttcatttctgttttataaattatagtatcatttccggaatgcgtcaacgcatgagtgaaagaaaaagaataaaaacgaaaataatttataaaacactaaataacaacaataaaataaaatattttaggaaaatctaaaaaacatgttgacatacttatttggcaattatataatgtaaccaataagacctgacaaattttaaaatattagttaatctgccgaatgatttttaaaggcgcgtcggaatcagatggtcagaataacgaacaggggagcttatattttatttcattatgatcaaggtggttaaaaaggagaggaaactatgaagaaaaaaatcatatcaacattgctttgtacagcaatgctcgcaacaatggtagcaggatgcggagttgaaaagagtgatgggggatcagacacagaaggctctgcaagctccgttgcagagatgaaaggaaccggtgataatgagatcaatattcttatttatgcacaggatcacgaaaaagccgtttatcaggaactaattgataaatttacaaaagagcatgcagatgagatttctacagtaaactttgaggtaacaacacaggatgaatacgcaacgaagatgacagctgccatgacagcgggagaacttccggacattttctatgtgggaccggaagcagtcagaagttatgtagataacggatatgtacagccgttggatgatctcgtagatgctactgcggttgacaatctgtggccggcgatcaagagcgcatatatgtatgatggatctaatattggttcaggatcgttatactgcctgccaaaagatttatcctgctttgcatttgcctacaacaaagatctttttgatgaagcaggactggagtatccggatccggaaaatccatacacatgggaagaatttgcagatgtgtgccagaaactgacaaaggataaagacggtgatggcgaaattgatcagtggggtgttgcaaatgcaaatgcatttggttttactccttatgtatacggcaatggcggtcagttcttaaatgatgatcagacaaaggtagtcattgatgaaaatcagaattttaaggatgctttccagtattatacggatctgacattaaagtataaagtaacgccaacggtagaacaggatactgcgcttggcggataccagagatggctggacggacaggttgctttttatgcatgtggtacatgggatgtcgcagcatttatggatgatgcaacattcccatacaattgggatttatgtggatggccggtaggaccaaacggagacggaaagtccacagcatggctcggaaccgttggtttcgcagtttcttcacaggcaaagaacccggatttatgtgcagagttaatacagtccttatcaacagatctggacggacagaaagaactttgcggcgagacatccggtaagtctttacagattccaaacattatggattatgcacagacaacatttaaagacaaagtaaatgatggaacaattccatatgcaagcaatgtagatgttattttcggatatattgagggaagtgacaaatataaaggaatctttacggaaacaacctacacttacaacagtgaatggtgggatactttcctggaaggaatgccgaatgttctgaccggagaagtttccgtagatgattattgtaaacaggtagcgccaaagatgcaggaagcactggacaacgcgatcgaattacagaacgcagcaactaataattaagattaaaacggattgcccctgtcatggggcagtccgtaggaaaagagtgggcatatgagcggaaaaacaaaacaaccgaaacataagatgtcggcaatggcgaagaaagaagaaagaactgcgtggctgttcatcgccctgcctttccttggatttttactttttatggcttatccgatctgctttgcagtgtttgcaagtatgagcaagtggacgggaatgaattctctggtggataatttctgtggattgcagaattacatcaatatttttcatgatgaaaaattctggaaatctctgcttacaaccattatttatctgatcggtattccaatcggaatgatccttggactgcttctggcaatgggaatgaaccgtaagattccgggaatcaggctgcttcggacaatgtattatgtaccagtagtatcttcactggttgccgtgtctattttgtgggcatgggtttataattacgattatggattatttaattcaatcatcaaacttttgaccggacatcatggtccaaactggctgggagatgagttctgggtaaaagtagctttaatcatcttcatggtatggaaaggattgggaacttctattattctttatcttgccggattgcaaaacattccgcgtaactactatgaagctgcttccattgatggagcaaatggatggcagaaatttcgtcatattaccgttccactggtctcgccggttacgttttatattttaattaccagcctgattggcggtttccaggtgttcgtggaagtacaggttatgacgaataaaggtggaacaaactatagtgcagcaaccgttgtttattatttgtatgataaagcattttcaaacggacagttaggctacggatgtgcactggcagttattcttgcaatcatcatcttcattatcacggctcttaatttcgcgggtcaggatagatgggtgaagaccatggactaggagggagtcatatgagttcaaaaaaagatttggcaagctcccggcttgtatcaaaaaaagagaaaatttttaactggattatctttgtattacttcttcttggtgcagttgtaatggttttcccgttaatttacatgattgcgacatcattcatgacaaaaaatcagattttgtccggtacattaacaattcttccggatccgattctgataggaaaatattctgaagtattaaaaaagggacagttcataaacggtatatttaattctctgaaggttgcaattccggtattgattattggcggatttacctcctccctcgccgcattcggatttgcaaaaatgagatttcgtggcaaaaatgcattgtttctggcattgctggcaaccattatgattccgtttgcggttgtcatgattccacagtatgtcatgtttaccaaactgggctggaccaatactctgcttccacttattattccgggatgctttggaaatgtcagtattatctttttccttcggcagaacctgatcggaattccggatgatctgatggaagcagcaaaattggatggatgtggatatttccgtacgtttcttcagatttttatgccattgatgaagggggctctggcaacgcagctgatgttgtggtttatgggaatctggaatgattatcttgcacctactattttcttgagaagcgaaaagaactggacattgcaggtggttatccgttccttcaattcctattatgcaattcagagtgattatgctttgatcatggcagcatccgtaattgcaatgattccgacaatggcattgttctttattttccagagaatgatcattgagtccattgcaatcagcggtatcaaataagtaacaaattataaaattcatctttttcaatcctcaacaaaatataagaaagcagttcgtataaaaatcgcttgcgcgatacggactgcttttgtagtattataacgaacagacatttatacatggtaaaggaggcagcgtatgccaaaagaaaatccggtgattgcttttttaaataagatggcagatttgattttactgaatctgatttttctgctgtgctgtattccggttgtgacgatcggaccggcaattacagcattgtatgcagtttcattgcgatcggtacgctatggagatgggtatgttatacagacttttttccggtcgtttaagcagaattttaaacagtcttttgtggtgggaatgataggcttactttttgtgtgcctgcttgttattgatttgtttttctggcgcaatgtgggacctgctttcatgtccgtatttatgacagtggtgagtgtatgcgtaggctatttggtttttattgtgttcttatggctgtttccggtgattgcaaaactggaaaatcctttgcgtgtgcagataaaaaatgcagccgccatggcggttgcccattttttcccatatacgctgtttgtaagtgtgatagtactggcggcaggctatatggcatataccagtatcattacggatgtgctgctgcttctgatgggatttgctttacttgcatatgtatgttcattctttttttataaagtgtttgcaaaatatatagacgaggaaccggtgggagaggatgacccattatatggaagcagagagtaaaaaatatgaattgaaatttcctacctttaatggtagaataaatgcatagttgcaggcacacaacggtcgattttttgtgcaatatgtctagtgataaaggcagaacagtggaagacgggcgttgaaattttcattgtggaaagcaccggaaacaaccgtgaaagccgaaatgatttacatagtatatggaggttttttatatggcaagatttacattaccgagagatttataccatggaaagggagcactcgaagccctgaaaacattcaagggaaagaaagcgatcatctgcgtgggcggcggctccatgaagcgctttgggttccttcagaaagcagaagattatttaaaggaagccggtatggaagtaaaactgtttgagggcattgagccagacccatcggtggagactgttatgaaaggtgcggcagtgatgcaggaatttgagccggactggattgttgcaatgggcggaggttctccgattgatgcggcaaaagcaatgtggattaagtatgaatatccagacatcacttttgaggatatgtgcaaagtatttggtattccggcactgcgcaacaaggcacatttctgtgcaatttcttcaacttccggaactgcaacagaggtaacggctttctccattattactgactatgagaaaggaatcaaatatccgatcgcagattttgagattacaccagatgttgcaatcgtagatccggatctggcagagaccatgccacagaaactagtagcgcataccggaatggatgcaatgacacatgcaattgaggcatatgtttccacagcaaattgcgattttaccgatccacttgcactccatgcaatcaagatgatccagagtgatctgattccatcttataatggagatatggaaaagagagattccatgcacaacgcacagtgtctggctggtatggcattttccaatgcacttcttggtattgtacattccatggcacataagacaggtgcagcgtttgcggattatggcgcacacatcatccacggcgcagccaatgcaatgtatctgccaaaggttatcgcatttaatgcaaaggatgagacggcaaagaaacgttacggtgagattgcggatttcatgaaacttggcggaaacacactggatgaaaaggtggagcttctgatcgcacatctgcgcaggatgaacgatgatctgaacattccgcactgcattaaaaactatggtgcagacagctacccgaccgagcagggatttgtaccggaggaggtattcttagagagacttccggagattgcggccaatgcaattcttgacgcatgcacgggttccaatccaagacagccaagtcaggaggagatggagaaactcttaaagtgctgctactacgatacggatgtcgatttttaaaagaaactaagcaagaaaagccctgcggtttttgtataccgcagggcttttcttttttgcaacaggtgcttcaatgaacaaatatgagtgctgaccaggctaaagtacattgggtatatcaaaaacagaacaaatatggtagaatatacgatatgtaatctggaaacagatagataagaagatgacaaaaagggtctggaaatgaaaaagaagaatccgaagttatatcgccggtagggaggaaaatattatcatgagtggatatctgatcaaagacacgacaaaggaagaaaggattgcactgattcgttcctggcaggagccggacgactgcgtgggaggaagcggcatggatctgtttgatatgtatgatgcctatatccgtggggagaaagagattgcagagatcaatggggaatttcaggcatcctatgtaaaagacaccgaagacttagaacagccggaagaagcaaaatccacttccggagaactgacgcagctgacaaagcttcatgcggaaggtgcgcttacggatgaagagtttgcggccgcaaagaaaaaagtgcttggactgtagcacacaataattttattataaaaatgcagggcagtatttttgtgcaattcttttagtgacatatgaaaaaacctgtgttacactgaccgtacaagtaaacatacatggtacaactttagtagagaagcccggacaggctgtatctgttttttaagaggggatatacattatggagagtatcacaggaggaaacacaccaaaatatcaggaactgacggaacagctgcgtttacagatcgtctccggggagattgcaccggggcagaaactgccatcggaaaatacgctttccgcacagtatcaggtcagccgtcagacggtgcgcaaggcattggcgattttgcagaatgaaggatatatttacgcagagcacgggcgcggtacattctgctcagaaatgatgcggcacgcacatccgtccaagaatattgctgttgtaacaacctatctgtcagactatatttttccccgtgtgatacagggaattgatgatgtgctgaccggtgcagggtatagcattgtcctaaaaaatacaaaaaattcccggacacgggaagcggaatgcctgcaggaaattttaagcaaggatattgacggggttatcattgaaccgagtaaaagccagattttctgccggcatatgaatttgtacgaacaactggaaaaatcgcatattccatacgtgtttatccagggatgtttcccacagatgaaagacaaaccgcatgtgctgctggatgattttcaggggggatatatgatcacaaagtatctgacggatcacgggcacaaaaatatcgtgggagtatttaaggcggatgacatgcagggacagaaccgtcataaagggtatgtccgggcactgcaggaggcggaaattttgtatgatccggataaagtggtgtggtttcatacggaggaccgcaaaatccatccctatgaagcaatccgtgaaatggcaggaaaaacgcttcgtgggcggatggatgcggtcgtttgttataacgatcagacggcacagcttgtcatccgtgcattacaggaggaaggactgcgtattccggaagatgtttcggtgaccggttatgataattcttcgctggcgaaccagcaggggcttcggctgacaaccattgaccatccgcaggaaaagcttggcgccatggcagcagaactgctcctttccatgattcagaacggagaaaaagaggaaggggagagtgttctcatccagccaatgcttattgagggaaattcctgcatggaataccggtgacagcttgtgcaatctgaccaaaacaatgccggattaaaacgaaaaaagacaacaattttgttgattttttgcatgaaaaacaacttgtaaatacatgcatacaagttataaacttagagtataaaaacgaacgatataaagcattgattctaaggaggaacgagtatgctgttaaataaggattacaaattttggttttgcacaggatcacaggatctgtatggagaggaatgtctggcaaaggtagcccggcattccaaacagattgtagatgagttaaacaagacaggcgttttgccatatgaaatcgtatggaaaccgacactcattaccaatgagctgatccgcaagacattcaacgaggctaacaacgatgagacatgtgccggtgtaatcacctggatgcacacgttctcccctgcaaagtcctggattcttggactgcaggagtatcgcaaacctctgatgcatttacatacacagttcaatgaggaacttccatatgataccattgatatggatttcatgaatgaaaaccagtcggcacacggagacagagagtatggtcatatcgtgagccgtatgcgtatggagcgtaaggtcgttgtcggacactggagtgatccggtagtcgttgacaagatcgcaagctggatgcgcaccgcagtcggcatcgtagagagcagccacattcgtgtcatgcgtgtcgcagacaacatgagaaacgtagcagttaccgagggcgataaggtagaagcacagatcaagttcggctgggaagtagacgcttatccggtaaacgagatcgcagagtctgtcgcagccgtatcccagtcggatacgaacgcacttgtagatgaatactacgacaaatatgagattttactcgagggcagagatccggaagagtttaagaaacatgtagctgtacaggcgcagatcgaacttggatttgagcgtttcctgcaggagaagaattatcaggcaatcgttactcattttggagatctgggagcattaaaacagcttccgggacttgctatccagagactgatggaaaaaggttatggctttggagcagaaggtgactggaaagtcgctgccatggtacgtctcatgaaagtgatgaccgcaggcatgaaggatgcaaagggaacatccatgctcgaggattacacctacaatttagcaaaaggaaaagaaggaattcttgaagcacacatgcttgaaatctgcccgtccattgcagacggcccgatcagcatcaagtgccagccactttccatgggcgacagagaagatccggcaagacttgtatttacatccaaggaaggacacggaatcgcgacatccctcatcgatctgggcaaccgtttccgtctcattatcaatgatgtagagtgcaagaagacagaaaagccaatgccaaaacttccgaccgcaaccaacttctggactccggaaccggatatctacactggagcggaagcatggattcttgcaggcggcgcacaccacactgcatttacctatgacctgacggcagagcagatgggtgactgggcagcagccatgggcattgaagcggtatacattgacaaagatactaggattcgtgatttcaagcgtgatctgatgcttggagaggtattctacagataaaagataggtaacatctgcttttgtaaaatgcaaaggcaggtgtttatgacagaaagagaggtagaaacagtggaaagaaaagacgagattgtgtccgggaaaacatttctcggaattgaatttggctctacacgtatcaaggcggtactgaccgatgcagaccatacaccgatcgcatccggcagtcatgaatgggaaaaccgcctggatcacggaatctggacctataccatggatgacatctggggcggtctgcaggattgctaccgggatttaaaaaaggacgtaaaagaacagtatggtgtgacactgacaaagatccgtgcgattggattttccgctatgatgcacggatatctggcatttgacaaggctggggagcttctcgtgccgttccgcacatggcgtaatacaatcacagaggaagcagcagccgcactgacaaaggaattttcctataacattccgcagcgttggagcattgcacatctgtatcaggcaatgttaaacaaagaggagcatgtgaaagatatcgcatttttcaccacgcttgcaggatttatccattggaaactgactggggaaaaggtactcggcgtgggggatgcatccggaatgttcccaatcgacagtaatacaaaagattatgatgcagcaatgctcgataagttcgatgcgctggcagaaccatacggctttgactggtcacttcgtgacattcttccaaaagttcttgttgccggagaaaatgccggaacgctgactgcagagggcgcaaggcttctcgataccgatggtgaactggaagcaggaattccggtatgtccgccagaaggtgatgccggaaccggcatggcagcgaccaacagtgtagctgtccgcaccggaaacgtatccgcaggtacttccgtatttgcaatgatcgtactggaaaaggcattgaagaatgtgcacaccgagatcgatctggtgaccacaccatccggagaagcagttgccatggcacactgcaacaactgcacatccgacctgaatgcatgggtcaacctgtttgaagagtttgcaaacagctttggcatgaagatcgacaagaatgagctgttttccgttttatacaacaaagcactcgaaggtgacgcagattgtggcggccttttagcatacaactatttttccggtgagggaattaccgcatttgatgagggaagacctctgtttgcccgcacaccggatgcaaaattcaatcttgcaaatttcatgcgcgtgcacttgtttacggcactgggcgcattgaaagatggtctggatatcctgctcaaagaggaaggcgtacagatcgacaagatgtacggccatggcggtctgtttaagactccggtagtcggacagcgcatcatggcagcagccattgatacaccggtttccgttatggagacggcaggtgagggcggcgcatggggtatcgcacttcttgcagcttacatggctcagaaagaagagggcgagagccttgccgattatctgagcaagagagtctttggcggtcaggagggcgtgacggaagatccggttcctgccgatgtggaaggctttgaccagtttttaaaacgctataacgaaggacttgcaattgagcgtgcagcagtcgaacatttataaaataatagttacagataagaaacaggcagaatccgtcgtttacagcggcggattttgtggatatggaaaggataaaaacatgttagaagaattaaaaaaacaggtttacgaggcaaacatggaattgccgcgcagaggcttgatcacttatacatggggcaatgtcagcgggattgaccgtgagagcggctactttgtcatcaagccaagcggtgtggattacgataaactgacaccagacgatatggtggttatggacttggagggaaataaaattgagggcgatttgaagccatcatccgacacaccaacccatctcgaactgtacaaaaagtatccggatatcggcggtatcgtacatacccattctccggaggctacttcttgggcacaggcaggaagggatattccgctttacggaacgactcatgcggattatttctttggaccgatcccatgtgcacgcagtctcacaccggaagagattgacgaggcatacgagaccaacaccggaaaagtcattattgagaccttggagacaagagggatcaacccggtttacacacctggcgtgctctgcacgaaccatggtccatttacgtggggcaaggatgcggcagaggcagtgcacaatgccgttgtcttagaggaagttgcaaagatggcaacccgtaccgaactgatcaatccgaaggtgcagccggcaccggattgtatccgcgataagcatttcttccgcaagcacggtgcgaatgcttattatggacagaattaaacaatatttttatggtaatattctcaaggaaagagagggatacttttttagaaaagcccctctcttttttctgtgtaaaatagacgattgcgaaaatgtatagagaaaatataatgacatgtgttgctgaaaaacgaatctttcagtatactatatttaattggatgtattgggtaaataaaagcaggagacgaagcgtatgccagtagcagaaaaatattcacacacaacggaagaaatttatgcattgccggaaggaaaacgtgcagaactgatcgatggacagatttatgatatggcacctccgggcagaattcatcaggaattggtgcagcagttgagccgtacgatcggaaattatattgcggatcataaaggaacctgtaaagtatatccggcaccgtttgcggtgtttttaaatcaggatgataaaacatatgtggaaccggatatttctgtgatctgtgataacggaaagctggatgacaggggctgtaatggggcaccggactgggtgattgagattgtatcacaaagcagtcagaggatggattatctgacaaaattgttcaaataccgtactgcaggggtgagggaatattggatcgtaaatcctatgaaacgtacggtactggtatatttgtttggagaaaatgaggacagcacgcagtatttatttgaagatgaaattccggtgggaatctatccggattttacaatgagaatttcagaatttgtgtgaacagtatctgtaataagcatttcttccgcaagcacggtgcgaatgcttattacggacagcagtgaaaaatttatgatggggaatgcctgatcccggtaattgtgggatttgaaggctcttgaagtatgaaatgtaaatcatgtaaaaacaggggaaaaagaaatgcctgtctctttttggggattttgtcgctggttacggtagtattgtgtctttcggcatcatgtaatgccgatggaaggaaggcacaaaaatacgtgtatggagtattcttaaatgcagaccgtacagcagttccaaaattaaaaaattacgaaactgttgtgattgatgcacagtatttttcgaagaaagatatcagaaaattacatgcagacggtacaaaagtttacagctatcttaatattggctctgtcgaaaatttccggccatattataaaacatacgagcatctagcaatcggggattatgaaaactgggaagaggaaaaatgggttaatgttgcggataaagactggcaggaatttatggatacattagccggaaaattaaagaaaaagggagtggatggcttttttattgataactgtgatgtatatgattatgcccataaaaaggatatttttgatgggctgacggtgattttaaagaaaatccgggcaatggggaaaccggtagtggtcaatggaggagatatctatgtgacagcatatcagtcccgttatggttctgctgcggatattatgacgggtgtaaaccaggagtcggtgtggagcaggattgattttacaaccaaaacattccatacgcagaaaaaaacggagcgggagtatttctgccagtatctgcaggcatgcaaagcggatggaatggatgtttatctgctggaatacacgacagaccataaactgatccgcaggattaagaagtattgcaggaaaaagaaatatgattactatattgcggattcgctggagctgggtatttaatacaatgtgtttttaaatttgactttaaaaagtagatataatacaattacattgttgaaaaaatgctgctggtacagctggaagagcttcataaagttgtcaccgctgttccagtgaaataacaggaggattagaaccatgggagtacattccatagatgcagaggatgatcagtttgcgtatcgttatgatacacagttactgatcgacagaagagacagggatcttgacgaggatgagatcgcagattacatcacggaaaattttgagggaaacagtctgattgcggctggagatgaggatctggtcaagattcatttccacacgaatgagccgtggaaaattctggaatactgcaatacggttggagaaatttatgacatcgtggttgaggatatgatccggcaggcagcagggcagcagggataaaaggcagagcgtccgatacagaatactatagtgtgacgctggaaatgaaaagaggtgctgtcgcatcagtaaatgattgatatttactgggcggcaacaccttttttcttttgataccatgaagtatagaaggccttccttaaatgaactttaaaagttttagactatttagaaaaactttatttgtccctgtgatacagctgcgttacaataaatataacaaagggcggatggaggaaatgatatggcaaatacaaccaagcttgcacttgaagcatccttaaaagaactcctgcggacaaaaccgattgacaggatcacgatcaatgatctgacggaacattgtggcatcagccgcatgacgttttattatcactttaaggatatttatgatctggtggagtgggcatgtgtggaggacggaaagcgtgcgttgcagggcaaaaagacatacgatacgtggcttgagggaattgcgcagatatttgaggcagtattggaaaacaagccatttattatgaatgtataccatgcggttgcccacgaaaaagtggagcagtatctgtataagctgacgtatgaactgatcgtaaatgtcgtggaagaaaaatgcaaaggtattgcgattgcagacggggataaacgctttattgcagatttttataaatatggatttgtgggaattatgcttgactggatcgacaagggcatgcaggaggattaccataagatcgttatgatgatggggacagcactcgatgggaatattgcgcggtcgattgagaattttaaacagaaataaaaattaatcaaaatgcctgaaatgataaaaattttatcatttcaggcattttgtaaatggtatcttttcacagagatggtaagataaccatatcgtatttgttccacaaatgatctgtcgtgttacaggttttatgattttatgggaattgattttgaaatgaatcagaaacctgtaacgaagaaacactaaatgagaagtatcccaggtatcagaaaggagatttttctatgtcaaataaaaataagaaattaggacttggaatcgcagcagttgcagtagccggtgcaggacttgtatatgcagcacagaaaaccagccagcagaaagtaaagaagatcgcaaaggcagcaccaccggttgattaccgcaacaccgagcgcggaaaatatgaaaagaacagcaaaggcatttattataccaacggaaactatgaagcatttgcccggccaaggaaaccggaaggagtcgatgacaaaaatgcatacattgtcggaagcggacttgcagcactcgcaacggcttgtttccttgtcagagacggtcagatgccgggttcccatattcatattttagaggcaatggatgtggcaggcggtgcctgtgacggaatttttgatccgacccgcggctatgtgatgcgcggtggccgtgagatggaaaatcattttgaatgtctgtgggatctgttccgcagcattccatcactggaaatcgaaggggcatccgtgctggacgagtattactggctgaacaaagaagatccaaactattcactttgccgtgcaaccgaaaatcgtggtgaggatgcacataccgatggcaagtttaatctgagtcagaagggctgcatggaaatcatgaagctgtttatgacaaaggatgaagatctgtatgataagaccatcgaggatgtgtttgatgaggaagtttttgactcgaccttctggctgtactggcgcacgatgtttgcctttgaaaactggcacagtgcactggaaatgaaactgtatttccagcggtttatccaccatatttccggactgccggatttctccgcactgaaatttacacgttacaaccagtacgaatccctgattcttccgatgaagaaatatcttgaggatgcgggagtggaattccagttcaacacggaagtaacaaacgttatttttgatatcaaagatggaaagaaagtggcaaaagccattgactgtaaagtaaagggtgtcgagaccggaatcgtcctgacggaaaatgatctcgtatttgtcacaaacggaagctgtactgagggcacaatctatggcgatcagaaccatgcaccaaacggcgatgccgaagtgcggaccagtggctgctggagcctgtggaagaacattgcaaaacaggatccggcgttcggacatccggaaaaattctgttccgatattacaaagaccaattgggagtcggcaaccgttaccacattggatgacaagattcttccatatattgagaagatctgccagcgtgatccgcgcagcggaaagacggttaccggaggtatcgtaagctgcagggattccagctggctgttaagctggacgatcaaccgtcagggacagttcaaggagcaggacaaagataaagtctgtgtatgggtatacggtctgtttaccgatgtgccgggtgattttatcaagaagccaatgaaagagtgtaccggtaaagagattacagaagagtggctgtaccatctgggtgtgccggaagaccagattgaggatcttgcagagcacagtgctgtctgcgtaccgaccatgatgccgtatatcacagcatttttcatgccaagaaccaagggagaccgcccggatgtcattccggatggctgtgtcaactttgcattcctcggacagtttaccgagacgccgagagataccgtatttacaaccgagtattccgtgcgtaccgcaatggaagcggtctacggactgctcggtgtggaccgcggcgtgccggaagtatggggaagcgtctacgatgtgcgtgaactgttagacagcagcgtgaagctgatggatggtaagtccccgctgcagatgaaccttggaccgctcaatgtgatcaagaaaccgcttcttggtaagatcaagggaaccgtgatcgagaagctgttacgggatcatgatgtgctgcgggatggcatgatttaaaaatgattttataaaaggaaaaagcgtctgagaattttgcataaagcaaatcctcagacgtttttgttttttcccataggtaataacctccgtttcaatctggagatattttcgtatgaagttgtgtctatttgatgaaaattgcggggaggacacaaagagttcacgaatcgacagaaaatcagatgttacatggaagcctgaaaccggaattccccatgatctgcaaagaatccatagacaccatggtatttttcgacaacagagatcatgctctgtacgccgatgccgtggttgacggaacgggatatcggaatatcatctgcaaaaacgacaggttgttcataactgttttttatctggatacataactgtgtatttttctcatataccttaagtgaaatatagcgttgggactgcggattcatctgctggcaggcatgaagtgcgttttcaagtgcattggcaaataaactgcacagatctgtaatctgaaagcgggaaaattcggtcgcagtaatggaaatctgcattggaatgtggtttacggcagcctgattggcgtaggaggatacaatcaggttaaccgattcgttgacacagtagcgaatgacagaactgtgttcaagattggtacagatttcgtggatgtaggaagtcgcttcttttgggttattctgatccagacaactctggatgaaattcatatggtgtcgcaggtcatgccggtaaatggctgcctgctgctgggaagcggaaagctgggcaatttctttctgtgcctgtgtggcagccgtagtaagcagaatattttcccgttctgctttatttttttcacttgaaaatttaagcgagagaacagacagaataaaaaaggatacgacaagaaaactgtccataaagtcaataacgactgcaccgcccgtgtagagcagatccgtgtagacagtaaacgtgtattccaggacatagtataccagcggaagcaggaaaaacaaaagcagtgtcgtgcggctttcatatttcagccggatgatatacggtgagacaaaccggatcacaagaacaagaagcggaatggtaataatgatggaggcaatgttcgatacaacgggatttctgtcaaaaaagaaagcaacaaaggtgccaaaccatttgcgtggcgtgcacagcagatatgcagacaaaacggagatggcagagattgacagattccggtgaaaccgcaggaaaattaaggtaatcaaagggatatggatcagaaacggatagcatttgtaaagcaccgactcccccatgatcagataaaaaagaagctgggcaatgccaaagaaaaaaagcgtcaggacatagacacgcttatgatcgcaaaaaccgatgtcggcaagatacagtgccgccacgatgccgaaaaataatacaaaagcataattaactaaagaaaaaacggatgaaagttcaggcataattattcctccatctgaaaagcgagatagtgttttttgatatcggcaaccctgcgctgtgcaagcggaacgtttgtgccgttgtgaagacacatatccattgtgccgattgagcggatatagttcatatttacaaggaacgagcggtgcacctgaataaattcccggtgttgcagcaggctgtcgcatacggacgagaacagttctgtgcagacgatctgttcccttccactcgtgtagtagataactttgcggttctgggcttccacatagacaagttcagacaggggaactttatgtacgccaatccgactttttagtacaagaaaatgcccctgttcctgtgtttttgcccgtaggatgtcatccatggcagcaaaaaaagcgttggcggataccggcttcatcagataattggtagcctttaccgtataactttccaccgcaaaatccgatgaagttgtaagaaaaataatatcggcagcatggtcgaaagtacggatttcgcgtgcaagctgcatgccggtcatatgtggcatgaggatgtctagcagataaatgtcgaatcgttcctttgatgcctgcagggcaagttcacagctgctgtgatattcttgataggtaaacggaatattgtgagttttctgataactgtccaaaagcgaccgtatgttggacaattccttttcatcgtcatcacataaggcaattttcatagggaatctccttcgttttcaatacatttattataccgtagcatcggacaaattactatagaaatctgctgtcattcacgtagagagaaaaacggaggttactgtttacagtaacctcctttttgttatgcaccgataaaatcatccgtcagttttccgtgtttttcatagttggtgacccgtgcaatgtgattatccgcatcgacaaaaacaactttcgggtgatgttcttttgcttcttccggtgtcatctgtgcatagcacatgagaatgacatgatcgcccacagcgacctgacgggcagcggcaccgtttaaacagatcatgccggaaccggcttctcctgcgatggtgtaagtttcgaagcggttgccgttttccacatcgacgatctgtaccagttcatattctaaaattccggcagcttctaagagatcggtatcgaccgtgatactgccgacatagttgagatccgcctgttttaccacagcccggtgaatttttccttttaacatattgtactgcatgagtaatctcctatttttccacgataaagttatcgatcagtctggttttgccaatgtatacggcaatggctacaagaatagagccggtgagagtttcaaccggagtgatggtgtcaaagtcaaccacatccacataatcaattttagcaagaggctctttttcaatttcggcggtgattgcggatttaatgaccgaggcacgggtttctcccgcatccacaagtgcttttccggcttttaagctgtggtttaatacaagtgcagcctgacgttctttctcgcttaaataggtatttctggagcttttggcaagaccgtctgcttcgcggatgatcgggcagccgatgattgtagtgtccacgtttaaatctttgaccatacggcggatgacggcaagctgctgggcatctttctgtccaaagtacgcgcgatccggtgttacgatgtggaacagttttaagacaacggtctgtacgccgcggaagtggatcgggcggctttttccacagagttcggtggtaagaccgttcatatccacataggagcagaaaccatccgcatacatttcctcaggttccggatgaaagatgatatccacaccggcggcttcacacaatgcagcatcttttttgaggtcgcgcggataactctccagatcctcggttggtccaaactgcatcgggtttacaaaaatgctgacaacaacacggtcattttcttttctggctgcatcaatcagacttttgtgtccttcatgcagatatcccatagtaggtacgaatcccacggttaatccttcttttttccatgcctttacggcagcccttactttactgatttctccatatatttccattttatgatctcctgattttcattgtaatttggttttattgttatttgacaaaaacattgcgaatgattccgtaggaatgttttaatataatttatccagaacggtttcatccattttgaaggtatgctcagcagcagggaacgttccggcagcaacttcttctttataagtgcggaatgcctcgcgcatctgttcaccgacctgtgcaaactgcttgacaaatttcggtttcatgttggaatacatggcaagcatatcctgatagacaagtacctgtccgtcgcatccggcaccggcaccgattccgatggtcgggatatgaatactctcggtaatctttgtggcaagggcctgcggcacacattctaagacaacggcaaaagctccggcttcctcaacggcacgcgcatcatcaagcagtttctgtgcggcagcttcgccttttccctgtaccttaaatccgccaaaggcattgacagactgcggggtcagaccgagatgggcacaaacagggatggaagcgtctacgatggctttgatctgagggcagacttcttttccgccttccagcttgactgcctgtgcacggccttctttcatcaggcgtccggcattgacaaccgcgtcatagacggaagtctggtaagacataaaaggcatgtcggtgatgaggagtgtatctttgatgccgcgggcaaccgctgcactgtgatggatcatgtcctccatggtgacggagagcgtgtcttcgtatcccagaacaaccattcccagggaatcgcctacgagaatcgcattgacacctgcctcatcaatgagtttggcagtagagtaatcataggcagtcagcatggaaagcttttcgcctttatttttagcttcctgaaaggtaacaactgtgtttttcatttattgaaatcctccattttctttttcctgtttatcagcaagtaaaacatgtctcatgttttcataattctgtgctggattttttccttctgcgattgccagaagccgtgtgccgagcatgcggtacaaagcggcatcttctgtgtttaaacagtgtaagtgcttttccacggttgagacatccccgcgctcgatcggaccggtcagtgcatggacacagccctgcgagagcacattttcgatgttctgacggaccagtgcagcagttgccgcaacggctttttcgcgggaaaatccgcagtcttcgagaagccggtaccccgtatcaagtaccgcgatcacctgattgcttaagatgctggcagctgcatgatattctggcttggctgcggcatcaatccggcagacttcatttccataggaagtgagtaagtcggtgatgacctgtacggcatgtgggtggccttccacggtaaaaaatgcatgttccaattgctggtatgatgaaaatttgttactgaacggtaacatgggatgaaccgagcagcaggatactcctgcttctttggctccggaaaatgaatcggatgaaagtgcgccactacaatgacatataatctgattcctgtgtgacatgcctttgatttcttcccatacgggtacaaggagcgaatcgggtgtcgtgatgaagaggatgtctgattcacgcaccagttgctgcacctgattgaaaccggcagtctgtgtaaacgcggcggcttcttctgcggccgcggcattggtatcataatatcccacaaggtctgcgtttttactccggaaatattttccaagggagcagcctacgcgccctgcgcctatgattcctgttttcatgctaccaccttccttctggtaattaaatggatcggatcctgtgtaacaggtgtccgtcgaaatcctgtgtaaaggtgactcacatattcatttggggcgatacattataaatataccgcagtcgatacagtttctgtatgaataccgttcagaacccactataacataatcttgggaaaaactcaaataaagttaaagaaaaggcttgaaaatccgcataaaacatggtatagtatatcctcgtgataactattttttccttgttcacaggctatgttctgtgagccagagaccaaaaggaggtaacatttcgcatgaacaagtatgaattagcactcgttgtcagtgcaaagatcgaagatgatgcgagaacagcaaccgttgagaaaacaaaagagtatatcactcgtgcaggcggtactgttacagaagttgaagaatggggtaagaagaagttagcttacgacgttcagaagatgagcgaagcattctactacttcatccagttcgacgcagcatctgatgctccagctaagcttgagcaggatgtccgtatcatggacaacgttcttcgtttcttatgcgttagaaaagacgagcagtagtataagaaagtaggagattgtatgaataaagtcattcttatgggtagattaaccagagacgcagaagttcgttactctcagggggagagttccagtgcgattgcaagatttacactggcagttgaccgtcggttccgccggaacaatgaggatcagacagcggatttcattagttgtgttgcatttagcaagacagcagagtttttggagagatttggccgcaagggaaccaagttcgttctcgagggtcatatccagacaggcagttatacaaacaaggatggacagcgcgtttacaccacagatgttgtggcagagaacgtagaatttgcggaaagcaaaaatgcagccggtggaaatgctgatttcggcggtgcaccttctgctccatcaccaagcggagctgccggagatggcttcatgaatattccggatggaattgatgaagaattaccattcaactaaatgctccatagagcataacatcatataggaggttaaagaacatggctttcaataaaacagctgaaggatcttccatgaagagaagaccaatgcgtagaagaaaaaaagtatgtgtattctgtggcaaagataatgtcatcgattataaagatatcaacaagttaaagagatacatctctgagagaggaaagatccttcctcgtcgtatcacaggaaactgtgcaaagcatcagagagctcttacagttgctatcaagagagcacgtcatctggctatgatgccatacgtttgcgagtagacctagtaataccaagggtttcagcgtttggagacgtagcgttgacacaagtttgacacaacatttgaccaacgattcagaagatggatcgttggtctttttttatgtaatgacatagtgacaatatctaataatgttaagttggtttattatgggaaagaataaaattatggcatattatacttgattaagaactatagcaatgatacaataatgcaaaatgttgacatcaaatacatttttactttccaaaatgttgataatacgcactggtagaaagaaattttgttgatgggggtattatgttaaaaagaaaagcaattgcttcaataaaaaactgggttaacacaaaaaataaaaaatgccttgttgtacagggagccaggcaaacaggaaaaacatatattattgaacggtttgcagaagacaattatgaggaactgcttgaaatcaactttaagcagatggtttctgccgttgacattttttccggtgatcttacggtagataatatggttatggctatgcgtttccgctttcctgaaaagaaaattctgccagggaaaactttgatttttctcgatgagattcaagagtgccaggaagcaatcacatcccttaaattctgggcaatcgataacagatatgatgttattgtgtcgggatcgcttcttggaatcgattataaacgtgcatcgtcttatccggtcggttatgttgattatctgagaatgtatgggattgattttgaagagtttctctggggaatggggatttctgaagacatgatcggaaacctctgcggatatctggaatcaaagaccgtgatacctgaggcgattcattcccaaatgatgaattattacagacagtatatagcaataggtggtatgccggaagctgtacagaaatatgtagatacaaaggatttcagagaggttgataagatacagaggagcctcttattgggatatcagtatgatatagcacattatgcaactgcggaagaaaaggtaaaagcagagaaatgttatctttcacttgcaaagcagctgcttgataaagaaaaccacaaatttcaatataaagaagttgagcatggaggcagagcacaaaagtatttttcaagtattgagtggttgcttcgtgcagatatggtacatttaagtaaacttgtgacggatgtcagatttgatctggatgattatgcaagagatgattttttccgggcttatacaactgatttatcattgttgatggcgatgaaggacttttcattaaaacagcatattgtagaaaacactttagagggaaattccaaaggcggtatctatgaatatgcaataacagatgctctgtataaaaaggaatatcagttatatttttataaaaatgagacaacgaaaagagaaatagatgtagtgatccaaaaagatggaatggtagttccgattgaagtaaaaggcggaaatacgagggcaaattccttaaagtcacttatgaagaatcataaagatatttcttatgggtataaatttgcagatggaaatatcggtgtgggcgaagatgagaccgtttcaagttttgtgtaaacgttaaaa

SEQ ID NO: 970 - DNA, 7904 bp, Unknown
  gut microbiota DNA sequence
tcatcaccctttaacaggtaaatctcattgaatttggttgtctcagcaacacggtcgatctctgtatttaactgatcgatctcgtcctggatcgccttacggtctgtatccttagagtttgttccgtttgctgcctgaactgcaagctcattcatacgctgtaacatgctgtgaacttctgttaaagcaccttcagcggtctgtacagaagatacaccgtcctgtgcattagaagatgccttgtccagtccgcggatctgctttctcatcttctcggaaatggtaagtcctgctgcatcatctgctgcacggttgatcttgtaaccggaagataacttctcggttgacttagcctgtgctccggatgtgataccaagcattctgtttgcgtttgctgcctgcatgttgtgttgtactaccatactcataatagaatcctccttgaactcccactttgtggggtattatgttttttcctctggaaatccttttcctaaggtgttcttattgcgtcactttgcagtaacgcgtcacaagcatcttttgatgctttgcgaccttgtatcaaataagcgaagcgtcccgggtgtgccccgcctattaccagaatttaaaacagatcaggagttaaatttatctttcaaactctctgcatctttctttgcctctgccttcatcctctcgttccacaggattctcttaatttcctgctgtgcctccttggaaatacccggctctgcataataggtttccttcttacgtgccggattttcttccgtggtgcttctggcaatattaagttccctcggagcatcaatgagcagccttgcgtgattacccgaaccaccgacatagaccacacggatgtcatccccgatatttacgtattgtccctgtttcaatgaaagtttcagcatttttttacctccatgcacgcaaagcctttttgctacgttttgtatcttttatatcgtctgttcgctacggtttgttaacctctattttttataattgctacattttgttactttttatctaatttttccattcttattcgtttaaaaaccgtttatttttgtgcatattttacatttctatgcaacattctgtaactatatgactattttttcgcttcctacaataaattaacttctgttttatcaatagctactatctgtaacatttcatgatatgtgaaaaaatagactaattttaagaaaaggtggtattttattatgagtgaaaaaaaacttcctcagaaattgaaagaactgagaaaggtaaataattacacgcaggattatgtagccgcggtacttggtattgtccgccagacatacagccattatgaaactggcagacggacaccggatgccgaagcattatacaaattggcgggtctatacaacatttcgattgacgatctcatgcatctgaccgttgatattgaccgtgaagtttcctatgatgcaccggttccttcccagtccagcgaagacttatctgagtttcttgaattttttaatgatcccgcgaataaaaaaaagtacatgtttcatacgaatctggaaaaagaattgcttttttattttaataagatatctgaagaggataagaaagaaattattgaatttacaaaaattaaggcccgcaagcctttataacaaaaaaattgcttctccagatactgtttttcatggtatctaaagaagcaatttttaatactatggaaattacaatttcactacatgcactttattccggcttccgcaagcctcttgtattcttttccacaagcttgcgtgtcaccatcatctgatgtccacagccagtgcatttcaggcggaaatccgcgcccacgcgcaaaatctcccattcatggctgccacacggatgtggcttttttaatttcacaatatctcccacttcatactggtactgattcatagctggtctccttctttttctccccttacagacaattgtaaaacccgcgacggcaggaaccggagtatgttttgcaattgtctattattttttctggctaacacttgatctgtgaaaagacatttccaagtccatcctggataagaagatccgcacgcgcatccattggagttgcactcttattaatcaaaacaagcttatttcccctgtaataatcaatcaggccggctgccggatatacggcaagcgaagttcctcccacaatcagcatatccgcatggctgatataaaataccgcatcctgtaatgttttctggttcagcccttcttcataaagaactacgtcaggcttcaccggaccaccacagacaggacagaccggaactccttccgagtggagaatatcttccgcgctgacaaactgtccacagcgttcgcagtaattgcgcaatacgcttccgtgcaattccatgacgtttttacttccggctttttgatgcaggccatcgatattctgggtcacgacccctttcagttttcctgctttttccagctctgccagcttgaaatgagtgatatttggctgtgcatccagacagagcattttgttccggtaaaaccggtagaactcttccggattctgccggtaaaaactatggcttaaaatagtctccggcggatacttatactgttgattatacaaaccgtccacactacgaaaatccgggattccgctctcggtcgatacccctgctccaccaaaaaatacaatgttgcccgattcctccacccattgcaaaaactgttccgttgcttccattttttctcctttctccgcgaacagggaaaaaagaggctgtcactgtgtgacaacccctgtctgatttcctgtgctatatggcaaattgatatttttaatattcttataataaggatgccagttgctgctatacagcctctgtattataaaatacatctttcttcatctctccggcaatttgctttgcattctccagatcatccaatatctggtatgccggtgttgttgcgtcttttaaattctcccggagttcttccagtctctgcgcatcctgttgctgctgctcacactgctgctggatatggttcgcctgatttgccatctcatccatggaacttgaaatctcttcgctgacagctgccagggaactgatggaatcggaaatctttcccacactcttctggttcgcatcattgatctcccatgcagaattaatcttctcgctcatatccccaagtgcctccaccgcggtgtttgcactgtctgaactctttgcggatgcttctttgatacgctccacgaactcactcatgttggctgtcatgttctgggtctgttctgcaagtttacggatctcttccgcaactactgcaaatccttttccggcttctcctgcacgggctgcctcgatggatgcattcagtgccagcagattggtctggctggaaatggaattgatcccttcaatgacttcattcatattactgataatgtcaaaaagcttctccatattctgtttcatggtacttgattcactgatcgtcttatcggacagatcgcggatagccgtcagctcctgctgtccctcttcgatgtttttgtaaatcgctgcagattcttccgatgcagacaatatcgtattggtcagttcctcatgctggttggaaacctcccctgccacacgcgaactttctgacgcagacttcgtagcgtcctccgatgcctgtgcgatctcctgtgaaacagattccatcttggaattataatcttttaaggcatccacaacctctgcgatctgtaacgatgcggatgcattctttgccaggatctgaccgaactggctgcgtccgttcaccagacgggtatacagttgctgtatctccggatcttttgaataatctacatttttcaattccagaacggcctgcagaccggctctgtctgtcttttttccaaatgccatattatatacttcctctctgttgtaacatacaaatctctgtatcttatgccttttattctgaactaaaatatgtttaaagtcaacatatttctatcataattcagatattttttgacacttttgctgctacacacaggttgccatgcgaacaataacactattcttacaacttcaggttttccacacaagaaatacacttgccacaattccggcagtggttgcaaaaagggctcccggaagtgtatatcttgtcttttttacttttaccgacataaaataaaccgacatggtataaaaaatggtctctgtgctgctgagcataaccgatgccgcacgtcccagcatcgaatctgcaccatgtgttttgtagatatccagtaaaagtcccgttgctgcagaggaagaaaacatttttaccacagcaaccgggatcagctcggtcggaaatcctgtcgccgccattaattttccaagccacccggaaataaaatccaaaaaacccgaagcccgcaaaatacctactgctgccatcagtccgattagcgtcggcataatctccactgctgtgcggattccgctttttgccccttccaggaaatcctcatatacatgctgccggtgcatcaggccatttcccacaatgagcaataccagaatcggaatgactgcctcggataagtacagaatcaaattcatttttccaccctcccaaatgcctgccggagcttgatgaaaatgacagctgccaacgtggaaatactagtggcaatgatggccggtcctacaattgcagccggacttacggctccatactggctgcgatatgcaatgatattcacaggtatcagctgcagggaagaaatattaatgataagaaaatcacacatcgcgtctgtcgcctgatttgacattttctgcagccgctttaactctttcatggcagaaatccctgccggggttgccgcccagcccagccccagaaaattggacaccatattcgttgccatatatctggctgctgtggaattttccggaactgacggaaacaaaaaacgtagtatcggtcccattgcagatgccgcacggtttaccatcccccctttttccgcaatcttcataagtcctacccagaatgccatggcacctgtcattgtcaggcaaaggcttaccgcttcctttgccgaagcaagtgcctggtcggtcactgctccaagatttccagtcattgcagcatacaccaccccgacaagaatcattccaccccataaatagttcatccgcgcctcctgtttgcgttcttaaatcattgtatgggctttgcttttttcatattccttttgcaattaccggataaacccaaaagggaaggcatagcccaggctttccctgcataaattttcttaagttttcttacaggagtttctggtatgaaacatcttttgaaaaaacaccggatgctttccgtgggtatttttctggctgcggtgctctccattatttatgcagccatcctctcccctgccggaaaaagtaccggttctttttctgaattttgtaccacgctttttcgcgaagagatgaaatccaacaccatgaatctgcactttacgctaaaagatccaaaagctgccggcattgactcttatgagatcacgcttggcagtctgtccggtgacagccctcataaccaggccagacagctcaaaaaactttcggaagaactcaaaaaatattctcaccgctctctcaaaggaaaagaccgcttgacctgccggctgctttccgattatatttcacgccagcagaaccttgctgcctatccctattacgatgaacctctgaccccttccggtggtgtcacctcacagctgcctgtgcttctggcagagtatactttccgcaataccagagatattaaagattatctcggactgttgtcgcagatggatacttattttttagggattttagattatgaacaaaagaaagccgatgcaggacttttcatgtccgatgaagcctgcttaaaagtcattgaagggtgtgaagttttcaccgaacatcccgatgacaattttctgatcgatacgttttccaatcggttaaatgccatggatgggcttacggatacccaaaaaaatgcttatttgaagcaacattccaaagttctgagtgatcatgtcattccggcttacagccagatgatcaaaggacttaccatgctgctgggacggggacataacaactgggggctttgtaacttcccggaaggaaaagcctattacgaggcggtcgtgtctgcagatacgggctgtgatgacagcgtggaagatctgttttcccagattgccaaagcccggcgggaagatctcacgttctgtcagaatcttttggaaaaaaatccgaaacttgcttcccagtctccgaaacccgatgctgccttgaaagaggaaaatgccatgctttcccggctgcaaaaagaaatccttactgacttccctgcaccaccacagacagacgtggaaatctgccacgttgatccggcactcagtgagtacttggctcccgccttttatatcacggctccgattgatgatatttcacacaaccggatctacataaacgatgctaaaaatgatacggatatctattactttacaacgcttgcgcatgaaggatatcccggtcatctgtaccagaccatctgcacctcctcctatggtgctccggaagtcctctccctcctcaactatccgggttacaccgaaggctgggcaacctacacggaaatgcagtctttctattatgccggacttgatccggatctcgcctccctgttacagcacaaccaggccgcaacactcagtctctatgccactgcggatatcgggattcattattttggatgggaaaaagaaaaaaacgccgcattctggagcgaatacggcgtagatgatactgccacggtaaaaagaatcacggatctgatcctcgaagaaccgggaaactacctaaaatattatgttggctatctgaaattccgccagatgcgtgaacagcttgcgctcgaaaacaaaagcttttcggtgtctgcatttcacgaagcaatccttcgcaccggtccttcgcctttttccgttctcgaagaaaccgtgcgggatcagttaaaataaagtccattgatcttttttattttaacagtgcctgatagatatcgcgcttgctgaccccacggtcttttgcgacacgtttcatggcttccttgcggtcaatcccctgggactcgtaatgcgccatgtgttcctccagggaaagtgcttcccatccggcctgttcctcctttttcatctcttcgcgggaacggccggcaatgatgaggacatattccccacgcggctcattgacttcgtaataggatagactgtctgccagtgtcatctgcagtttttcctcgtgacgcttcgtcagttcccggcagatggtaagcctgcggtctccgccaagggtatcgtgcagttcctgcagagtcctcaccagatgatgaggtgcctcataaataataatcgtgcgcgtctctgtttttaactcctcaagtaccgcctgatgctctttcttatctttcgggagaaaagcctcgaatgcaaaccggcgtgtcggaagtcctgacatggtcagtgctgtaatgcaggcggctgcgcccggcagcgaagtgaccggaatgccttcttcatagcagatgcgcacaatatcctcccccggatcggaaatgcccggtgtccctgcatctgtaattaatgcaatgtttttaccctcacgcatttttgcgacaagctggtaggctttttcaattttgttgtattcgtgatagcttgtcatcggcgtcttaatctcgaaatggttgagcagccggatggagtttctcgtatcctctgccgcaatcagatccacttcttt

SEQ ID NO: 971 - DNA, 72294 bp, Unknown
  gut microbiota DNA sequence
gatttcataatcaccgatatcactgcgcgtgtaataataatagtacatctggcgtttgatatagcgaagctgttcactggtaacaggagtggacagatcaattactctggaaaaagtagaatcataataaggctgaaggcagaaggttgccagtgcattcagatattcatcaaaatcttccgcttccagagaaagaatacgctcagttgtggactgataattggagatggttaagtccttggtttccgtatagttggagtaggtgagtacatgcagtaccagcgtgatcacaaggacaatcagcagagacagttccacccagagggggcagcaatttaaaaaatcccggatgcaggaaggtatggtttgttttcgtttcattcgtagttccccagacattttttgtatattttttcagattcattatatccattctttttcatgcaggcaagtggttgagtacaatatattcgttataataactaaaaaagtataaaaaacaaaactggtgttgtgcatgttgttctgttttttccccctcatggttcataatattccatttctattcgcttgaagttcatttatactctgtattgtaaggaacaaccaaaacgtagagggagggataatatgaacaagaaagtgaaaaaaggttttgaaatggccgtgttcacacttccgtcgattgtacttgtgtgcattatgatgtacattccatttattttaagtggatattactcgctgacggaatggaacggtatttcaaagtcagcaaaatttgtggggttggcaaattttaagacattgtttacatctggaggagatttccttccggcacttggatttactacaaagtatacgatctgctttgtgattttttcaaatgtgattgcacttgctttagcagtgatgttgacaaagaagtttaaaggagccaatttcctgaggggtgtattttttattccatatatcatgagcatgacaattgttggatttgtatggaaattcatttttaccaacggatttcagaaactgtatgagatgacaggatggaatttttggaattacagctggctgggagattccaaactggtatttttctccgttgtgctggttggtgtatggcagtcacttggcttttacattgtactttatattgcaggactgcaggcggttccaaaggatgttttggaggcagcagttgtggatggtgcaaattccagacagtcattttttaaagtaacacttccgcttctgggaccgtcctttacgacctgtatttttatgtcattaaccaacggtctgaaagttttcgatatcattctggcattaaccaaaggtggtccgggaactgcatccaacagtgttacgctgcagatttataaagaagcatttacgaacaataattatggattaggttctgcagaatccatcatttacttcttattcgtattggttgtaacacaactggtactgaaaggatttagccggaaggaggtagaaatctaatgagcctgaaagcaaaacgtaaaagaaatatgggaatcatgatcatctgcctgattctgattgcaattgtatttatttatccggtatatctgatgtttatgaattcgttcaaaccatttggtgagattgttgcagatgtactggcatttccaaaacattttgacctgagcaactatacatatgtaatcaaaaaaatggattatgcattgctgttccggaacaatgtgatcattaccgtgataggtattgccggaattgtggtcttttcttccatggcagcatatatgctcgaccggaaagacggaagatatacaaagattgcatatgcaataattacaacaccaatgctgattccgtttcagacaattatgatcacactgttaaaatccatgaatgtactgcatctgtccggcagcaagatcggactgggtatccagtactggggatttggaattccgatggcaacctttattttctttaactttatgaagacggtgccaaaggaacttgatgagagcgcgaccattgacggagcatcgacgttccgtacctatacatccattatttttccattactgaaaccggtaaccgtgaccgtcattgtactggatgtaatgtggatctggaacgattttctgcttccgcttttgatggtaaacagtaacaatcaaacaaaaacgctggtacttgccgcatatacgtttgtgggacagatgaataccaagtggaattacgcattgaccgctatggtgctgaccgtagttccgtccatcatcgtgtttattctgttacagaagcatatcgtagaaggcgtagtagccggtgcagtaaaaggatagggagggtattcttatgaagaaaaaatttttaagcgcaattctttgtgcagcaatgggagtaacaatgttggcaggttgtggatcttctgggggaaacggtggagattccagtcagtcggcatcagcaaaaagcgatgattccggagaaatttatatgtttatcagccagccggagtatgcggatgcgataggggaactgatcgatgagtacaaaaaagtggctccgaatgttacgatcaattatgagactacacagaacgattatccgacgctgttgaaagcaaaattaaattctggagagacccctgatattttctcctctacttccggaaaagagattgatacttataaggagtattcctatgatctgaccggccagccgctgacagaaaccatgcttgactccgtggcagcaaccatgcagagcccgtcggatggaaatggatgctatggtgtggcaattaagggaaattatttcggtattgtatacaacaaagacatttttgaggagtgcggtattacggaatttccgagtacggtttctgccatgaaagatgcatgcgaaaaaatttctgcaaaaggatatcagccatttaccacaggctttaatgagtggtgggtatttaaacatatctggcagcatttcctggatgcagctgcaaaggatgcgggactttctacttctgatctgatcgcaaagtttgagaagggcgaagcaaaggtatccgattatccggaactttataacaattattttgactttattgatctggctgtaaaatatggggatgagaaacctctggaaactgcacttgacggtgaggaatccgcatttggtacaggaaaagcagccatggtattaggacagggcgcatggattgaggcagactgcttatccatcaatccggatctgaatattggatttaacggatatcctgtaacagaggatgcttcccagtgccaggtaatctccggttctgatcaggcattacatgtaaacaaggattcaaaggtattacagcagacactggatttcctgaactggtggtatacatctgattatggaaaatcatggtttacggatgttgccggtgtagttcctccggtagaatctacgacagagagcaaatatgaaatcatcaaacagggagatgaactttcaaagaccaatggcactgctgatctggcaatctgctactcaactgacagctggcatcagtcatttggcgagattatgcagggataccttgcaggaacaacggataaggatgcgacttgtgcacagattgaatcacagtggaaagctattgacggcgcacagtagaacgcgtaaatgatgtagtttttaaatgcggcacagtccggacagactgtgccgcattttttatgaaaagaaaggcaggtataacaaatgaaatttacagagggtttttgggtcagaagtgagcgggcaaatgcctcttatgcatcacagggattttatgcaaagaagactgcatatggcatgcagattgtggcaccggagcgtccggtattaaatcgtgcggatgcgatgaatatttctacgattacaattgattttattgcatatgcaaaaaacaatattctggtgaaagcaaaacattatgagggatatgagaatggagaagcccgttttgaactcaggcaggagaaggtgccgtttgaagttactattaccgaacaggaagcagttcttgaaaccggggatgtgaccgtccgttatgaccggaccaatggattttaccggttcgaggcagatggcaagatccttaccgacagtgggctgagaaatctcggatatgtccggtatgacagaaaaccggcatcggtactgccggaagaaaactatctggcagaagattataaaccatatatggtagcagaactctccttaaaggcaggagagcgggtatatggatttggagaacagtttacagcatttgtcaagaacggacaggtaatcaatatgtttaatgaagacggaggaaccgcttccgaagttgcatataaaaatattccgttttacatgacaaatgagggatatggaatttttgttgatcataccacaccggtttcatttgaagtcgcaagtgaaaaggtagagtatgtgggattttccgttccgggagaggaaatccgctatcatctgatctatggaccatcgccaaaagaaattttaagccgttatactgatatgacaggaaaaccggcacttccaccggcgtggagttttggattatggctgacaacttcctttactacaaactatgatgaaaagacaacaagttcttttattgacggaatggcggagcgaaatatcccgcttcgggtatttcattttgactgctactggatgaaagcctttcattggtgtgattttacctgggatgatgaaacgttcagtgatgtggagaaaatgctgcatcggtacaaaaccgaaaagggcctgaaaatctgctgctggatcaatccgtacattgcacagggaaccgactttttccgggaaggattagaacatggatactttgttatgcgcaaggatggaaaaggaccacgtcagctggatttctggcagccgggcatggcactggtggattttacaaatcctgcagcaacaaaatggtataccgataaactgcgtacacttctggatatgggtgtggactgctttaagacagactttggtgagcggattccggttgatgtaacctatcataacggagccgatccggtaagtatgcacaattattatacatttttatataatcaggcagtttttacattgctcaaagaggttaagggggaaggagaagcggttctttttgcaagaagtgccacagccggagggcagcagttcccggtacactggggaggcgactgttccgcaacctatccatccatggcagagacgctgcggggcggtctgagttttgcaatgagtggattttccttctggagtcatgatatctcgggatttgagcagactgcgacaccggatatttataagagatggctgcagtttggtatcttttcttcccacagccgtctgcatggctcaaccagctaccgtgtgccatggctgttcgatgaagaggcatgtgatgtggcaagattctttgtaaatttaaagtgccggatgatgccgtatctgtatcgcatggctgtttattcccatgagacaggcattccgatgatgcgtccgatgattctggaatttccacaggagatgggggtaaaagatctggatatgcagtatatgcttggggattccattcttgtggctccgattttccgggaggattccgtgggagagttttatcttccggaaggaacctggacccacctgctttccggagagcgccgggaaggaggaagatggtataccaaagtctatgattatttttctctgccggtatttgtgcgtgaaaatacggtacttgccatgggcgaaaatgatcagctgccggattatgaatatgcagagaatgtagtactgcatctgtttgaaatcaaagatggtgccaagattaccacagaagttaccgatgtgtccggaaagaccgtgcttgttgcaaacacaaagagagagggcaatacggtttctgtaaccgtggatcatccgcaataccatccgtcggttatggtgcatggtatgacgggggttgcaattcagacagagcttgaagtaaattatacaggcaaaggagttatttaatcatatggaacatgcatattggaagcagatgatagaaatagaagaaaatgggatttttctggtttttggaattacacggaatgatcagatcaaatttttacacttttcttccgttccacaggcagaggatatgtccgtacaggaatgcaggcaggaggatgaatgccggatgatggatgaaggatttcctctggtgcagctggaactggctggctatgatcgtccatatgagcggcatggaaataaatatgtggtgacttctcccggatgttatctgaaatatgaaaatatgcaggatacaaagaatgaatccgggagaatgcttcagatccggcagaaagatcctcttaccggagtctgtgtacagaccgacatacagttttatgacggagtgccggtggcaagatttgtcaaccatgtaacgaatgagggagaggaggaacaggtactgacgtacctgtcctcctttacctgctctggaattaagagagatggaaactttttgtatattccgcataatgggtggcagaaagagctgaactggcgcagatattcgtttgaagagcttggatttccggtgacacagacgaaaagtatccggagaagttccaaaacaatagaagtttacaataccgggaattggtccacaaaagagtatctgccgatgggatttctgagccatccgcagagtggcgcggggctgatctggcagattgaaaacaatggttcctggcattatgagatcgcagaccagaatgatcattatgttttgaatgtcagcggaccaaacgagatacagtcacatttcagtaaggtgctgcgcccgggagagacatttgaaagtgtgccggcagcagtgggtgcagtgcgggcagatatatcagatgcattttctgcaataacggaataccggcgaagaatccgcagaaaaaaccgcgacaatgatacactcccggtaatttttaatgattatatgaattgtctgtgggcagatccaacgacggaaaaagaattaccgctgattgatgctgcagcaaaggccggatgtgaatattttgttattgatgccggatggtacgcaaagggaatctggtgggacagcgtaggagaatggaaagaaagccgtgagcgtttcccaaagggaatccggcaggtgaccgattatatccggagcaaagggatgataccgggaatctggctggaactggaagtaattggaatccacagtccgaaacttgcagaattaagtgatgactgctttttcaaacggcatggcagacggatatatgacagaagccgctatcagctggatttccggaatccggaggtgatcgcccatgccaatgaagtgatcgaccgtgttgtgaatgaatatggcgtcggttatattaagatggattataacattgagccggggatcggaacggaattggatgcagacagttttggagaaggactgcttgcacatgagagagcatatctggcctggctggatacggtatttgaaaaatacccagatcttgtgatcgaaaattgttccagtggaggcctgcgcatggactatgccctgttgtcccggttaagtatccagtctaccagtgatcaggaagaatatgatatgtatgcacagatttctgcaaatgcagctaccggtgtcgcaccggagcaggcagcagtgtggtcctatccgttagagcaaggagaccgcgaggaaaccatctttaatatggtaaatgcgatgctgctgcgtattcaccagagcgggcatctggcgcagctttcaccggaacggttccagcttgtaaaagaggggattgactgttataaacagatccgcaaagacatcaaaaacgggcatccgtactggccgtttggacttgcaaaagcaggggattcatggatggcatacggaatggaagcacccgcacaggaaggtgcgaaaaccagaacattttatctgtctgtctggagaagaggcggggagcagaaagcatgcacatttctcccggtacctgcatacaacacaccggactggaacggggcggatatgacagtaaaacagatttatccggtggaagaggcacagcatgtgcgcatcaatcaggatcatacaatcacggtggaatatgagcagccggtcatggcacgtgtttttgaagttactatttgacttttttctttgaaaccaatatattgacagagtaagtatgattagaatcataacagactgagtgaggaagaaatgtacagagcaggaattgatcttggtggaaccaatataaaagcaggaattgttgatgaacaacagcatataattgcagaagcatctgtgccgacgaatgtagagagaccgtatcaggacatcataagggatatggcagaactggtaaaaacgcttttgaagcagaaaggtatcggggaaacacagctgaaaagtataggaatcggaagcccgggaacgattgatgcagtacatggagttgtgttgtattccaataatttcgggtgggaaaatgttccgctcacagagcagttaagacagtacttttcctgcccgattgcagtttccaatgatgcaaactgtgcggctttgggtgaagtaaaagccggcgcggcgcggcatgcaaaaaatgccattctgctgactcttggaaccggtgtgggcggtggaattattctcgatggaaaggtgtttgagggcgcacatgcaggaggtgccgaactcggacacacaagtctgatatgtggcggtcagctgtgtacatgtgggcggaaaggctgcgtggaggcatatgtatcggcgacagcgctgatccgcgatgcaaaaagagccgcgcagcagcacccggaatccatcctgaatacaatgtgtcagggagacctttcacacatgaatggaaaaatcccgtttgatgccgcacaggatggggatacagcagcagaaaaagtagtaaatgattatatttgctatcttggagaaaccattacaaattttgtcaatattttccggccggatattgttttgttatcgggaggaatctgcaatcaggggaaaaaactgacagagcctcttgaaacatacattcaggataaatgctttggaggcagcaaggcgtttattccgaaagttgcatgtgcggttcttggaaataaggcgggaatcatcggcgctgcaaatctgacaggcggtaaggaaagataaggagaatggagttattatggaagaaatttttgaacagtttaaagataaggatgcatttgatgcctactggaaagaacattatgttccgcttacttatgaggatgtaagggaagcatacgaggattttgtaaaatctgcggataagcatatttttctgtcggattatgaggaatccggtaatgtcagccgggaggattttatggacaatctttcacaggcggcgcagttcgcgtttcaggatggattgacggaagcgttttatgagaagaatccgcaggtttatgagaatgcatttgcattatttgaggcggcacagatggaaggcggggatgcgaatattgcggcagcttttcatgaagagtatcagcgtttgtaccatgattttttgttggaactgtttgatgcacaatatgcagaatagaccggggaaatataggaaataaaagaaggaggcgcataatgcggcctccttttaaaatttcataaatgtgcaggttgtattcttgaaaaacagaataaaggagcatttgccatgaaagttacgctacgcgtaaggcaaatgcgtaggtcatattctggaaaagaagaataaaggagcacttgttatgagaattgcgctacgcgcaaaacaagtgcgtaggttgtattcttaaaaacagaatacaacaagaaccgagtatcccgcttcgaatcagaaacaatagacgttacctttgcagttaactccccccaggcaccctcacgtcacatgagagctttcgcttagggctgctgtattcctaccctgacccggttcacgaattcccattgcgcaagacccagacgtcaacgccacttgcgaagggcagctccaccgccctgaccctctgcgggatatcaccccaactatagcggattgttggtacaaggtaccgctaccaccccggctactcggagatttaagtataattcatatcagaggctcttgtcaagcaaaactgcccgcatctgtaaatttaaaaaaaagctaaagtatctgccaaacgaaccgataaacaatgtatagagatgcaagaacagatgcatttcggaagcttatttcaaggaagaaaggagatgctgagcatgcgtatagatgcatataaccaggtagcacagttatacggtatacaaaagaatttaaagacacagaaggcgcagaatgcagcaggtccgagagatcaggtgtccatttcacaggccggacgtgattatcaggtcgcaaaaagtgcagtatcagaagcttcggatatcagggaagataaggtaagccagcttaaatcaatgattgatgcgggaacatattccgttgagcctggcgattttgccagcaaattacttgaaaagtataatgcctgatgcaaaaggcagacgagagaggtttttgaagtggctagtttagtagaagagcttgtaacagtactggaagaagaagaaaagatttaccagacattgatttcttatggagaaaaaaagacagacatcctgattcgggcagatgttccggaactggaaaaactgacatgtctggaacagctggcaagtgatgatctggtgacacacagcaaccagcaggtacagctcttaaaggatattgccaatgtactcggacgtacagaagaaaagatgacagttaccagactgatcactttgctggagtcgcagccggatgtacagaaaaaactgaccgaagcgagagaccgtctgcttgcggcagcagaccggatgaatcatctgaatgatcagaacgtggctctgattaaacaggccatagagttaaacgaattcgaccttacgttgttcaagagtttgcggcaggcccctgagaccgccaattatgacaaaactgcctgcaatacaggaagcttgctgggcagcagcggatttgacgcaatgagttaaggaggaacaaaagaatgggaaacggattcggaagcttatatattggggcatctggacttcagaatgcccagtatgcactgaatacaacggcaaacaaccttgcaaatgtgaacacaacaggatatgtccgccagcaggttcgttttgcagataaaaattataataaattaaaggacccgaataaaaatgtgaacatgcagcagtatgggctgggtgtatccattggagatgtggttcatgcaagagatattttcttagacaaatcttatcggcaggagaatggacgcaagggattttatacttctttttatgaaatcacggattatgtgcaggatctgtttcaggaattaaacggagaacagttcaaacagagtgtcagtgatctacatcaggcatttcaggaactggagcctaatatggataattccacacaacagaatctggtacttgaaaaagcggatcttctgctgagccgtacgaagtcattgtatgatgacatgaaatcgtaccaatccaatatcaatgaacaaattaaagatgatgttgaccgtgtaaacaagatcggaaaccgtatctatgaactgaacctgcagattcagaaagtagaagctggcggacaggaaactgcaatgaccctgcgagatgagcgtgacaatctgctggatgagctgggcggatacggaagtgtctccattaaggaagatgcgacgggatttacgtatgtagattttgaaagcacaccgtttatcgatgacaataagtgctataacatcggactgcaggaagacaaagaaaccggattttacacaccgtactggacgcagctttctgatgtggacaagcagcagtatgtccgcgtatttaaaaagaacgaagtgatttccacggatttaaataccgatgtgggaagtattaaagccaaacttcttgcccgtggggacggatacggaacgtatcaggatctggaaagcgaagaggcgtatgaccgtatttccggttgtaccatgatggagacagaagcacaggtttctgcactgcttcacaatattgtgacaaaaatcaacgatgcatactgtccgaataagacagtagatacggatgtcacctataccgatgccgatgggaatcaggtatcattaaagggaaagaaagttctggatgccgcaaactgtgcggtcggggaagacggacagctgccaccgagggaattgtttacccgtgtgggaatggatcgttataccaaggtgacaggagatgatgggaatacctactatgtatacaacgaagaggacgaaaatgatcccacgacactgtattccctgaacaatatcagcatcaataaagagttgcgcaagcagatcacactgatgccgtacaagaatcagaacggtacggattatccacttggggaaaaactgatgagcctctggaacgacaagggaatgacactgaatccgtacgacaaaaagccgtgtacgtttgaaggctattatgacaagctgatcgggcagatcggaaatgatggaagcactttccagtcggcaagtgagacactgacgggggcactgtcttccatcgacaaccagagacagcagacgatgggcgtttcctccgatgaggaactgacacacatgattaaattccagtctgcatataatgcgtccagccgttttatgacggtaatcagtcagatgacagaactgatcgtgacaggattgaaatagagataaggaggcgtagttatgccatcacaattttttggattgaatatcggggcaagtgcgttgtcggcatttcagacctcagtgaatacagcggcaaacaacgttgcaaatgtgcagaccaaaggatataccagacagacggcaaatctgtccgcaaccgatccgatccgtgtatataccagatacggcagtgtcggaaccggtgtggaagtgacttccgtgacacaggagcgaaatctctattatgatgaaaaatactggcagagtaattcaagccggggatttttcgaacagaaactgtattatgtggatcaggtccagacaatcttccgggatgatgagcaatcgcagaaaggattttccagtattttttcccagatgtttaaggatctggataccttaaagacacagggagaagtgaaagccgtccgcaatcagtttattcatcaggcacagagcctttgcacttattttaatgctttgtccaagagcctgacggagattcaggaggataccaacgaagagatcaaggcttctgtggataatatcaattccattgcagagaaaatttcggtgctcaacaagcagattaataatattgaagtacgcggaggacatgcaaatgagttacgtgaccagcgtgccaatctgattgatgagctttcagggattgcagatgtagagacgaaagaattcgaggtgacaaactccaacggacaaaacttaggaggaaccaattaccgcgtatatatcaacggacagacacttgtagacggaaacgattaccggacattaaaatgcacctcttcaaagtatctgaacaatcagatggatgccgagggcatgtatgccattacctgggaagataccggaatggaatttaatgccaaaggtgccagtgccaacggaagcctcaaggcattgtttatgatccgtgacggaaataacaatgaaaatatgaagggaacggtctcggctgcagatctgtcttctattacgataaagattccggatacaaaagtgaatgaactgtcactggcgaataaaggccggattatggtaaataataagttttattactatgatggatggacagcaaaagtcggtgaaaacggggtaaacagtgtaacatttaagcttgctccggaatcccagatggcagatcaggcagaagctgaccgtgtcaagggagacgggcagagcaattatctgacaaccggttcttccatggatgcaatgggaattccatattatcagaatcagatcaatgagttcctgcgtaattttacccaggcattcaatgatattgaaaaacagggtgttacattagatggcgataaaatgggagccttttttgtgggaacttccccaaccggaaacacgtttgatgcagatgcgtgggatgcgaaagtacaggcggcaaagaaagacggatggacaacggatattgaactgtcatccgatggggacagttattatcagtttacagcgacaacccttgcagtaaacagcaaatcattaaaggattccagctactttgcaacgtcaacccagattacacagggtgaggcgaaatacgataccgttgaggatcttttgaagctgcagaaggatgtgcggatgttccgcggagattctgcggagacgttcctcgaaacactgatttcagatgtgacggttgacgtgaacaagacaacaacaagttccaataattattcgaacctgtctaccgcgatcgcgacacagcgtacctcggtatccggtgtggatgaagacgaggaagcgatgaacctgatcaaattccagaatgcgtacaatctggcatctaagatgatttccgtgatgtcggagatgtatgacaaactgatcaatgagaccggggtggtatgatgcctgcggatgaaaccgtgtgagctgacagcataaaacttaggagggagatcctatgagagttaccaataatatgatcacaagcaacacaaagagcaatatcaatgcaaataaggtgcttgtggataaatataatacccagatgacaacgcagaagaagatcaataaaccgtcggatgatccggtcattgcgattcgctccctgcgtatgcagaccagtttgtcccatattgaccagtatctgaacaataacatttcggatgccaattcctggctgaatgtgacggatacggcgctggaaaatatgaaaacaatcctgacggatgtccgctcattatgtgtcaaaggggcaacggataccttaaaagaagatgaccgtaaaacgattctgaatcagctgaaatctttaagtgatcagatttatgcagaaggaaatgcagatttttccggcagaacggtatttaccggatatcgcacgaccgagcagctgacatttaagacagatgaagaaactacatcctacacgattgatcagaaattatcctataaagatatttccgaggcgcgttacacatacggaagcgtagatgtaccaacggatgcagcaaacagctttgatgaaacgatttccatcggggaaaatacctacgaccggctgcgtctggcgtatggaaagattaacggaaaagataattcggatggaacgggagcaattgatccgatttccagtatgagttatacgacagctgcaggaaagaaagtggaattagaccttgcaccgggacagactagaggacaatttgtagatgagaatggggcagcaaccggcagtacgtttaccatgtacgaatccaaagaggagtggcttaaggcgaacaatggagaagccaaagtcggagacaatgacatggtatttatcaaagataccggtgaaatgattctcggaaaagatttgtccaatacattaaagagggaaaaggcggatcttagcatcacgtacaccaaaaccggatttgatgctggagaggttcgtccggaatattactatgactgtaagatgaagactccggatatgcaggaggcggtacagtataccaaggaagaccagccgatcaatttcgaaatttccagtggaatcatgctcgcggcaaatacacaggcgagcgatgttttaagcactgacattggacgggacatgacagagatgatgacgcttgtttctgcttccacacaggcacatgacaaagtttcacaaattgaaaagatgatgtctatggataagtattcggatgaagagagccagaagaaacttcagacctatctggatgctgccaataaagaagctacctatgcagacgataatctgtcaaaaacctaccagcagtttatctcaaattttgacggatacctgaataaagtaaatgtggcacataccaatgtgggcggattgcagcagcgcgtggagctgacaaagacccgtgtggaaaaccagaaagagacggtagaagaattgaagtctaacaatgataaccgtgacatttcggatattatcattgattactatgctgcttacaacgcatatacgtccagtctgacagctgcatcgaaagttggaagccagacattactgaactatttataaaaacgcggagcgaaggagaaagaccatgaaggctgattcacgtatttttggaaaaattgaaatagaggatgataaaatcatcacgttagagaaaggtatgatcggttttccggatctcaatcattttgcactgatttatgatgaagagaaagaaaaaaaatacaattccattatgtggctgcagtcgatggatgatccggacattgcatttccggttatgatgccgcatatcgtcaaggaagattacaacccgaatgtaagtgaggaaatgattgcaccactcggaaagctgacaccggaaaacacatatattcttgtgacggtaacggttccgaaaaatatagaagatttttccgtaaacctgaaagcaccggttgtgatcaatatggataaccgcaaaggggtacagatgatagtggaggatgattatccggtaaaatacaaagtatatgatgtgcttaaggcaaagaaagaaaaggcgggtgaataagatatgctggcattgacaagaaaaaagggggaggcccttgtaatcaacaacaatatcgagatcaccgtacttgaaatccggggagatcagatcaaacttggaattacggcaccgaaagatgttccggtataccgtaaggaagtgtatcttcagattcagaaagaaaaccaggaggcaatcagccttgatggcatcgaagcattaaaaggaattcttggataaatcggaaaaacaatcggagggtgttaagtttttactgacacgctccgataattatttatagaatgacagtaatagattggctatgcagccggcataaccggcagcggatgatggagacaggaggtaatcatcatggcaatggaggctattaaaggtgcaggaatgacgtatcagggaagtgtgtcatctgcagaaagccagcccaaaacagattctgcggtaaaagcagcagagaccgatgcaactgaaaagggcatcgtatcggagaatataaagcaggctggtgaggagaacgtaaacacttcccagggagcagatcagcggaatacaaatgcgcagatcaaaaaagccgtggatgaaatgaataaaaaggcggtcaactcggaagcaatattcggcattcatgaggcaaccaatcgtgtgaccataaaaattattgataaagataccaaaaaagtactcaaagagatcccaccggagaaaacactggatatgattgcaaaagtgtgggaacttgcaggccttatggtagatgaaaaaagataaaaaaggggagggaaaattatgccaatcagaatgacaggtatggtgtccggactggataccgattctatcgtaaaagaactcgtttctgcatacagtaccaaaaaggaaaaatacgaaaaagagcagacaaaacttggctggaagcaggagatctggaaaagtctgaataaagaagtaaacagtttttataagagtgttggtaatctgcggtttgacagcggatacaataccaaaaagacaacatcgtccgacagcacgaaggcaaccgtcagtgcgagcggaaatgcgactgtcggaacacagaaactgcatgtgctttctactgcacagtccggttatctgacgggggctgagattaagacagcagccaacgagaaagttactacgtctacaaagctttcggatctgggtgttacagcagatgaaattacctttaatgtgggaccggcaaataattctgcatccggaaccacaaaacagatcaaagtaggaaaagacagcacaatcagtgacgttgtaaaccagctgaaggatgcgggactgaatgcaaattttgatgccggaaacagacgcttttatctgagttcttcagattcaggatatgcaacggattttaatattactgcggacagcagcgatacaaattctacaacattattaaacgcactgggtctgggcaagacggcaaagaagattgacggaagcgatgcggttattgttttaaatggcgtaaaatataccagtacaacgaataatttttctatcaatggattatccatttccgtcaatggagtgacagacaaagtcgatgatcttgaaaaggtcgatgtcgatgccttagatgacagcaaggcagtttctatttccacaacgaccgatacacagggaatttatgacaagattaaagacttcctgaccagttacaacaacatcatcaacaagatgacgaaactgtataacgcagattctgcaaagaattacgagccattgacagatgatgagaagtcgcagatgtctgattcggaagtagaaaagtgggagacaaagatcaaggactccctgcttcgccgtgattccaatctgagcacgattatgaatgccatgacgacttccatgaccaaggcaatttccatcaatggaaagaattattcgctttccagttttggaatcagtacacttggttatatgaatgcggcagagaatgagcagaatgcttatcatattgacggtgatgaggatgatgaaaatacatcaggaaataaagataagctgatggctgcattaagcagtgatccggataccgtgattgatttcatgaagcagttgtcgaccaatctgtatacggcaatcgacaagcagatgcagagaaattccctgcgaagcagatacagcatttacaatgataaggagatgacttcccagtatacaagctatacgaagaccattgcagagtgggagacaaagatttccgacaaggaagattattattacaagaaattctccaagatggagactgcgctttccaagttaaacagccagacaagttctctttcaggtatgttcagcagttaatcagtatcatgcagggcaatcttttgcaaaataaaatatataggaaataatagggggaatcaggatgattcagaaaaatccatatgcagcgtataacaacagtaagatccagacggcaacaccggcagaactgacgctgttactctatgagggagctattaaatttacaaacattgcgattgtagcgattgaaaagggcgatattgaaaaggcgcataacaatatccgaaaggcagagaatatcattcgggagtttcagataactctcgaccacaaatatgcagttgccaaagattttgatgcggtctatacctatctgttacagagattgttagaggccaacatgaaaaaggacaaggatatcttagaggaagtgcttggtcatctccgtaccatgcgggatacatggaaagaagttatggcaaagaccgcaaacggaaacaatatcaagactaaggaaccggtagcgtaatgccggcaggagacagtatgccagatacatatattgcaattatgctgcagagcctgaaaaaaaaggaacaggttctggatgaaattatccgcctggatgaccggcagaaagataccctgacggatccggaatgcccgtttgatgtgtttgatgaaaccgtggaggcaaaaagtgcgtgtattgatcagctgaaccagctggacagtggttttgagaagctctatgcacaggtggcagaagaactggatcagaaccgtgaagattatgcaaaggaaattcgtgacatgcagcagtgcattcgccgggtaacggacaaaagtgtcaagattcaggcgcaggaagcccgcaacaaagaactgatgcgtgaaaagtttgccacaattcacagacaggcaaaggcggtgcggaaaaacagccgtgcgattaccggatactataacagtatgaaagaatggtagttatttcataaaatgggacaaaagtactacttgataaaaaatatcatatgacttataatgaccttgttatatgactgacggataatgtggagcaccacgtgaagtataacatagcacgccgcatgaaaaatcgctgacgcgatgcgggtgcgtaggttatacatcagatagatgtataacaagggtcgtaccgtctgggcaaaagataaaaaacccaggcggttttttgcgttcatttatattttccggtttttggtaaatatattgtacgaaaataaagacatgcgtgggtattgacaaaatgatgaacgttagtgtaatctatcaatgattagagaatactaaccaataagagaaggaggatcaccatgttagaaatgaaagagtgggatggattcgaaggacgtctttggaaagaagagattaatgtccgccagttcattcaggataactacacaccatatgatggtaacgaggatttccttgcagaacctacagaggctaccaatcaactttggggagcactgcagaaactgcagaaggaagagcgcgcaaagggcggagtcctcgatatggagaccgaggttgtaaccggtattacagcttatggtccgggatatattgatgaatctttaaaggatttagagacaattgtaggtttacagacagacaagccgttaaagcgtgcattcatgccttacggtggaatcaagatggctgttcaggcatgtgagacatacggatatcaggtaagtgaccaattaaaggagatctttaccaagtatcacaagacacacaacacagccgtattcgatgcttacacaccggagatgatgaaagtacgtcacaataagatcttaacaggtctgccggatacatacggacgcggacgtattgttggtgattaccgccgtgttgctttatacggtatcgaccacctcatcgaggagaagaagaaagataaggcaaactgtggctgtggtgagatgacagacaatgtgatccgtttaagagaagagatcgctgagcagatcaagtgtttagaggatatgaagaagcttgcagagatctacggatacgatatttccagacctgcaacaaacgcaaaggaagccgtacagtggttatactttggataccttgcagcaatcaagacacagaacggtgcagcaatgtccgttggtcgtgtttccaccttccttgatatctacttcgagagagacttaaagaaaggcatcatcacagagcaggaagtacaggaattggttgaccactttaccatgaagcttcgtatggtaaaattcgcgcgtattccttcttacaatcagctgttctcaggtgaccctgtctgggcaacacttgacgttgcgggtacaggcgtagacggacgttccatggttacaaagtccgacttccgtttcctgcacaccttagagaacatgggaccggctccggagccaaaccttaccgtattatattcttccagacttccacaggcattcaaggattatgcagcacgtatctctattgatacaagttccatccagtacgagaacgatgacgctatgaaaccggtatggggcgatgattatgccatctgctgctgtgtatctgctacacagacaggtaaggagatgcagttcttcggtgcccgtgcgaaccttgcaaagtgtctcctgtatgcaatcaacggtggtgtggatgagaagaccggtcagcaggtaggaccggattacaagccaattacatctgagtaccttgattatgatgaagtcatggagaagtacgataagatgatggactggttagtagatatttatgtaaataccttaaacctgatccagtatatgcatgacaaatattactatgaagcagcagaactttctctgatggatactgatctgaagagaacgttcgcaaccggtattgcaggattttcacacgtaatcgattctctttctgcaatcaagtacgcaaaggttaaagttatccgtgacgagaacggaattgcaaaagacttcgagatcgagggagacttcccaagatacggtaacgatgatgaccgtgccgatgatatcggagtatggctgttacagacattcatggataagttaaagaagcatcacacttaccgtgattctgagcctacaacttctatccttaccattacttccaacgttgtatatggtaaagcgacaggagcaatgccagacggacgtaaggctggcgagccactttcaccgggagctaacccaagctacggcgcagagaagagcggacttcttgcttccctgaactctctgacaaagatcccgtatgagtgggcacttgacggaatttccaatacccagaccatcaaccctggtgcacttggaaatgaagaaggcgagcgtattgagaaccttgtaaacgttatggacggatattttgatcagggtgcgcatcacctcaatgttaacgtgtttggcaaggagaagcttatcgacgctatggagcatccggagaaagaagagtacgcaaacttcaccatccgtgtatccggttacgctgtgaagttcattgatctgaccaaagagcagcagatggatgttatcgcacgtacctgccacgatcatatgtaaaataaatcggagagcagcaaagctttggatatgtccaatttaaagaggtgacaggtttttacctgttgcctctttatatttttgcgtatttgctcatttatagttgatgtattaaaaacagcttaaactaatggcacaatatccaaaaccatgctatcataaaaagcatatagattttaagaaacacccagacatagatagaaatgcgtgtaacataaaatccagtcgaagaaatgaggtaaaaattatgttaggaaatatccattctatagaaacattcggttccgcagacggtccgggtgtacgctatctgatttttttaaagggctgcaatatgcgctgcaaatactgtcataatcccgatacatgggcaaaaaccgaaggggaaatgaaaagcgcagaagaaattttacagcaggcgctgcggtataaaagatactggggcaaaaagggcggtattaccgtaagcggcggagaagcactgttgcagattgattttgtcacagaattgtttacgcttgccaaagaaaaaggtgtcaatacctgtctggatacatcgggcaatccgtttacccgtgaggaaccattctattctaagtttgaaaaactgatggaagtgacggatctgtttatgctcgacataaaggaaatggatgaggacgagcataaaaaactgaccggccagacgaataagaatattctggatatggcaacctgtctgtcggatcacggtaaagcgatgtggatccgacacgtgcttgtgccgggaattaccgatgatgatgggcagttacacaggctccgtgcatttattgatacgttaaaaaccgtggaacgtgtggaaattttgccatatcacacgctgggggtatttaaatggaaagaacttgggattccttatgcactggaagatgtggagccgccgaccaaagagcaggtggaacatgcacgggaaatcattattcccggttataaatcctgattgtatgaacaggagggacatagaagcaaggaaaaaatgtatatgtcccaacagtatagatgggcgggacataaagataaagaaaacataaggaaaaacaaatcatgacacaaccggaaattttatacgaagatgcacagctgatcgtctgttataaaccggcaggcattgcaacgcagacaaaaaaactgggacaaaaagacatggtcagcatactttcgaatcacatagcacaggaaggaaccggacagccgtttatcggtgtagtccatcggctggaccagccggtggaaggcgtgatggtgtttgcaaaaacaaaacaggcggcagcaaaattgtcggcacagatgaaagaccattccttcgggaaaaaatattatgccagagtacagcttacggaaggaaaaacttttgcggaagctaccggtcatgccacagagggaacgctgcgggactggatgcagtttgaccggaaagagaataaatcctgtgtggtggagcagccacggaaggagcagaagaatgtaaacagtaaaaacggggtgcaggaagccttactggattaccgtgtcataaaggaagaagaaaaaacagcgttgctggatatcacgctgcataccggacgacatcatcagatccgtgtgcagctggcacatctcggaacgcccatctgcggggatcataagtatgggaatgctgcaggcggtatgccggaattgtgcagttatcatatcgattttatacatccggtcagcggaaaaacgatgacgtatgatataaaaccgaaaaatttcggaatcgcattttagaataggtgggatgctctgctcaaccttgacaatcggctgtgttcgtcatattatatattcgggcttttctgcgcgttttgtgggcagaaaaggaaaactcttacacgagtataacgtaaaaaatgaccgcacagtggtcgcagaaaaggagaaagacatggcgaaagagaagaaacttgttgaagccattacttccatggaggaagattttgcacaatggtataccgacgtcgtaaagaaagcagagctgattgattactccgcagtaaagggctgcatgatcatcaagcccgatgggtatgctatctgggaaaatatacagcatgaattagaccgcagattcaaagaaacaggcgtagagaatgtatatatgccgatgtttattccggagagccttctggaaaaagagaaggatcatgtggaaggatttgcaccggaagtcgcatgggtgacttacggcggactcaatcagctaccggagcgtctgtgcgtcagacctacttctgagacactgttctgcgatttttataaaaatctgatccagtcttaccgtgatctgccaaaggtgtacaaccagtggtgttccgtagtacgctgggaaaaggaaacccgtccgtttctgcgttccagagaattcctgtggcaggaggggcatacggcgcatgcaaccgcagaggaggcacaggcacgtaccatccagatgctgaatctgtatgcagatttctgtgaagagttccttgccatgccggttgtccgcggacagaagacagaaaaagaaaaatttgccggtgcggaagacacctataccatcgaggcactgatgcatgatggaaaagccctgcagtccggaaccagtcacaatttcggagatggatttgcaaaggcatttggtatccagtataccgataaacagaataaattacagtatgtacaccagacttcgtggggaatgacaacacgtctgatcggagccatcatcatggttcacggcgacaatgatggtctggttctgccacctaaggtagcaccgacacaggtaatggttatcccgatccagatgcagaaggatggcgtattggataaggcaaacgaagtgcgtgagcgtctgggaaaagtctgccgtgcaaaactggacgattccgataagagtccgggatggaaattctctgagcaggagatgcgtggaattccgcttcgtgtggaactgggaccgaaagatattgcggcaaataaatgtgtggttgtccgcagagataccagagagaaaattgaggtttccctggatgagatcgagacaaagattccggaactgttagagaccgttcagaaagatatgtttgcgcgtgcaaaggcacatcgtgatgcacatatctgggatgcacataattacgaagaatttaaggatattgcagaaaataaaccgggattcatccgtggtatgtggtgcggagatcaggcatgtgaggacaagatcaaagaagatctggcagtaacctcacgctgtatgccgtttaatgatcaggaacagatttcagatgtttgtgtatgctgtggaaaaccggcacataagctggtatattggggcaaggcatattaaaaatcagccgggattatggatttcaaatagggggttggagccatgattgaaaagtattttaatggtgttatagaacaggtatatcacagaatcggaaccgcagaaaagaacattgttatggcaagctataacaatgacttttctgtgtccgggctggagaataaaaaacgttatcaggaagacgataacgttttttttgcctgttgtgaactgcaatatgagacgttgtccggggcatatacaccttttctggacattatctgtgacatgttccgcaaatttgtaaagggagattttgaagcttttttgcgcgaatgcggaacttatgaactgcaccggtctttgtttctggggtactatgaagatggtatctgcaaaagggaagaaggggtgctgttaaatgaagtggaatatgagcagcggcgcatgacagaagccatcgttgccatgctgaaaaaactcacggaataccggccgattatgattgtaattaaccgtttccagctggcaggacgcagttccatggaacttatttaccggctgctgacagaaccgtgtacggaaatcgggattgtgcttggagtaaacgaaatgcagccgcggctggatatggccgtcaacatgtgggatgcaatcgtggaaaaacttgaagacagcagccagatttatcatattggaagttccgggaaacacagaaaccgggagaatgcggaggatgtggcagaagagaaaaattacagccacatgcttgcaaaggtagagacaatcattacgtttctggattgtgaccaggcaaaatggtacttgcagaaacttgaatataaacttaaatttgaagatatttttgtggatgatataaccctgcgggaattttatctattgtatacccgtaccgctattttgcgtgcagagctttctaaggcactggagatggttgattcagcaatgcgtctgccatccgttcggaaagatctgttttaccgcagtgaatgttcctttttaaagggaacgtgcctgatgtatcagggcaaactgcaacaggcggaaatgtatgcacagtatgcccgggaggaagcacaaaaaagtgggaatgagaaacagatattcaaggcggaactcttgtctgttatggcgcgtatgtccggctggtacaatatttttttctgtatacaggatatcccgattcatgaagggctgattgaaaagctgatgcagaacaattaccggaatcatctggcacatatttatatttatgcatatgataatcggccggagatggttgcaagggcctaccgttccgaggcatctcttttatatttcagtaaaggggtggcactggcaaaagagattggaaatgagcagctggtatatgatgcatatcagaaaaacattatgcttgcatcaacgaatggtatgaatgagattgccatgctgtattccgtgcgtacataccagttcatgaaatcaagggatgatgtttatgagggcagaattctgtccggcatcggatataatctgagtgccatgggaaaaaaccggcttgcggagcattattataaccgtgccattgaggtgttttaccatttgcgtcttccagaggatattgcggaagtgttttacaaccgtgcactgaattatattatgcaggagaactatgcgaaggcggaacatgatctgctgatggcgatgaaggtaatagaaaaactgcatcttaacagtctgcgtgtatgtaatctgtcaaaattatatggtcttttagcacttgtgagcatcatgcagaaagaccggtttaactgtgaacgttacttgcttaactgccggcagttcctgaattatatcattgagaaagaaaaagaaaatgaaaacgaggaaatcatccatgactatgccaagtgtgatgaggatatgtttctatacacattttccatggcaatgattaaccgcatggatggaaagaaggaagaggtactggtcagttttgaacaggcagagcgtttcctgcttcaggcagagggaaatgagtttttcagttatcgtttattccggaaagagagaatgaagctgtttgaggaaatggggcgcagtgagcgctgccagatggaacgcgcaacgcttttgcagcatgaggagattaattcccaggcggcacggctgcttcccatgaatctcctgaaggaaattgatctgggagagcatccgcaaacgtgtgccgtgcgggaggaagaaattgaagccctgatcaaacaggaaggccttttacaggattatgcaacgtcccggagacagatggagtttatttccacatggcagaaactgattgatgtgaacggaagcaacgtagagggtatggtacagaatgcgttcaatacgtttatgaatcatttcagcctggattgtgcattgtatatctgttaccatgaagatggtgcccatgtactttataacgataccaaatgtgagatgacggaagcggacatagcggcgatcggaaataccatgctggaatatccacaggggtttgcggtatcaaagatcagcgacagttttctggaacatcaggatacgatctgttatttcggaatagatgatgtatgttcgtttgtggcagcaccgtttttcaaaaacggaaagctgaccagccttctgatcacatatgtccgcatgaaggataactggcatggttcgatcgaacgttacatgctcaacgaggatgacctgagaatctattccctgctttttcgggagatggagtattcgatcaatcgcatggaggcaaacgacaagatttatatgatgaaccgcaagctgcaggaagctgcggttacggacatgcttaccggtatttataaccgtgccggcatgtatgaagagatccagcagatgatcaagtgttacagtatgtcagaggagacacatcatgtaggactgatgtttattgatctggacaatttcaagcattataatgatacgttcgggcatgatgtcggagatctgatcttaaaggaaatggcaaagattttccgcaaggcggtaaaaggaagaggatttgtcgccagatatggcggggatgaatttattatgatcttaaataccgatgaccgggaaattcttgaacagattgcaaaaggaatctatgagaaaatcaattccacgcagggattccagcggcagattgaaaattatctcggccatgcgatcacgacgaccgaaaaatcgcggattacctgttccatcggaattgcaagcgcaggggatgtgagaaaagaggaagatattaatgaattaatccgtagcgcagatgagattttatataaagtcaaaacaggggaaaaaggacactacgcatttttatgaaaattcaattaccagaacacgtaaagcaaattatacacagacttcagcaggaggggtatgatgcctatgccgtgggtggatgtgtcagagatacacttttaggacgcagcccacaggactgggacattacaacttccgcgaaaccgcaggtggtgaaatcgctgttttcccatacgattgatacgggcattgcacatggaaccgttacggttatgctggatcatacggggtatgaagtgacaacttaccggatcgatggggaatatgaagatgccagacatccgaagacagtgacgtttacgggaaatctggtagaggatttaaaacgccgggattttacgatcaatgccatggcatataatgataccgcaggactggtggatgcatttgacgggattggggatctcaaacggcacgtgatccgttgtgtggggataccgcatgaccggtttggagaggatgcgctgcgtatgctgcgcgccgtgcgttttgccgcacagcttggattttccattgaggagaaaaccagacaggctgtggcagatctggcagacaatttacagaaagtcagtgcggagagaatccagaccgaaatggtgaaattgctcacctctgcacatccggaggagatgcgtacggtatatgagctgggactttctagagtatttctcccggagtttgacaggatgatggaaaccccgcagattacgaaacatcattgttacagtgtgggggaacataccattcatgccatgcaggaagtccaacaggaccggattctgcgcctgaccatgctgcttcatgatgtggccaaaccggtgtgtgtaacgacagatgaaaaagggcagaatcattttaaaggacatccggcggaaggtgcggaaatggcacgggttattttgcggcggttgaagtttgacaacgaaacaataaaacgcgtatgcctgctcgtgcgctatcatgatgaccgtccggccgtgacaccgcgcaatgtgcgccgtgcgatcagcaggatcggagtggaaaatatggaggctctgtttgcggtaaagcgtgcagatacactggcgcagagcatgtatgagcggcagaaaaagctttcctatattgatgcctacgaagaaacttatcgtgagatattaaaagaacaccagtgtgtgcagaaaaaggatcttgccataaacggcagggatctgattgtacagggaatgaaaacgggcaaagaaatgggagaagtgttgcaggcgctgtatgaacaggttcttgatgaaccgcaactgaataataaagagacgctgcttgcacttgctttgcaattgcaacagacaaaacaggaataaataagacaccctttccatatgatgaaaatagattcaagtcatgtgggaggggtttcattttgtattatcagccggaagcaatgttggagcaatatgacatagaaataaaacagatcacgaaaggcagaggtgtgttttgctgtgagacggatcaggggaaaaaagtacttgcaccgtttcggggatctgcagaacgcgcaaaatttgtgcgcgaaatattatgcagcatgcaggaaaagggatatccggtggaacaggtcagtctgacaaaagacgggcagtgtgtggtaacggatgaaagtggcatgcgtttctggctgaaagatctggtagagggaaatgaatgccagacaggtagggagaaagatgtagctgccggtgcccaggcgctggcagggtttcattgctgtgtttcatcctgtgttacggaaattccggattttatgaaaaatacaaagaatgaaccggcagtgctctattaccggcattaccgggaactgatcctggtaaaaaattttgtgcagtcaagaaaaacccgaaacgagtttgagcggtcattctgggaacagtatacgcattatatcgcacaggcgaaagaagcggtcgggatgctgcaggagcgaaaagaccaggggggaaccagggggttttgtcacggggattgtaaccagcataatatgcttcgtacagcacagggggtccggctcgtaaattatgaaaatctgttttacggagaacagatggtggatctggcaaactatctgcgtaagattctggaaaaaaacagttggagtacggacatgggaaaacatattctggaagcctatgaaaagcagagaaaattgtgcaaggaagaaaaacagctgctgcatgtgctgcttctgtttccagagaaattctggaaagtatccaatcactacagtaactcgcataaagcatgggtatccggcagagatattgaaaaattaaaccggctgattgcagcggagccggcaagggaacattttctggaaaatttgttttcttttctgtgaagaatgagctatactaaggatatgagaagagacagaattaaaaaaacaattacatatttgagtctgcttttttggctgatgctgcttgtggcatgtggacagcaggaggagacgacagatgacggagttacctattttcatcattccatcgcagaccggaatacacaggaaacacaggagaattccacggaaacggaaaagtccgaagagtttctgctgaccgcagtagatcagattcaggaaagtctccagctgtaccggtatgcggatggaatggaataccggtattattacggaacaggcacccgtttttatgacaaatacggaaaccggacacctgtgacaagttttgaacccggtctgcttgtgaccatcggggatgtagacagcgaaggaatcctcacggaagcccggatttcggatcaggcatgggtatacgacaatatcacccggttttcggtaaatccggatctggacatgctaaagatcggagatggaaaatatcgctatacggatgacacgattgtgttttccggagataaaagaatccagatgacggatttgtcggatggggatacgttaagcgttgtcggcagggataaaaacattcttgcggtgcgtgtgacaaccgcacagggaacgcttgcactgtccaacaccaaactgtttgaagaaagttttttgcagctgggcacaaagatttttgcggaaattacaccggatatggagattcaggtgccggaaggaacctatgaacttcgcgtagccaatgacggatggggcggcagtacggaagtgacgattacgcgtggagagacgacaaatgtggatcttgacaccttaaaaggcgaaggaccgtcttacggaaaggtgcagtttgtcatcgatgcaaaagatgcggtgctgtcaattgacggaaaagaaacggactatgagaagccggtgaaattaacctatggaagccatacaattacggtatattcttcggattatgatacctggaagcggaacttatatgtcaactcggagaaatcgacaattgttatcaatcttgcggatgaagattccagtgagacagggagcagtcagagcagttcagaaagcagcagccagagcagctcacaggggagcagtcagagcagttcagaaagcagcagccagagcagttcacaggagagttccagcagtcagagcgagtacaagaaccggcaggaagagcttgagacactcaaggatctgatttccagtatgacatcctccagttcgcttgtgtcaaaatgacggttttccggacagaattttggttgtttttaagtgccccaaagcccgaaaatatcgcatttttccttgacaaaaggatggaaaacaagtataaatagatttgtaagtaatttgagagaaggaactcgaattatataatataggaatccataggaggaattttaacatgaacaaagcagagttagttgcagcagtagctgagaaggcagagatttcaaagaaagacgctgaagcagcagttaaggcattcacagatgttgttgctgaggagctgaagaagggtgagaagatccagttagttggatttggtactttcgaggtttctgagagagcagcaagagttggaagaaacccacagacaaagcaggaaatcacaatcccagcttctaaggcaccgaagtttaaagcaggtaaggctttaaaggattccctgaactaattctggtggaatatgtgggagagcgtcattggacgctctcttttctgttataaggagaaataatatgagattagataaatttttaaaagtatcacgcctgatcaagcgaagaacggtcgccaatgaagcctgtgatgcaggacgtgttatggtaaacggaaaacctgccaaggcatccaccaatgtaaaagtcggagacgaaatagaaattctgtttggacagaaatccgtaaaagtgcgtgttacggatattcaggatacgaccaaaaaagaacaggcgaaagatctgtttgaatacatatcctagaagtgtagcgcatactctttaacaggagggcgcttgtatggaagaaagaggactgtcaaacagcacaggacagcataagctgatcctgcagaaccggaaaagcggaagttttaccggtgtaacggatgttgtaaattttgatgcaaatgagattatccttgacacagaactcggacggttgacgattaagggaaaagaacttcacgtaaaccggctggacctgcagaaaaaagaagtggaaattgatggaaccgtggatatgcttcaatattccggaacacctggccggggtgtccttggaaagtggttcggttaagtggaagagggcaggatttttgtacatttttttctgtttgggatgatagcatttgcggcatatgacggaatccgtgtagttcgtagaatttttccgcatgggatctttatgatttccttagaggatctggtatactggatggtcatttcgctttgtttttttctgcatctctgtcaggtaaataatggaaaaatccggggctatgtactcctgggaagccttctgggagcgtggatttattacagtttctgcagtcggtttgttatgcggtatctgacgaaaaagattcattatctgaaaaagaggttgaaaaagttccgggaaatgactacaataaagttaaataagcttcgtaaaagaaagaagcctgaagaatcggagaaagaacatgagaaaaactaaaaagcgtcgccgtggaagcggtactgcaggaatcatgatcattgtgcttgcatttttggttgtcatgacggttcagatctgcaggatacgtgcaaaagatgcggaatatgcggcaaaagaaaaagaattacaacagcagtatgaggaagaaaccgagagatctacggagatagatgatcttgagacgtatatgaaatcctcacaatatattgaagatgtggcaaaaagcaagcttggactgacttataagaatgaaatcatcttcaaggaaaagaagtagaaaagaagaatctgtttgaacaggttcttctttttctttaatgcattgatggaagatttgagcgaaaacttttttgaaaaccacagaaaatctgacagaatatgcgtcattgtctgtgtatacttgtccctcgaaaacaattttttggaggtgtatcatgcgtacaggacaatggaaaacaatggggataggatcgctgatcggaaaaatgatctatgcagtattcgggctggcggcaagtatgttatgtatcatgggatattatccggtggtgccggcattttacacggcatgctgtctggataaaaagagaaattttctgctatacataggactggttgtgggaatgggctggtgcatgccggtggctgcgattgtaaaatatctgtttattctttttgtactgggaatcgcaatccggttttatatatgggcaaacaggcgctgcagcggatggacggcaggaatgattgcgggaattacaacgatcgcgatgaatacatcgggacttctgattctgaatatggagaaaaaggcattgatccttggcatcagcgaaggtgtgatcgtgtttgcactggcagtattgttccattatggaatcggaatgggcagtcagattttccgggagagacataagaaccgggtggaagaggaaggcgtggaaacgatggttggaatggaccctcaggggcggattcatgcatttgcagaggcagttgacgagctttccgtggcatttgccgcgatggacggcaggcaaaagccaaaacagcaggaccatctggatattcttgcccaggagattaccggaaagctgtgtgcggactgcgatggatgtgtcgtgtgtttagagcagcagaaaccggatttctggataaaaatccgccggatgctgcaggcagttgcacaacacagtaccaaagaagaaattttaagtcagaattttatggaagagtgtccgcgttattccgggatggtggaagaggcaatctgggctttttcccgtatggaactcaatgaggcatggtatcaccgcctgcaggagaaccgcaaggtaatcgcggatcagctggatgcgatggcggatgctttgcaggactgggatcagggaatccggtgtatggaccggacagagcgtgttctgctggcaaaaattgcgtttgagacaagggaacggggactggatgtaaaacagatacatgtttatgaggacaaagaaaagcggcgcatggtgaccgctttggtggcaagtaagtggggaggcggaattcctgttaaaaattatcgaaaagcgctcgagcgtgcttcaggcatggcggtccggctgaaagaggataccagatccatactgacgcaggaaccggttatgattacagcgtatgaagatacctgcttttatgcattatccggggttgcttcggaaaaagaagagggatcaagtgtcagtggagataacttttctctgttttcaatggaaaacgggcattatcatgtatgtgtctctgatggtatgggaagcggaccgtctgcattccgggaaagcgatatggtggtagagctgatgcagaaatttatggaagcaggatttcctcaggagacagctatccgcatgatgaattcggcaatggttctgcagggagattgtgagtcttactctacactggatttcatggatctggatctgtacagtgggcagatgacgattaccaaaatcggtgcagcagcatcttttctgaaacataaagaccgggtggagtgcctgcgggcgtccacacttccggcgggagtcgatgcgtcctgtaccggggatgtcatccacagaaagctcacacatggggattttcttgtcatggttacggatggtgtgttagaatatctacatgtgaaaaatccggaagaaaagctcgcggaaatgataaaagagataaaaacagagaacgcaggtacttttgctgaaaagctgatggaacatgtgatgctttttacaggaggacatgcaccggatgatatgacaatagtggtaagtggaatctgggagaaataatgatcgtacaggtagaaaaatttatgagaaagtggaatatggtgccggagggaggcagggtactcattggagtgtccggcggtgcggactctgtctgtctgtgcctgattctgtatgaactttccacgaaaatgaatttttcacttgaggttatccacgtggagcatggaattcgtggagaagagagtaaaaatgatgcggtgtttgtggaacagctctgtaaacaacgggggattgtctgtcatatccggaatgttgatgttccacgttatgccaaaatacatcatctgggagaagaagaggcggcacgaattctgcgatatcaggtgtttgcggatgcagccgggcaggacagaaacgtccggatcgcactggcgcatcatatggaagacaatgcggagaccatgctgtttcagctgatccggggaagcggactggatggactgtgcgggatgcgtccacagcggacaggaacaaacggggaaatctatatccgtccctttttgcagtgcagcagggaacagatcgaacaatttctggaggagcgggggcagggatattgtatggacagtaccaatgccaacgagtcctacagcagaaaccggatgcgaaagagggtgcttccggaactgataaggatgaatccgcaggcggtacagcatatgcagacggcgatggaacagctgcagcaggtaagagattatctggaagaagagacggtttccctggagaaaaaatttatttccggggagaggaaaaatgtgaaactggatacggacgggctggcagagctttcgcaggctgtccggatgcggctgatccgcaaagctgtctggaaagctgccggggcatgcaaagatattacggcggcacatttgcaggcagtggcggaccttctggaaaaacagaccggaagatatgtaaaactgccctatgggctgaccgccacaagagtttacaatgtgatcgaaatcatgggaaaaagaaaggaaacggaaaagatctgtctgccgatagatacggaccggctgccggaaaatctactggccggtgaatggaaattttcgtttaaaaagtttccgtatgatgggaataccgataaaattccacgaaaaatgtatacgaaatggtttgattatgataagataaaagatagtttagctatacgtaaccgccgaaaaggagactattttgtgctggatgcggcaggacatcacaagaagctggaggattatttcgtcaatgaaaagattccggcatcgcatagagatgagcagctgcttctggccggggaggatgaaatcttctggattgtcggagggcgtatggcatatggcacagggatttccgatgcaacccgatgggtgttggagatcactgccagtaatagcagccattgaaggaggataagaggatggattacagtaagaaacatgagatatcggtatatctgaccgaggaacagttaaatcagcggattgcagagatcggtgcacagatcacggaacgtttcaaaggcgagtcggtttatctggtctgtatcctgaaaggatctatctttttcacaacagaacttgcaaagcggattgcgctgccaatgacgatcgattttatatcagcatctagctatggagcacagacccattcttccggtgtcgtaaatatcaagaaggatcttgaacagtcgattgaaggagagaacgtgatcgttgtggaagatattgtggattccggaaatacattaagccggctgatgcagctgtttgagagtcgtaatccaaaaactcttacgatctgtacgctgctggataaaccggatcgccgggtggtagaaaacctgcaggtggattataccggatttgtgataccggataagttcgtagtcggatttggtcttgattacgatcagagataccgtaatcttccgtatattggattcgtggaagatgcggattaaaaaaaggagagtagtacattgaatacaaagaacagaccccgatttggaggatttggtgtctatgcgatgctgatcctgcttgtgattattttgtggtatacatttaccaacaacagtacaaccagtgatttcacacagaataatctctggaaagccatccgtgaggaaaaggttgtcagtatccgggtagagcagaaccgtgaagtaccgaccggttatctgaatatcaaactgaaagatggttctacggaacggatgtatacctcagatgtgaacgagatccagaaagaattaaaagaaaaggattttacccagtttgttgtggatgatgtgccgtcagagagctggattatgacacttctgccatatcttcttatttttggtgccatcttcattctgtttatgattatgagcaacaatgcggcagcaaacaacagcggcggcaaaatgatgaattttggaaaaagccgtgcaaagctttctaccgaggaagataaccatatgacatttgagaatgtcgccggtctgaaagaagaaaaagaagaacttgaggaactggtggactttctgcgtgcaccaaagaagtatacaaaccttggtgcacgtattccgaaaggtgtgctcttagtcggacctccgggaaccggtaagacacttctggcaaaagccgttgcaggcgaggccggagtaccgttctttagtatttccggttccgatttcgtagaaatgtttgtcggtgtcggagcttcgcgtgtccgtgatctgtttgaggatgccaagaaaaatgcaccgtgtatcgtatttatcgatgagattgatgctgtggccagacgccgtggtacaggtatgggaggcggtcatgatgagcgcgaacagaccttaaaccagatgcttgttgagatggatggatttggtgttaatcaggggattatcgtgatggcagcaaccaaccgtgtggatattcttgatccggcgatcatgcgtccgggacgttttgaccgaaagattgtagtcggaagaccggatgtggcaggccgtgaagaaattcttcaggttcatgcaaagaacaagccgctgggagatgacgttgatttaaaacagatcgcacagacgactgcgggatttacaggagcagatctggagaatctgctgaatgaggctgccattcttgcagcaaaagaaagccgggcatatattcagcaggcagatatccagaaagcattcatcaaagtgggaatcggtgcggagaaacacagccgcgtgatttccgaaaaagaaaagaaaattacagcatatcatgaatccggacatgcccttctgtttcatcttctgccggatgtgggaccggtgcatacggtatccattatcccaaccggtgccggggctgcgggttataccatgccgcttccggagaaggatgagatgtttaactccaggggacgtatgctgcaggagatcgtggtagatctcggaggacgtgttgcagaggaactggtatttgatgatattaccacaggtgcctcccaggatatcaagcaggccaccaagatggcgcgggatatggtgacacggtatggaatgtccgaaaatatcggcctgatctgctacaaagatgatgacgatgaagtatttatcggacgtgatctggcacatgcacacagctacagtgagggaattgcctctgccattgatgtggaagtaaagcgtatcattgatgagtcttatgagaaggcaaaaacaatcattgccgagcatcgggatgtgcttgaccgctgtgcagcacttcttctggagaaagaaaagattacacgcgaagagtttgaagcattatttgaagcataaaagatctggatggtcaaaatgacagaaaaaggctctgtcgggaaaaattttccggcagagcctttttactgtatacatagtgcacaaaaacgatgtcaaacttttgtgaagtttgtgcacacttctgtgtagatccatggtactataatcactgtaaaaaccccccaatacattatatatagtttttgctataccccatagtaaaaataccttctcctaaaaaggcagcgttcgtagctgtcttttttatttattttttcaactcttacaatgacaattttacttcccggttcgtgtgttcatagtggcgcagtgtcacaccggcggcacgcagcatttttttggatgcgatcacacccggggtagaagcgtatttgtcactgtcgtaaacaacttcacggataccacactggataatggctttggcacattcattgcatggaaagagcgtaacatatatggtggatccttccaggcttccgccccggtagttgagaatggcattcaattcactgtgggtagagtaaaagtatttgttgtcatcgccttcgcgtacccatgggaaatcatcatcggaacatccggttggaaatccattatatcccatggaaagaattttgtgtttgtcactgacaatacaggctccaacctgtgtgtttggatctttggaacgcataccggagagcatggcaacgcccatgaagtattcgtcccagctgatgtagtcctgtcgttttgtgctcatatgtgttagcctcctttgcagtttctgtaaaataacgagaggggcaataagtcaatcctgacttttgccccctggatattgtaatatctgattatttggttccaaagatacgatcaccggcatctcccagacccggaacaatatatttatgttcatttaaatgatcatcaagtgctccgatgtaaagatcaacatccgggtgagcatcggtaagtgcttttacaccttccggtgcagcaatgatgcacataaaacgaatgctttttacacccttgtctttcagcatttggattgctgcgatggctgatccgccggtagccaacatcggatctacgacaaatacttcgcggttggcacagtctgccggaagtttgcagtaatattccactggttttgctgtctcaggatcacggtagagaccgatatgtccgacttttgcagcaggaatcatttccagcataccgtctaccatgccaagtccggcacgcagaatcggtaccactgccagtttttttccttttaattcttttacggtcgtcttacagatcggagtttcgatctccacatcctgtaactccagatcacgggttgcctcgtaacactcaaacattgcaacttcgcctgcaagtgtacggaaatccttagagccggtctcggttcttctcattaatccgattttgtgctggatcagcgggtgatccataacgactacttttcccataaatttattctccttcttcttcgttaagttttttcacaagttttttgattgatttgcgcagggtttcataacagagtccataggctggcaaagcacctccgtatggatctaatatttccagttcgtccccgacatatttggtaagaacctgtatattttccggaacagcattttcaaactgctctaaaatgcgctcccggtgaatttcttccatggtaatgacaagggcatcttctgtcagatcttcttccgtcagctgctgggaaacataattttccatattgataccgttgctgattaagacagcttcggctttttgattcattggttcctgaaattgtacaacaagtccacgggataagatctccagcggatgacgcaaggtaaaatctcccatgataccggctgccattgcctcgcgacaggttcccgtctgggcaacgaaaatcagtttgttatactccatataattactcctaatcgcaatgtattacggtatgaccggccgctttgagcagacggttcataatggcctgtccgatgcgaggggtctgaaagctttctgaataaatggcatctacatgcaattcatcacactcacgcaaaattttgtacagatgctgtgcaatggcgtcttcgttggaacggctgcccatggaaagaatgacatcggcgtgataagaaggtccggattcttccgtggcaatgacagccactttctgtccgttctcctgcttttggtgcaccagtgcattgatcttggaaacaacagcatccgatggtccgtctacgattaccatatcggcttttggggcataatgtttgtatttcatacccggagctttcggtttgcgtgtgtcatctgcagcaataatgcccggatcaatgataacctcttcgccaagcacctcggaaagcatctgcggcgtaatgtagccgggacgcagtaccataggttttgattcggtcagatcaatgatggtagattcaatgccgataccgaccgggccgccatctaaaatcatggcaatccgaccggataaatcctctgcaacatgagaagcttctgtcggactcggacgaccggatgtgttggcacttggcgcagcgatcagacatccgcttttgcgtatcagatcaagtgcaaccgggtgattcggcatccgtacagcgacagtatccattcctccggttgttgccatcggaacggcatcgcttttccagacgatcatcgtcaggggacccggccagaaagcaccggccagtttgcgggcagcctccggaacttcacgtgcaacacgttccatatcggaaaagtccgcaatgtgcacgatcagggggttgtccgaaggacgtccttttgctgcatagattttgcgggcagcttccggatgcagggcatctccgccaagaccgtataccgtttctgtcggaaaagcgaccagttcaccctctgcgatcagacgtccggcctcttccataattgtttcgtcaatctgttcgggattgacacgttctatttttgtattcatcatattcacactttgctttccgctttatatcccgtctattatagtccataggctctgggattgtcaatcggattagctggctgctaaagaaaatgattggtgaaaatgataaaatattctaaaaactatggaattttatagacaaaacgacgaataatgaggtataatacatccatcgggacggaggaaggctatgaaaaaagacaacagatccgtgatacagacattaacactcatttttcagtttggaatcagtatgctggtgccgatttttttatgcagtatactgggagtgtggctgggaaatctgacagggattaactggttaatgattccgtttttctttatgggagctttggcagggtttacgaatatttacaagacagtaaggaaactatacaggcaggaggaaaagaaagaaaaccatgttaaaaaggattaacgaagcattaccggggctggtcgtctcaattttattatatggggtgatggtagaactgatcggggtatggtttgtaaaggacaggattgcatattccatcggggtatggtttggcatagcggttgccgtggggatggcaatcaatcttgcaactgtgatctttgattctgttacgatgggggacaccgcacatgcgacgcgaagaattgtcacaaaatcaattcttcgttatgtagtagtggtgattttgttcgtgttatttgggtattttcaatggggaaacctgattgcggcttttcttgggctgcttggtttaaaaattggagcatatcttcagcctttatgggagaaagtaaaaggaaggaggtgactatatgaatgaggggattttactggcgtcggatatcgactttatgattcatggaatttttaaagtaaaagtatttggtcaggaagtctggatcaccgacagccacgcatgtattttgattgttatggcagtaatggttatttttgctgtgattgccaatcgcaagttaaagcatgccaccgaaaaaccggatacttttcagaatataatcgagctgattgtagaaaaattagacggaatggtggattccaccatgggaaagtgggcacccagattcgtcaactatatcagcacgatttttatttttatactgatgagtaacatatctggattgtttggcctgcgcccgccgacggcagattacggaaccacgcttgcacttgcactgatcacatttttcatgatccgtttcaacaaggcaaaacaccagagtctgaaagaaatatggacaggtatgtgttcaccgcttccgccatggcttccactctgggcgccgatcaacattatcagtgagattgcaataccgatctcattgtcgctgcgtctgtttgcaaatgtgttgtcaggaaccgtaatcatggcactggtatacggtttgcttggggtaattgcaacggcatggccggcagcactgcatgtatattttgatctgttttccggagcaatccagacgtatgtattctgtatgctcacaatgacttatgtgtcacaggcatgtggagaagattgaaatgcatcctcaagatgcatttcctacgcaaatcgcttccgcgtaagcggaactctcatgcgatttgctccttgtatcaaaacaagtatttaatttaaggaggattttactatgaatatttcaggacaggatttaatcagagcatgttcggctatcggtgcaggacttgcagttattgcaggtatcggacctggtattggacagggtatcgcagccggacacggcgcagcagccgtgggacgtaatccgggagcaaggggacagattatgtccaccatgctgttaggtcaggcagttgcagagacgacaggtctgtatggtcttgttgtcgcactgcttttactttttgtacatccgcttggataaaggaggggcaaacgagtgttagctgcacaggaatttttatttgatttaaatccacagctgctctttgatgctgccctgctggcaattgcagtatttttcctttatatgctgatgtcatatctgctgtttaatcccgcgcggaaacttttaaaagaccgtcaggatcacatttcatcggaactggatgaggccagcgccgacaaagaaaaagcagcagcgctgaaagcggagtatgaggcaaagttaaaagaaattgacaaggaagcggaaacgattctggcagatgccagacaaaaggcgttaaagaaccagaaccgcattgtcaatgaggcaaaggaagaagctgcacgcattgtaaaacatgcacaggaggaggcacttctggaaaagaagcatgccatgaatgatatgaaacaggaaatgatcactgtggcatccctgatggcacagaaagttgtggcatcttccattaccgcagagattcagagcacacttgtggatgaaacattaaaagaaatgggtgaatcgacatggcaaaattagtatccaaaacatatggggatgctttgtttgcgctggcggttgaagaacatatggtggatcaattatatgaagaggcgcaggctgttgcacagattctgcgtgaaaatacagaactgacccgcctgatgaatcatcccaaaatcgaaaaagaagaaaaagtcagactgatcgaggatattttcaaaggacgtatcggtgatgaactggtgggactgcttcggatgcttgtacaaaaagggcattataaggagaccgatcaggtattcacttattttattgaccgtgtcaaagagtataaaaaaataggtactgcctatgtcacatcggcgatggaactgacaccgcaacagaaacaggcggtggaacaaaagctgctcgacacgacaaagtacgttcagtttgagatacattataccacggatcccgcactgatcggaggcatggtcatccggatccgggatcgtgttgtggacggcagtgtccggaccagactggaacatctgacaagagacttagaacgtatacaattgaaagtaggtgagtgcgctccatgaatttaaaaccagaagaaatcagttctgtcattaaggagcagatcaaaagatatgcttcccagctggaagtggcagatgtgggaaccgtcattcaagtggcggacggcattgcacgtatccatggactggaaaatgcgatgcagggagaattgttagaatttccgggagaggtatacggtatggtactgaacctggaggaagataatgtcggtgcggtacttctcggaagtcagcacaatatcaatgagggagatacggttaaaacaaccggacgtgtggtagaagtgccggtaggaaatgccctgctcggacgtgttgtgaatgcgcttggacagccgattgacggaaagggaccgatcacaacggataaataccgtccggtagaacgtgtggcatccggtgtcatttccagaaagggagtggatacaccactgcagaccggtatcaaagccattgattccatggtgccgatcggaagaggacagcgagaactgatcatcggagatcgtcagaccggaaagaccgcgattgcaattgacacggttattaatcagaaagggcagggggtaaagtgtatttatgtggcaatcggccagaaagcttctaccgttgccaatattgtccagacactcgaagagtatggagctttcagttatacaaccgttgttgcggctacggcaagtgaacttgcgcctttgcagtatcttgctccgtattccggctgtgcaatcggcgaagagtggatggagaatggcgaagatgtacttgttatctacgatgatttgagcaaacatgccatggcataccggaccctgtcgctgctgttaaagcgtgcaccgggccgtgaggcttatccgggtgatgtcttttacctgcattcacgtctgcttgagcgtgcggcacgtctgtcggacaaactgggaggaggttccctgacggcattaccgatcattgaaacgcaggcgggagatgtatctgcatatattccgacaaatgtaatctctatcacagatgggcagatttatctggagacggagatgtttaatgcaggtttccgcccggcaatcaatgcaggactttccgtttcccgtgtaggaggagccgcacagatcaaggcgatgaaaaagattgcggcgcctatccgtacagaactggcacagtaccgggaactggctgcatttgcacagttcggttccgaactggatgcagacacgagtgagaaactggcacagggagaacgattaaaagaaatcttaaaacagccgcagtatcagccgatgccggttgcaaaacagatcgttatcatctatgcggcagtgaaaaagtatcttatggacattccggtagaggaaattctgcattttcaggatgcgttactcgaacttattgataccagatatccggagattaccggaaagattacagaaacccaggttatcgatgaggagacagagcagaaactgatagcagccattcaggaaacgaaaaaggaatacctggcgtaaaggtatgataacagggggtgataacacatggcgtctatgagggatataaaaagacgaaaaggaagtatccagagcacacagcagattaccaaagccatgaaacttgtttctaccgtaaaactccagaaagccaaagggcgggcagaacagacagatccctattttcagtatatgtaccggacggtaagttccattttagcacacagcggcaatattgatcatccatacttaagaagcggggaatccaaaaagaaagcgatcgttgtactgacttcgaatcgtggacttgcaggaggatataatgcgaatgtggtgaaactgatcacagaaagtgatgatgttgccaaagaggatgtcgtgatctatgcagttggcagaaaaggaattgagatactggagcgaaaaggatatcacatcgaggtagatgcctcggaaattatggaaaatccgacatatccggatgcagcagcactctgtaagagagtgctcgacgatttcgcggaaggaaaaataggagagatctatctggcatatacgcattttaaaaataccgttagtcaggaagcgcagctgatccgtatgcttccggtggaagtaagtgaaccttcggaggaaaagtcttccagagaaattcttatgaattatgagccaaacgaacaggaggctctgaatcagattattccaaaatatgtgaccagtctgttttatggggcactggtagaagccgtggcaagtgaaaacggtgcccgcatgcaggccatggattccgcaacaagcaatgcggaagagatgatagaggatctttccctgaaatataaccgtgcaagacagggatctatcacacaggaattgacggaaattattgcgggagcaaatgcgatagagtgacgtaataaaggagaagaaacatggaaaataaaggagcaataggaaagatcacgcaggtgatcagtgccgtgctcgatatcaaatttccggaaggacatcttccggagatcaatgatgcaatccgtattcctttaaaaaagggcggagaactgatcgttgaagtagcacagcatctgggggatgataccgtgcgttgtattgcactcggaccgacggacggacttgtccgcggtatggatgctatagcgacgggaggaccgatttcggtaccggtaggagaaaaaacacttggccgtttgtttaatgtgctgggagagccaatcgatgaaattgcacctccgcagaccaaggagcactggccgattcatcggaaggcaccttcgtttgaggaacaggcaacttcccaggaaatgttagagacaggaattaaagttgtcgatctgctctgcccgtatcagaaaggtggaaaaatcggattgtttggaggagccggtgtaggaaaaaccgtgctgatccaggaactgatccacaacattgctacagagcatggtggatattcggtatttaccggagtcggagagcgtacccgtgagggaaacgatctgtattatgaaatgaaagagtcgggagttatcgataagacaaccatggtgttcggacagatgaacgaaccgccaggggcacgtatgcgtgtagcacttaccggacttacgatggcagaatatttccgtgataaaggcggaaaagatgttctgttatttattgataatattttccgttttacacaggcaggatcggaagtgtctgccctgctcggacgtatgccgtccgcagtaggttatcagccgaccttacagacagagatgggggcattgcaggaacgaattacttccaccaagaacggttctattacttcggtacaggcggtatatgtgccggccgatgacctgacagacccggcaccggccacaacgtttgcacatctggatgccacaacggtactggatcgttccatcgtggaacttggaatatatccggctgtggatccgctggcttctacttcgcgtatccttgacccgagaattgtcggggaagaacattttaaggttgcgcgtggagtacaggagattttgcagaaatataaagaattgcaggatattatcgcaattctcggtatggatgagttgtcggaggatgataagcttgttgtcagccgggcgcgtaaagtacaaagattcctgtcgcagccgttttccgtggcggtacagtttaccggactggaaggcaaatatgttccggtggaagagaccatccgcggattccgtgagattctggatggaaaactggatgacgtgccggaaagttatttcctgaatgccggaacaattgatgaggtaaaggcggcatatgcagggtaatgtgtgtgccggctggaggaaacagagatggaaaagacatttgatgtagaaatcatcacgccggaccgcgttttttataagggaactgcggatctgctggagtttaatacggaatccggcgagatcggtgtatatcgtgatcacattccacttacaacggtactggaaccggggcttgtcacgatccatcatggggatgaagaacaggtggcagcagtgcatgccggatttgccgagattctgggagataaggtaacacttctggcagaactggcagaatggccggaagagattgatctggagcgtgcggaagccgcaagagagcgagcagaggagcggattcacaacagaaatgacaatctggatctgaagcgcgcggaatttgcattgcataaggctctgatccgtattaatcttgcagagtatcgataagtgaaaatggaaataagagggagggtatttcatgggaatatcctccctcttttatggacttttacaccggagtttggtacaatcgtagtagtaagtttgtatacaaatgaggagatattgtgtaccgaaagaataaaaacaattgggtaaagcatctggattttatgattctagatctgatttgcctgcaggtggcattttttttagcctatacattacgacatagaactgtcaatctatataccaattacatatatgcaaatttgtctatcgttctgatcctgatagatgtttgtcttctaattttcttgaatacacttaaaaatgtattaaaacgtggatatctggtagagtttatcgcaaccattaagcatgtggcgattgtggaactggttgctgtcctgtatctgttttcggtaaaagatgcgggaaatttttcgcgaatcacgttctttctcatggcattattttatggattgcttacctatggaacaagacttctgtggaaaaaacatattcttcgcacgctgcatctgaagcagaacaagtccgtactggttatcacaaattttgaccggctgtctcaggtggaaaaggatatccgggcgaaacgttatgtgatgtttcagatatcgggagtggctgtgacaggaaacatgccagaggatcatccaacggaaattgcagggattcctctggttgcagcaggtgattatgtggtggaatatctctgcagggaatgggtggatgaagtatttgtaaatctgccattgcagagtgcccagctggatgatcttgtccggcagttaaacgagatgggaattacggtgcatattcagctggcagataaactgatgttcggaacgcagcggcagtttgtggagcgtcttgggggatacaccgtgttaaccacaagcatcaatacgatttccaccggagaactgtttgtaaaacgtctgtttgatattatcgggggactggtgggatgtgtactcaccggtattctgtttctgtttctggctcccgccattaagattcagtcacccggaccggtattcttttcccagatccgtgtgggaaaaaacggaaagaagtttaagctgtacaagttccggagtatgtatactgacgcggaagaacgcaaggcacagcttgccgcagaaaacagagtcacagacgggctgatgtttaagctggattttgacccacgcatcatcggctgcagacagctgccggatggaacggtgaagaaaggaatcgggaactttatccgtgactggtctttcgatgagtttccgcagttctggaatgtcttaaagggggacatgtctctggtagggacgagaccgcctacagaggatgagtgggtcagatacgaactgcaccacagaagccgtctggccatcaaaccgggaatcactggaatgtggcaggtgagcggccgcagcaatattaccgattttgaaaaagttgtggaactggaccggtattacattttaaactggagtctgggactggatgtgaaaatacttttccggacggtaccggaagtcgtgaaaaagaacgggtctatgtagaggaagtaccggttgcagcaataaatagtttgagaaggcgtatcgcataattcctttgggaggcgggcgccttttcgattatgtggatcagtgtcattgcatctttttgctgccattcccgctccgtttcagagatttctccaaacatcatataatctaaattcatatctaatgatttggcaatcgccagcatggtttccacagacataccacacatcccgcgttcaatatcggaacagtattttgttgcccggttgatccgcaccgccagttcatcctgcgagagtccaagttgtatccgcttatggcgaatccgttcgccaactgcaattctatcataaggttcccgtttcttattcatttcgtaatcctctgtattcccaaaaattaccaattttcctatataaagatagtatcagttattaaaatataataaacacttttcaaacgtaaaatataggcgcgtttaggacttgagtatttgtgcgtttacaaacggaaaaacgggaaaattcgccaattttcgcggacaaacctactgtgagaagaccaggatatggagtaaaatatttttgtcgcaaatataattatagaataattatgaacagcaaagagaaaaaatgccgattgattttcacacacatattcttccgggaatagatgacggaagccggaatgtagaaatgtcactaagaatgttagcagcgcagagggagcagcaggttaatgaaatcgtagcaactccccatttttatgcacagaaggattctgtggaggaatttttgctgcgcagacagcgaagctatgaaaaattaaaaactgcgatggaagaaaatggttttgaccagaagctgtatctggcagcggaagtttactattttcaaggaatcggaagtgctggaatgatcccgaagctttgtgtggaaggaacacagacacttcttctggaaatgccgtttgcccagtggaattctgccatttatgcagatgtggagaaactggtacgacaccagaaactgaaagttgtccttgcccatattgagcgttattacgaattccagaagaaaaaagaaatctgggatgccgtcatggaacttccgttatacaagcagatgaatgcaggcgtatttctgaactggaaaaagaggcataaagcgtttcagcttgcaaaagaagccacaaccattattcttggcagtgattgtcacaacatggatacccggcatccaaatcttgccgagggacgcattgtgcttgtaaagaaatttggagaagcgttcatccagagaacggattgtctgaccagggaggtactgcagtgaacgggaaaaagaagaccatgcgtgcagttatagaaattatcattgccgtacttgtaatcattgccgtatattttatcatccgtgggatggatcggcacgacgtgcgtatccggcaggcagccacagaaaatgaaatgcagcgtgtctggaaagaatttcaggaaaaacccgtctcgattaagctgcataaaaagaactggaaatttgcgcatccggttcagacctatctttttatcggaacagacaaaagcggaaatgaagacgccagcggggaagaatatcgtggatcgatggcagatgcactgatgcttgttgtggtggatgaagaagaaaaaacctatggaattttacagctgaacagggataccatcacagaagtgccgatgcttctgcaagacggaagcgctaatgccagtgcacagatgcagctttgcacggcacattggtatggaaaggacaaggctgcaagctgcggcaatacggtggagaccgtatcaaaaatgcttggcggtctgcctattgatggatactatgcattaaaaatggatgcgatgccacttctgaatcatgaggtggggggagtaaccgttacactggaagatgatatgaccaagctggatccggctatgaagaaaggtgcaacgcttaccttgacagaccggcaggcagaactgctcatgcagtcccggtatgccatggatgacgatcgcaatacgcagcgtatgcgccgtcagcagatttttttaaaagcgtttatgaaaaagataaagaaacagaatgcgggggatatcaatgcaaccgtgaaattatatgaccggctgcgcccgtatgcgacgacagatattaagatgaatgatctaactgccctgttaaaggatatgcagggatatacagacaaaggaattatcacaatcgacggtacatccaaaattggagaaaagctgcacgatggaaaaaaacactgggagttttatatggatgaagattcactggagacatccatgaaacaactgtatccactggtgcaagagaaaggaaagtaacgaatgaaccaggaaaaccaattgacagagcagaacagcgaagaaaccgaaattgatttgcttgaaattttttatctgctgcgggcaaagctggtatggctgattctcgcatttgtgatcgggggagtgattgcaggctccatcacacattttctgatcacaccaaaatatacggcaactgcaaaaatgtatatgatttccgcatccagtggaagtgtgcttgatctgtcggatttcaatatcggaacatccctttcccaggactataccgaattgatcaaaatccgtcccgtattcaatgaagtgattgataacctgaatctggatatggaatatgaagatcttttgaagaaagtaagcatctcggttgttggagattcacggttacttgctgtgtcggtggaggacaatgatccaaaacttgcacagtcgatggtcaatgaacttgtagatacagcggtaacctatattccgaaagttatgaatgcatctgagaatgcacagccgaccattgcggaatatgcagtggttccagatgaaccgagttcgccgaaccttgccaaaaatattattctcggagcggttgttgcaatgcttcttgtagccgtgatcttcgtggtacgtatgcttatggacgacagcttaaatacggcagaggatgtcgaaaaagaatttggtattatgccgtttaccgttattccggagggggatatcgaagaaatttctgatgaggtagaaaaagcgatcagtaaagagaaaaagaaaagaaggaagaaaaagtaatggaatttacaccgaaaaaccgtgcgactgtccagaatatgccgaaacttccgtatgcggtagaggaagcactaaaccgtctgcgcgtcaatgtgagctttcttggaagcaaagtgaaaaaaatcatggtgatatccagcgctccggatgagggaaaaagttttattgccatgcagctgtggcggcagatggcagaagccggcagcaagagcattcttgtggacatggatctgcgcaagagtgttatggttgacaaatatcagattgcccgggaagacaatggaaaaattctgggaacttccgattatctggcaagtgacgatacgctggacaaatatgtgttgcgtaccaatatcggagcgggagatctccttccgaataaagaaaatattattaacccgtccatgcttctcgaaggacagaaactggcaagtacatttgaggaactggatgaaaattatcgttatacgtttattgatgctccaccattgaatctggtatcggatggagaaaagattggctcgctgtgtgatggcgcactgctggttgtccgcgcaggagaaacgccaaaggcaatggttcgtaattcgatccgccagttggagcgtgccgggtgtccggttgtcggcattgcactcagccgtgccaaaggcgctgcaaatggatattatcacaaatatggcaactactatggcaagagttattatggaaaaggctatggctactatggaaaacatggatattatggctatggcacagagcagaaataggtgattccccgaaagggttttcacataaataatcagggaaggaggattatatcccaatgaacaaattaatcaagaaggtgctggtaggtattaccgctgctactatgatgtttggatctgtttgtactgcttatgctgcaacagattctgcaaccgtagctccagctccggaaaaacagacaaacgtcaaggctgataatggcgcaaaggtaagtaccgcagcaaacggtacagcaaccgtaaaggctttaccaaagacaacaaagaagagtgttacagtagcttctaaggttgttgtagatggagtctcttacaaggttacagcaattggagcaaaggcttttgcaaatgctacaaaagctacaactgttacacttccagccagcatcaagaccattggcgctcaggcatttacaggtgcaaagtctgtaaagacaatcgtcatcaagtctgcttccgtaaaggttgacaagactgcatttaagggtgtagacaccaaaaagatgacaatcaaggtttccggtatgtctgcaaagcagctgaaagcattcaaggctcagctgaagaaagccggattcaaaggaaccgtaaagaaagtttctaaataatctcgggttcttgaaaagggcgcacagagttgattctgctgtgccctttcccatagaaaaaattgggaatgaacaaaagtaataagaatcataaaaatgaaagaaaggagacatcatgtatcagaaagcaaaaaacagctggatcaaacacattgattttgtgatactggatattctgtgtctgcaggtttcttttttcctggcatatctcgtcagacaccggaatctgaatttatattccaattccgtgtatggaaaccttgccatcgtgttgatcctgattgatgtatgcatgatgttctttttaaatacatgtaagaacgttctgaaacgtggactgctcatagaactggcggcaaccatgcgtcaggtcagcctggtgatactgtttgccgtgttttatctgttctttgtgaaagatgcgggtgatttttctcgtattacactgtttctgaccgctatcttttatgctataatcagttatgggacaagaattctctggaaacggcatgtattgcggaatctgcggcttggaagaaagaattctatcgtgatattgaccgactgggccaatcttccacaggtgcgggaagatatccaacatcacagctatgaactgtttcagattcgaggaatcgctgtgatcgatgtcaatgaaaagaaaacacttcccgaaaaactgggggacatcccatttgtggcagagggagaatctgttatggattacttgtgccatgcatgggtggatgaagtatttatcgatctgcagccaaatgatccgcgggtagacagatggatcgaccagctgacggaaatgggagtaacggtacatctgaaacttgccaaccggatggagctggcggcgaacaaacagtttgtggaaaaactgggacgatacacggtgctgactacaagcatccgcaccgtgagtacctgggaactgtttctcaaacggctgatggatattctcggaggcatcgtcggctgcatcctcactggaattctgtttctgatccttgcaccgatgatctatcatgaatcgcccggtccgatcttcttcggacagaccagagtcggaaagaatggcaagaaatttacgtgctataaattccgcagtatgtatctggatgcggaggagcgcaaagcagcacttgccgcagaaaaccgtgtatcggacggaatgatgtttaaactggattttgacccgcgcatcatcggcagcaggcgtctgccggacggaacgataaaaaaggggcttggaaataagatccgcgactggtccatcgatgagtttccacagttctggaacgtgctcaaaggggatatgtctctggtaggtacacgtccaccaacggaagatgagtgggtgaaatacgagttgcaccacagaagccgcctggcaatcaaacctgggatcaccgggatgtggcaggtaagtgggcgcagtgagattacggattttgaacaggtggtagcacttgatcgcagttatattgcgaactggagcctgggacttgatgtgaaaatattgtgcaaaacagtgggagtcgtgctgagacatgaaggtgcgatgtgagcggtaaaatatggaaaaaaatgatgaaaaattgtttgatgtgtaccatggaaaaaacaataattggcagtcatgcattagctatctacggatatttgcaacaatttgtgtaatttatcttcatacatgtagtacgttaagtgaaaatcaagaactatttgatttgagcaaaatgcaaaagattttctttaatgcatcatatcaaatgatgtattgggcagtaccggtattttttatgataacgggaatgctgtttttgagaaaagaaatgcatgttaaatccagtgagtggctctttaagtattcaaggagaattttgcttgctcttgttgtatttggtattccgtatgctgcattaaaattagtaatggcagatggactatcaattagcttattggataaggctattttagctttcttatcagatacaggttttggacatctttggtatttatatgctttaatcggaatttatttaataatgcccgtgttaaagaaatttgttgataatgcttcagagggagaaatacaattagtactttgtgcactatttgttcttgatttttgttttccgttattttctcgattaagtaatttgaaaattgcttttaacagccagtttttatatccggttttttatgtcttgttgggacattggttattcaaaaataaagagaaagttaatagaaaactaatcggaataattgcaataatttgtgtggcattgatttggattttaaatagcatgagttggaatccaaaagtttggacttcatatgacagtccagtaattggtgtgttagcagctgtagtatttttgatgtttgtatctaaggaatggagagagaaatcctggctttggagagtagatagattatgttttggggcttatttaatacatcctttatttattcagtttgtgtatcgattcctaaagattacaccaattcgttttaaaatttatccagtgatgacactgttattttgtttgatttttgtatgtttatcatttttagcatcctggatcatgcgaaaaataaaaattttaaaaaaatatgtattgtaaaaaggaattatattaatgagtgaatattcagttaaaattattgtagcaactcataaaaaatataaaatgccgtcagacgcgatgtacattcctttgtatgttggtgcggaggggaaaaaagattccgatggaaatgagttggatttgggatatatcaaggataacactggagaaaatatttcaatattgaatccatcattttgcgaattaacaggtttatattgggcatggaaaaatttagattctgattatatcggtttggtacattacagacgctattttggaacaaaaaaaaggaatccgtttgacgggattttaacttataggcaattaaaaccaatgctggaatgttaccagatatttgttccaaagaaaagaaaatattatattgaaactttgtattcgcattatgcacatacacattatgctgaacaattggatttgacaaaagaaattttaaaggaaaagtatccagaatatgtgaatacatttgatgccgttgtaaatcgcacctatggttatatgtttaatatgtgtattatgagcagacaacttatgaatgaatattgcacatggttgtttgatattttgtttacattgaaacagaaaataggagaagataatctttcttcttttcaaagcagattttatggaagagtgagcgagattatttttaatgtttggttggaacagcaggtaagggacaaaaaggtagagaaagatcagataaaagaactttcttatctatatacggaaaaaattaattggaaaaggaaaattgtttcttttatagaggcaaaatttattggaaaaaaatatgaagaaagtttttaaaaaaacatctgtgaaaaatttgtcaccatattatcagtttggaatcgattattttgggccatttctctatggatttaccaaatggttgtatacaagtctgaaaaaggcacagatacatcgcgtttattttttttccagagatggatatatgatggatctggcatttcagcaattaggatacgatgcggagtttgacacacaatatgtccatttttcacgcaaaagtctgagacaagcgttgctgtgtacaacaagtgggtatcaggattcgttgcagtatttgggatgggagaaatatgttacactttctaaattattggaatattatggatacgacgcaacagagagaaaacatctggcggaattgcataagtgggaactgtcaaaagattatgcatatgatggattgaaaaataataaagaagttgaacaaatttatatatgtctgaaagaacaaatttacgaaaaatcacagcaacaaaggcaattgctgctagcttatattgaacaaattggaatgaaaggatcttgtgcaattgttgatattggctggcatgggtcaatgcagtattgtttagaacagattgcaaaatataatggattggatttaaaaatttatggatattatattggaatctctcctcaatttccaatttgtggattttgtagtggatatttatataatccacaaaatctaaaacaaagaaagagtgttttatgttccttagggatcatggaaagaatgttacagagtaccgaaggctcaacggacagttataggcaagtaggagataagatttggccggtttacgcccactatgaatatgaagaagaacagaaactggtgtgttgtattaaggaatggcagcagggggctcttgattatattgaacaaaagaaaaattatttaaaagaggatgaggattatgtaaagtttgcacaaccgttgattgccattgggaaaaatcctacattaaaaatggttaaattgttttcttttttttacaatacagatggggaaaaagaatattatgtgagtcagaaaaagttagtacaatacaaaccgagggagttaatgcatgcgttaagcaatagtgtatggaaaactggatttctcaaatctgtgttcaagataccgtttccttatttttatatttacaggatatttagaaaatgaatcaagtaattgccgcttatattttaacacattttgatacgataagttttgatatatttgataccctgattgaacgcagcgtatcaaaaccaactgatatatttgaaattgttggggagaaagttttgggaaaagaacatcgccgggaatttctcgaaaacaggatacgtgcagaaaaaaaggcccgagagaaatcttgtgagattacattagatcaaatttatcaggagttggttgatacatataagtctgatatagtagaattgttacaaaagacagaagtgcaaatagaattggaaaactgccataagaaagaaacaatatttcctttttatgagcagtgcatacaaaaaggaaagagagttctgcttatttcagatatgtatcttccggaaaccgtgattgtatcaatgttacaaaggtgcgggatcaatgactatgagaaactatatgtatcaaacacatatggagaaaataagttatcagggaaattatttcaaattgcgtgtaaggactggcaaatagatttaaaatccatgattcacatcggagatagtatcaaagcagatatgataggtgcgcataaagcggggattcatgtgtggcttgtgggaaggaaaaacagaatagaaaggctgatacaaagaatatgagcgataaggtattggaagtaaatgtcgatgatttgtatttgggaggagtgttttctttagtaaaaaatgttgtaaaaaataagccgaaggatatgcagattgatatagctgcaatcgaaaagtttacggataaagaaaatatacaaagttttgaaaaatgtggttcaaaggtatactatgtgggatatgatggaaataagtggcttaagcaattcatttgtttttttcatttgaaaaaactgattcgtgaacaaaattatacctgtgtacatattcatgcagatgtggcgaataagctgatggtatctggaatggctgcaagaactgcgggagtcactaaaattatattacattcgcatgcagcaggtgttgatggaaatcatcgatggttaaaggcgtggattcacagacgatgtcgcagattgcttaaatggatcgggacagattatgtggcatgttctgatattgctgcagaatggatgtttccaaatattgccgcaaaagagattactttgatacaaaatggaattgatttacagaaatttcgcttttcacagactgtacgtgaaatggtgcgtaaacaattacaaattagtgacgaattattgatcggtcacgttggaaggttttgttatcagaaaaatcatgacttctttctggaaattttgaaacaaattcgggagcgcggtttacatgcaaaattgttgttggtcggagaaggaccaaatgaaaaagcttttcgggagaaagtacatgcctgtggtttggactcttacgtcatttattatggtgttagtaagaaggttcatgaattgtttatggcgatggatttatttgcattaccgtcccattttgagggacttccaattgttggagtggaagcacaggcatctggattgcctgttatcttttcggatacgattacgagggaagcaaaaattacacaggcggtaagttatcttggaattgatgcccgtgatgtgtcaaaatggttggataccattattcattatgggaaagaaaaaagagatcgaataaaggcttatgatattctgaaaaatgcaaaatttgatattgtagatacggtaaatggttttatgaaactatatagaggataataggagtctaatgatttatattgcaacacataaaaagtttaatgtgccaaatctgaatgggtactgtgcattacaggttggtgcagagggaaaagaaaaatatgggtatctgagggataatataggtaatcatatttcagggaaaaatgcaaattattgtgagctgacaggcctttattggatttggaaaaatacagatgattcatataagggattggtgcattatagaagatattttggaagaaacaatcttagtaataaaatttccgatatctgttcatatgaatatttattgaattgcttgaaaagtgtagatatagttcttccttatgtagagtattttaagcaaaatgcaaaagaagaaattttgcttcattgttgtacggaagaaatttttgataaattacgtcagataattgaaacaaaatatccagattatatagaaacatatgatcgttattttaatgaaaataaggcatcgttgttcaatatgcttttttgcaaaagagaaatttttgatgcatattgtgaatggctgttttcgatcctatttgtgctggaaaaacaagtagacctagcaaagttaaatacttatcagcaaagattgtatggctttttgtcggagcggttgttgaatgtctgggtaattaaaaataaattggtggtaaaacatttaccggtgattcatatggaattacctgtttttgatcgtattcggcttgtgagaagaagatttactaacaggtttcgtttttggataaaacgtgggagtcaaagatgatatatgcaattatgattattttttcggtcataagtggttgtttggtaccttatgcagaaaagaaaaagaaaaaatccaagagcactatttacatgaaaaacatcaaaagaaatgggatgataagtatcagcctgttgtttccattgctggtttcttcgttacgctacggattaggaaccgattattcctatacttatattccgcagtttaatagtattgccaggggagataggggatattatgaaataggtttttatttattaaataaaatagtttcattttttaccaacgatggacagtggataatcgtaatttgttctattttgtttgttggaattgtgtatcgacagatttatagggaatcaaaagtatatgcgttatctattttattgctgtatctgacttttgcatattttgtatcattaaataatgtaagacagtcacttgcatctgcatttttattacttgcaatggaatgtctgtgtgagggcagaaaactagcgtttatagtctgggtattactttcagcatcgatgcatcaggtatcgttgatttttttattattattttttgcagatagaattatgttatctgcagttacatatttaattgtttcaatagtggcatttggagtgatgcagattatcggaggaagaattgtgcaactctttgccagatatattccaagattacagctatattttcaggcacaggagttgtcggcatatacaggtaatacgataggaagatattatattctaatgcaatttctgatcttgattttatttgtgtatattgaaaagaaaaataataaagtatttcagagtataacaggtaaggatcaaattgagtggaatattacgcttatgagtcaatgtgcacttttatgtgtgtgtgcattagatggaattgttccggcagcttaccgagttgtaagaattttttcatttgcgcagtttatattgattccaaatgcgatacgcaaatatgtaaacaacaaaaaagaaagaatgttgttgtatatggcaagtataatactatttggtgtgttgtttatattttatgttttgaatggggctgaacaggtattcccatatcggtcaatttttagaaaatattagatttgattttgcaaaagaaaaatagaaattaagtttgtaaaaagggaaaaaatatgaagaatagagttgttgcaattgttgttacctataatcgttgtgagctgcttttagaagctatagaagcgctaagaaagagttgtgaaaaatgtgatatttttataattgataatgcaagtactgatggaacaaaagataaattgaccctatacatagaccaaaagacgatattttattttaatacaggcaggaatttaggtggagcagggggctttaattttggagtaagaaaagcttatgaggcaggatatgattatatctggttaatggatgatgacacaatagtcgaaaaagatactttgactgagctgttagatcaggcgaaaactttgaaaggaaagtttgggtggttatcaagcctcgcactgtggattgacggaaatgagtgtcttatgaattatcaagaaattgataaagattggaatagtgagaagaaaaatattttaaatggaagattgcgttgtcaggctgctacatttgtatcgctttttataaacagagttgcagtggaagaagttggattaccgattaaagattattttatatggggggatgatacggaatatacaaaaagaatttcaaaaaagtattcttgctattttgttccttcaagtcaggtgacgcacaaaatgaagtcaaatgtggctactacaagtttggaagagtctatagacaaagaaagaatagatagaatgttttattcaattagaaatgatttgtgcacttaccgtagaatcagtaagagatattattatgttttgatattgaaatctttattgttgattggaaaagtacttagatcttcaaagccatataaaattcgtaaggtgaaggtgattataaaaggattgtggaaaggaatttggtttagcccacaaattgaatttgcggagtaaagtgataaattgagaaaaatgaagggttcaaatagtagtttgaaatgtaattttgcatatagtatgatgtttcaaattttcacaatgataacaccatttgtaacagctccatatgtgtcaagagttttaggcccagatggaattggaatacaaagttataccggatcaatacaatcctattttcttttgtttgcagcgttgggaactgcaagttatggaaatcgagaaatatcgcaagccagagataataaagaagcatatagcaagaagttttatgaaattgagttgataaccgtattaacctgtattgtatgtttactagcatggattgggttgatttttttcgataagaaaaatcaaatatattacattgcaatgattccatatatttttggggcaatgtttgatatcagttggttttataatggattagagaattttaaaacgacagttacatgcaatatgttgtttaaaacaattggaattgttgctatttttatgtttgtaaaagatgaaaatgatttggttttgtatatcttaattatggctataacaacaatgttggcaaatttatcgatgtggatttatttgccacgctatgtatgtaaaattacttttaaagcgttaatgcttaaggatcattttaaacagacgttaatgtactttattccaacaattgctacttcaatttacacagtcttagataaaacattaatcggggtaattacacaaaatgatgcacagaatggttattatgaacaagctacaaagattattaatatggcaaagagtgtttcgtttaatgcggttaatgcagttgtaggagtaagaatatcctatttatttgtagacaataaaatggaagaaataagagatcgtataagtaaatcgatggattttattttgtttatgacaattggatgtgggtttgggatagctggagttgcaaagattttggttccactcttttttggaaaaggatatgatcaagtaattactctcttatatattttcgcaccaattataacaattatcggaattagcaattgcctagggtcacaatattatactcccagtggcaggcggaatgatagtacgaaatatttgttgtgtggatctgctgttaatttaattttaaatttgtgcttgatcggaaaatatggagctaatggagctgcatttgcgtctgtactagcagaattttgcattacttttttgtatgtaaaaaaaagtaatggatttatgaaatttgagaaattatttagcttaatgtataaaaaagtggtagcaggactattgatgtgttttgctgtaattagtttgggtaaatttttacacatgaacaaattattggttttgagttgccagatagtaatgggtattatgatatatcttgttgttttgataatagaaaaagacaagtgggtaaatgttatgatagatgaagttattcgaaaattaagaaagaggtaaataattaaatggtttctcttaatattaaacttcctgaaaatttcttagatgaagaaatcagggatgattatgtggtatcttctcagatgaaacaagtatgggcggtagagttagatttattaaataaaatattggaggtttgtaaaaaatataatattaaaattatagcatcaggagggacgttgttgggagccgtacggcataaaggatttattccgtgggatgatgatattgatttgatgatgatgagggatcaatatgataaattgtgtgatgttgcagaaaaagaatttacatacccatattttttccaaacggaatataccgatccaggatcaatgagaggacatgctcagttaagaaattcacaaacaaccggaatattaaatgtggaaagaggaaaatgtaaatttaatcaaggaatttttatcgacatatttcctcttgatcgtgttgtagatgataattttctttttcagaagcagaaaaagaaagcactttattataattcatgtgcaagaaaaatagcgaatattacggtgaactatgatctttctgaaaatacaggagtaaaaaaaattatcaaaaaaatgatgcataagatatttggaaagatattagagaaaagtcatttggagagatatttttataaaaaatttgaggatacatggaaaaaatataatgatcgagatacggtaatgtgctcaacacttacttttgcagaggcttgtgaagctcattttaaaaaggttgaatattttaaagaaatagtagaattaccatttgagtttatgtccattccggtatgttatcgatatgaggaattattaacacagcgttatggaaattggagaaagatcgaaaaaggaacgagttgtcacggagcggtgttttttgatacgagtgtaagttatgaaaagtatgtaaaggggaataaaaaattatgaatgtagcgttaattattgcaggcggatcagggacgcgtatgcatcaggatatacctaaacaatttttaacagtaaatgaaaaaccagtgattgtgtataccctggaggcttttcaaaatcatgccgaaattgatcaaattgcagttgtttgtattaaaggatgggaacaagtattaaaagcatatgcaaatcagtttaatataacaaaattaaaatacataatttctggtggtgaaaatggtcaagcgtcaattagaaatggtgtttttgaattagaaaaacattgtaacaaagaagatattgtattaattcatgatgcaatcagacctatggtatcacctgaaatcatttcagattgtatcgtgaaaacgaagcagtatggatgtgcaattgcgacgataccatgtgcggaagcaatgatgcagacgcaagatggtattgtatccacaggtagttatccgagagacaatttaaagcgcacacaaactccgcaaggatttcctattggaaaaatttgcgatttacatcgacgggcattaaaagctggagttacaaattcggttgcatcttgtacgttgatgattgaaatgggggagcaggttcatttttcggcaggatctgagaaaaatataaaattgaccacagtagaagatattgatatttttaaagcgttgcttttagcaaaaagaagagattggcttaaataggaagagaatatatgggattatatgaaagtgaaacgtatttattggatttggattatatgatggataaaatgatatggctaaagcattttgaggggaagtccatttttataacaggttcaacaggattaataggatctgcagttgcagatattttacttcggtacagtgaattacataatggtaatattaaaatctatttggctggacgtagtagaaaaagggtgacaaatagattcagcaaatacattttacaaaaatattgtatatatagagagtatgatgcaactcaccaaaataagttgccggattctttggattatatgattcatgctgccagcaatgcatatccatatttaattcagaaaaatccaatcgaaacaatgcaggataatttttgtgggttgatggagttattgcaatattgtgtagaccatacggttcaaaatgttgtgtatgtttcttcaagtgaaatatatggcaggaaagacaataataatccatatcaggaaaatgaatatggatatattgatgtacttaattctcgttctagttatccaatttcaaaaagagccgcggaaactttatgtgccagttatattgcagaaaaggatattgccgtatctattgttcgaccgggacacatctatggaccgactgctacaagaaaggataaccgggtatccactgcttttgcatataatgcatctgacggaaaagatattattatgaagagtgatggtgcacagatcagatcgtattgctacatgctggactgtgcaagtgcaatactttatgtgctattaaaaggaaaaaaaggggaagcatataatatttctaatccaaattcgattatgtctattcgagaacttgcagaatatttggcgaaagttggaaatgtcagattaaaattcgaattgccatcacaggatgaaaaaaaagcgtttaacccgatgaataattcttcattgaatagtgagaagttatgtggcttgggatggagtggactgtttgatgcaaaacttggattggaacatacagtaaaaattatcaaagaggcaaaaatataatgaaaaaattatatcagagatggtgtataaaaaatgcaatcaaatattgttgtgctattatgattcttgtaatagtgtcattgaatactacaaacgttgatgcaaagacctataatgttaattatactaaaacgatatcatcgtacgaaggaaagtctattcagttaaaatggaaaggaaaatcatcaaaagtaaagtggtatagttctgatggatttgttgctgtggttaatcaaagtggcaaggtaaaattaaaaaatgcaggaaaagtatggattaaagcggtttataaaggaaaaagtgttaagagaaaaattatagtaaagaaaccatacatttcatctgaaaaagaaactttggatgtaggggaaaccgttatctgtaagctgaatggtggaaaagctgttagatgggagagtagtaacctagaaagtgctacagtagatggtaatggagtggtaacggcacataaaacgggaacttctattatttcggcaaatgtagaaaatggaagaaaatatgactttgagataaaagtatataattcacagacactgcagggattattaaataataaacgtttagttagtcatagaggatataatgcaattgcaccagaaaatacgatgagtgcatttcagaaagcatacgagtatggctataaatatgtggaaacagatgtaacatttaccgcagatggtgttccagttctgttacatgatgattctattgaccgtacttcaaatggaagtggaaaaattgcttcattaacatatgagtatgtgcggacacttgattttggctcatggaaaagtaaggaatatgcgggtgaaaaaataccatcatttgatgaatttatggcattttgttctacccatgatattcatccatatgtggaattgaaatcgaatattacacaggccagagtttatgagcttatggatattgtggataaatataatatgagggataaaacatcgtgggtatcttttaatattacttatttacagtatatgaagaatgcagatcctaaagcagaacttggattaaatacatttgatgtcaatgataatacatataatttaatacaaaaattaaaaacatctgaaaatactttgtttttatcaataaacacatcgtgtttaaatagtgaattgatacagaaatgtaaattacaaaacataccaattggagtttggatttgtgatacaagagatgaggtttttcaattagatccatatattagtactgttacgacaaataaagtattactggattagttgagttggtagaaaaggaaaagggaagatttatatgttaaaatatttcggaacagacggctttcgcggcgaagccaacaaagtactctccgcagatcatgcatacaagatcggacgttaccttggctggtattataacagaggtggaagttgcgctggagaaatatattgacggagagatgggagaactgccatttgcaactcgcgataaaatcggtgtggcaaatatttgaaagagtgtgacaaacggatatgtgcttggcggagagaagtccgggcatgtgattttcagcaagcatgccacaaccggagatggaattcttacggaactgattgtgaacttcctgaaaaattaactctcg

SEQ ID NO: 972 - DNA, 762 bp, Unknown
  gut microbiota DNA sequence
gagcagggcaagatgtctgtgaaggttctgaagaccaacgacacctggtacggcatgacctaccatgaggatgtcgcagcagtgaaagacagcttcaagaaaatgttggcgaatggcgtgtataaggccgacctgttcagtgatctataaataacgatgaaagaaacgattgatttactcggcaagatcatcacaaacatcctgactgctctctatgaaccgtttggattctcactccttctttccttcctcgccccccaaaaagcaaaaataactcagaatagcgaatggcaggaaaaaagtcaagaattttttgaacatgagggataagggtgatagatatggaaaattcattatacatatatcatatggtggtgcctcttcgctactgtacttatgatttgcatagtaagaaaaagactcggaatatgtgatgggattaaagcagtattaaaaacatggtgtcaggaacatcgcattccagtctctacaatgaattactggatgcgcaaactgaaaatattggacgaacaatcggatacagctatgatttttgcaaaaatgccaacagaaaaagaaatttcaaagaatgagactttgaacatcgacccgtctccagtccgcatttttatcacaaacgctattcggattgaagtgatgccggaatgcccaccggaactttttcatgttctcatacagggactgaaagatcatgcttgatctggcaggtggcacaaccgtttaccttgcctgtggagctac

SEQ ID NO: 973 - DNA, 6368 bp, Unknown
  gut microbiota DNA sequence
ttctcatacagggactgaaagatcatgcttgatctggcaggtggcacaaccgtttaccttgcctgtggagctacggatttaagaaaaagctatcacggactggctgcaattatcaagctgaaattcaaactcgatccctattcgcactgcatgtttgcgttctgcaactgcagacgtatttctattaagattctgcaatgggacggatccggtttctggattctgatgaagaggcttgacagggattcctttcactggccggaaactccggatgaattacagaaagtgaccatgaaagaaatgcattggctgtgtgatggtttttcacttactccgaagggagcttttgaagaaagacatccaaagattgttgtataaagaacggatttgtcaattcgcaaaaagcacgaaatactcgtggatatcggtatatattcctacacagtaaaacgttgatttttctcgaacagccggactttctatgctatactgcaattatcatataagagtttggagattaccggatggatccgttttttacagaggaacagctgaataacatgagccgtgaaaacatgatggaagttatgagaatcatgcaaaatcaggttcggaaaaaagagaccggggtacagcttctgaaagacaagcagaaagaactggaatttatgaacgcaatgctttcagaccgtctctttgtatattccgttccaagtgtcaccggaatatacaaattctaaaaaagaacaaagaaagattcttaaactaatgcatgaggtcaagaatgatgaatcaatgatattagtagcaacaggttccctggtaggagaaggtttcgattttccaagactggatacactttttatggcaacacccatatcattccgtggggtagttgaacagtatgcaggacgattgaatcgtgattatgcaggtaaagaaaatgtaataatatatgattatgtggataatcatatcccaatgtttgataatatgtatatgaagcggctgaaggcatataaacagattggttacgagctttctagtggcttgaaagccgataaacagatagttaatgcaatatatgggggagataattatagagaaactttccataaggatctacttgatgccaataaaaatataatcatttccagcccagccatcagcggacaaaaagtttatgaattaatcagcatgctaaaggaaaaacaggaggcaggagttcagattacaatagttacatggatgccggattcatatggatttggtgatgcagcatattggatgcagctacatgaagatatgcgtaaagctggcttttatataaaaacagtagaagaatattgtgaccgttttgctgttattgaccaggaagtagtatggtatgggaatattaatctgctggctaaggataagatagataatagtattatgagagtcatgagcaaagatatagcaggtgaattgatggagatcacatttggcgataatgatagagaagtaaggtgtaatgtaaatgactgaacaagaatttaaagaaatattacataaagaggaaacagatacagttgaatttaagtcttgggttaatgcaagaaatatgaaggaaattatatcgcttgcggttgatgaattgatagcatttgcaaatagcaagggtggaactgtttattttggagtagaagataatccggttgtggttacaggatgtgatagaaactatgatgggcaacgaattatagaggggatttatgatagaaccattccaccactattcaccgaaatatcagattttgagtatgagggaaagctcgttattgcaatatcagttaaagcagatggaaagacatatacaactacggatggtagatgcctgaaacgattggggagaaattcaaagccagcatatcctgatgaattaagtgctgtatattcttctgttcagaatccggatttttcaggaagaattattggagagagtactctggatgatgtaaataaactggaagtgtacagattaaaggaaaagctgagagtcagagattctaaatctacattgccggatttggaggatattgagtttttaagagatttacaacttgtaaaatatgatggagatgtagaaagactgacgattgctgggttactgttcgttggaaaagaagcatctattcaaagattgttaccgcaggcggaagttatatacctacattattcagctgctaatttggaggaatatgatgcaaggctagatttgaagttgccgttgataagcgttatcgacaagttgacagagcgggtacaggcatacagtaagatagaaaatattcaggtaggattattcagacttgaagttgaggatttccctgaaagagtatttcaggaagcattgcttaatgcgttgtctcatagagactaccagagtaatgctgcggtttatgtaaaacaatacccagatcgaatagttattgaaaatccgggaggatttcttgatggaattacagaggataatattataactcatccatcgattcccaggaataaactaatagcggagacacttcaaaatttgaagtatgtccagaggacaggtcagggagtagatattatttataaggacatggtttcaatgggcaagccatatccaagatatagatcatttaatgatgcagtttcgcttacaatatttagtgcaatagataatactgaatttgttaagtttattacagaagtacaagataaaaatagtaaaattatgtctttggctgagatgatgatattaagagatcttttagataacagaagggaacagttatcagagttgtcgagaaaagtccaaaaatctctggatgaaacgaaaaaatcatgtaatgaactgattagtagtggattaatagagattgttggaaaggaatacatgctgacagctaaggtttatgaagcattaaagtcagatgtggaatatacaagagataaaacagtccagtatatcaaagctaaaaatatgattttagagtatttacagacgaatgaccagataacatctgctaaaatacaggaaatgtgtggatttactaaacaacaggcaagaagtgttattgacaagatgagaagtgagaagttaattaacttaaatggcaaaggaccggcggctagatatgttatatttgatggattgagtgataattgagtttggggtaaaataaaactcaatagaaaactcaattacttttaatggcaagtactggagtaatgaatacgctgaaaatatgattgagtggagtctttttaaaaactcaattaaaactcgttgatgtgcgaaaaaatcacattggcgggagtattggaaatccatgtagaaccggaacatgtgaaagtatatacagtttatcggaatgataaaattaatcatactgcaaatccgataaaacttcactatggaatgaatgcaagggagcacaacgtagaacctatggagaagacagaatggaatgcaaaacaagtagagatttcttttgtgaatacaattcagtgatcgggatggaggtccgatattatctacagggttataaaggtacgctgattatcgatggctaccagataagttctcaattgtgagtaccacaacataagatccaatgatttatcgtatcctgaaaaatccaagtgactatacagagtttttattaaacagtaatattaattttgacaggtgcatggtataggaaaaaaggatgagataaaaccagcgtctatgcccgacacataaagaaaggagaacaaaaacgatgaaagcattaaaaaaacaacaaattgcggtcattttgatactgtctgtcatactcagcacatttgcagctgttacacctgtaagtgcggcgacgctgtctgcacagcagtatttggaaaagatggatatagcggtgcgaaacttaaaatcatatgattttacgcagacaaccgatcagaagatgacaatggaagggcagatcattcaaaataagacggtggtaaagcaaagcgtatacaacagtcctctgaaggtaaaaagcgtaacagatacaaccacagtacttgcaggaatgagttctaagaaccaggcggttgcctatctgacaaaagatgcggatggattgctgtgggagtacatttcttccaatggttccggatatcagaaaacagggattttaaactataccaatcagatcaaaggtatggatatttccatgtattcggatgcaaaaattgtgaaaaagaaaataaaagtcaaccggatcaataccgttcagatttcggcgcaggtagagggctccgatgtggtgaaatttttggaccagatgggaatgagcaaagagatcaatgcggcagctgctgtggattacaatacgttgccggcaatcaaagtgacctgttggatcgataaaaaaacctgccgtccagtcagaaccacggcggatatgaaagcgtttatgaacgggtatatgtcggcgctgtatcagaagctgggacaggatctgaaacttgtttattcgcaggcaaaagtaacggtaacctataaaaattttaataaggctgcaacatttaccataccgaaggaatgcagataaagataccatattttcaaagatgacaacaacagttactgcggatacaaataaaatagtatatacggcaaaggttccgaaagacgctacatctgcacggtaagtattcggttggaacatacacctatcaaaaataaatgtttctgagaagagagaatagctgtttgcgaaaacggctattctttttttatctaaaatggcatatttcttgtcagaagcaattgaaattataattcaaatatgataggataaagtaggctgtctagtgtagaaaagacacataaggcagagttggtgatatatgtaatgtcagagaatgatagttactacatataaaattataaaactacggaggaagaaacatgaagaacaaagattatttaacagtaagacaggaagaattaatgaattttctgtggaaggtcaatgagccgctgactgccaacgagatggcagagcgcctggcagaagacggatggaacaatgttacattgtttaagaccgttcagtctctgacaacggatggctatctggaagttgtaggacttgagaaaaccgtcaagacttatgcacgtaaactcgctccgtctatgtcaaaagacgattattatgcatctgtattgattaagcgtggaattgacagcagttctattgcgaacattacagctgcgctgatcggagcaaaagataagcaggcaaaagaaaaaaatgcagaggttattgcaaagttagaggagattattgataccctgaaaaatgatgaggaataagaatgcaaataacgatattttcggtttggatgacgttcgtttggtgtagcatttttattgtactgtgctacattctcagaaaacgatcggttctgctgaatttatccagtatgacaggaatcatcattttatatttgttttgtctgatcaggcttgccgtcccggtggaattgccatggacgaaagtggtatccggaggcagcctgtataatttcctgtatcagatattcgggtgtgaaataacctgtgtggcagggcacgaaatctatgtctatcatatatttgtggtggcatggggagtggtcatggcagttcttttgacgcggtatctgatacagtatcacagagttgtgtcgtatttttcagagatggaaaaaacggaagatacagaattaaataatattttagatgaaatttgtacggataaagaaaagcggaacattaagatcgtacagacagcagcggtagaagtaccgtgttgtatggggatttttgagaaacggatattgatcccggacaaaaaatattcgcgtgaagaattgcattatattattctacatgaatatatacatttggataataaggatatactgacgatagagctgatcaacattctgtgtaccgtgttctggtggaacccgtttgtgtatattttaaaaggagatatgtatcagagcattgagatccgttgtgaccagacggtcacaaagaaactcaaatcggcagagcggggtaactatctggcggtgatattaaaagagtataaggcaagtgtgcagggaaaagaatttcgaaaacctgcaggagccatgccattgtttgaagatcattcggatcatctgatcgaacgatttcgtctggttgcggagggaaagcaaagcagttcgtgtattaaaagaattctcgttccggtgattgcggttgctctgttggtgctttcgtattcgcttattcttcagccgagatatgaagtgccggagagcgcgtatag

SEQ ID NO: 974 - DNA, 2267 bp, Unknown
  gut microbiota DNA sequence
gtgatctacccgactgctccgcagaatcgtgtagaggaagccaaggccgtattaaaaaagctgatatccaaataccatattacgttaatctctttaggaaacggtactgcttcccgcgaatccgagcagatcatcgtacagcttctcaaagagattccggaaccggtacaatacatcatcgtaaacgaagccggtgcctccgtatactctgccagcaagctggcaaccgaagaattcccgcagtttgatgtcggacagcgaagtgccgcatccatggcgcgccgcctacaggacccactcgcagaactggtaaaaatcgacccgaaatccattggtgtcggacagtaccagcatgacatgaaccagaagaaactgaccgaagcgctggatcatgtcgtggaagactgcgtaaaccgtgtcggtgtggacttaaacaccgcttctgcctccctgctggaatatgtctccggtgtgagcaaagccattgccaaaaatattgtcctctaccgcgaagaaaacggaaaatttgcctcccgttcccagcttctgaaagtagccaagcttggaccaaaagcctatgaacagtgtgccggcttcatgcgcatcagtgacggaaaaaaccctctggatgccaccggtgtacacccggaatcctacgcagccacaaaacagctgctggaaacactcggctatacgctttcggatgtgacagaccgcaatgttgccgggatctcgaaaaaagtccgggattacaaaaagcttgcacaggatctggaaatcggcgaactgactctccgggatatcgtaaaggaactggaaacgcctgcccgtgatccgcgtgaggatatgccaaaaccaatcctgcgcagtgacgtgctcgagatcaaagatctgactccgggcatggtattgaagggaaccgtgcgaaatgtcattgatttcggtgcctttgttgatatcggagtccatcaggatggtctggtacatatctcgcagatgtgtgaccgctttatcaagcatccgctggaggtcgtcagcgtcggggatatcgtggaagtgaaagttctgagtgtggatgtgaaaaagcaacggattcagcttacaatgaagatctaacattcaggaaacaatttttaaagagaggtcatatcctgtcatggttgtggcctcttttttggtcaccctgccagcggattattgaccactggtacagattctcaactttttggtatttatagttgatttctgcatgcaaataagatattctgtctttaacacatataattccaaatctgatgagtcattcgctcgtttatccactggaattttaattcaatacaggatcaaaaacgactcggttttcccgtttttttcggttgtaaaactatgttgttttgatatatactaaaggaaaggcaggatactacatggggaacactgacattgtgacagctccgctgtcagatgccaacgagaaaaacactacagaacacagcactatttttgatgatgtattccggacaatcgcacagaaaatgccgcagcttcttattccgctgattaacgaagttttccacacttcctacagcgaggaggatcattttgaacagttgcggaacgaacattatgaaaaatttggaactgtggtcacggattctattatccggatcggcaaccatatttatcatctggagtgccagtcctcaaaagacaaaacgatggtcatacgcatgtttgaatatgatatttcaattgctattgagcacgcttcttttgaatcaaatgatatctgggaaattgaatttccgcagtcatgtgtactttatatccgcaatcaccgttcacttccggattttcacgaagcgattgtgaagtttgcggacggacagaaggtacgttaccgcattccgatcatacaggcaaagaaatacaccgttgaccggatttttgaaaaacggctgctgattctgcttccgtatcatatcttacgatatgaacactttttgaagcacaacgaaacggattcgaagaaagtgcagcatctgctggacgatttccgggagattaaccgaaagctggaggaaacatctgagaaggaacaaaagtcacatctttatatggatatgatcgttttgattgaggagattgcggattatattattccggaggataatgagatcaggaaaggattgggtgaaattatgggtggtaagattttgaaattacgctctgaagagttgttagagcagggaagaattgatgcaatt

SEQ ID NO: 975 - DNA, 11057 bp, Unknown
  gut microbiota DNA sequence
taagttcttcatatgctttgagtttgcttttatcatctgcgttcatttgtgcctccttaagtataggataagtacagcaaaaacagggacgaatgggaaatcggacgaattccgggactggcagaatgacggtggataaccggaagaaaaatgaaagaagcaggactggaaatccgtattccagccatgtaaaagcaggaaaatatgcaggtactgtttataatttcaaaagaaaaagcaggattcggaagtcgttaacgaaactttccatcctgcttgagtttatccacaaatatatttttttaaatttcgtcagtttttacaatggtctgaacagtaacgctatgggcaggctctcatatacttcatcagcataaatatatacatcacaccttcctctgtgatagaatgtaaaaaacggaggaaaatactatgtcaaaacgttcagatgaaatcagaaacaagtacatacagaatccacctgaaggcatgactgctgatgacatccgccacatgagtgaggatgatttgcttgatatggattacttcttaaatgaagacgatgagtttggtgaagactttcctggagctgaaggcttctatatcttctaaaacctatcgtttacttgtcgtgcccgctaaattgcgggcccttttcatatctagctatcccaaagttagaactttcctataaattaaaaaagacgaaaaataaacgatacagatttctctgtatcgtccatttttcttttttgattaaatcaatgtaaaatcaagccgaggcagactcctgtcaaaatgatttttgcagttcttttcaaatcaggtatctccttcctgctatctttataccagatggtacatgtaaaccgtttattcactcaacgacatccgatacaggaatgcggctatttccgctcttgtacaggcagcatccggattgaatcgtcctttgctattcgcttgtgcgatacccttctctttggcccacgccactgcctgtgcgtagtattcatcagaagaaacatctttaaaagctgtctcttgctctgctgccggttttccttgcgcacgccatagcattgtgatcgcctcggctctcgttatcgcagcatttggtctgctgccatccgaaattccctggtttttagcccatgcacgtgctttgctgtaccacttctttccacctgtcagatctacgtcttcccatcgtgcgagaatcgtccatagccgtgcccgggtaatttttgcttccggtgcaaaagccgtactgctctttccattcatcagcccgcgtgcacttacaaaatcaatggaatccttcgcccaatgtttttttgtatccttaaagtttttcgccttatctacgagcttcactgtagtgtcttcgtccacgatcagctgaactccatcttttgcagccactgatttcttcacaattttctcagtgccatcggcattgacaagcactgcgactgtacctacggtcatattttttaccggaatcttcactttcgttttccctgcaccctccggtagattgatggtcacagtggatgcagcttttatatttttacctgcctttacttcaaccggaagtttaactgcttcacctgatttttcagcatttgcgatcgccttttcactaagctgcacttctgctgtgatcattccttttttaccgttcactatggcaacagtcgttccatccgaatccttgatgtccggcgtagttgttgcagatgcatttccgttagctgcgccgcctcccgcggtggcacctcctgctgctgcaccgcctcctgacgaggatccgccccctgctgaagatccgcctcctgctgaagatccgcctcctgccgtggaaccgcctcctgacgatgatccacctcctgacgttgttcctccgctgacatccgcttttttcgttacggttacggtaacacgattactgtcggccgcaagatatttctcattatcaccggaataatgagcagtaaatgtataagtaccagcttgatcgagccggatcgtctgagcctcccctgtgccggatatcggcagcgaaggatctgccgtgtaagttactccgcttaaatccacaccaaatcctgaggtttcgctgacacttaacatgacctgttctccttcggtcactgtatccgggcttgtcgccagcagaatgaccggagctttcttaacattcggtgacggtgcgatatattcactccatcttgcatacaacaccgtattgctgctatatactcttgtcaaatcaactttctcaccacctgtcgtataccatccgtcaaacacatatccttcacgggccggtgccggaagatcaccgagttttccattgattccggtcgtttttgttgtattttctcttccgtcattataacaaaaagtaactgtataactctttgcaggctccggtgccggcaagatatcctgacctttgtttggaagcgttccttcgtaagcaagaacagttccctgctcatccctcactgcatatccgaccgtgtcaccggttcgcagatctgcattggacgggatggtatataagagggaacaatttttcaaaccggaattaaaatcgcttccatgatattccaacgttcccttcgggcggaaattgcccttttccgtccaaagcggaatcttgaacgtttctgacgctgctacaggctgaccatcagcagtagcaatggttccgtcagcatggtttacccatacctgtaatgtcacctgactgagctttgtatcggaaaggttctgcacgattgtacgcagctcaatcttctgccccttcatctctgtcggttggaaagtaattttatctgcccctgtcaaaaggcgtgtctttttgtctgcgtcaaattttgtataaccccaaccggttgcatcactaaaatctgaaagcttcgtatatgcatctgtgcgctttgtcacttccggttctgccacatacagatccggaccctctgtgaccagctggcgcatccgcttatttccctgcagcttacatacctcgcagaaaccattccaggtctggcgcatcatacattcacggctggaattataaatcttatccgtatcataatctgtatgaggaacactgtatgtcttccggaagccaagcagctgtctccattttacctgttcaggatcactgatccccgttctgtttagcgaagttttttcagacgcttctcccataaaagatccgctgttgtactcgtctccaagccataacagaccatgaccaagctcatgcgtaagcgtttcgactgcacgctggctgtatgcagggctgacaatataatggaatccgtaatcaagatcgttgaatgccccgccaaaatcatttgcagaattgaccagaagtacgaactggctgatgtagtcatgtacatatttatacttttcaaaatcccaatctacattcggatctgcctgctgcggaatatgggcatcatgcactttctcgataaacgccggtccgatacaccgttcaaaaatatggttcttccactgacttccattcacggatatattctttccccatacatcgaaaaatgtactgtcatatccatcaatggcactgtacgttttatccgatgccgtacataatgcatatacattgaagcgatccttgtacgtcttatatggctcatactgcatcgcgccttcccataaccgtttggcagctgcaacaaatttttgctgctcgccttttgtgtaaccttcaccgcagatgacgacaaccatattctcattatcgctgcgcgtcttctggatgacctggataggtatcgtggcagattcgtatttcttgctcttggaataattcggtccaagatataactgtatactcttgtcaagcgaaacatcccactcctgccccggtgttggtccatctccggaaactgtaaagttctcctccggtttatttacggctgcaccgcggtaaggggaatcagctgtaccgtctccaccagtcacctgataatattgcgtatcaagataaaacgccggacggacaccataaaagcctaaatacggagcgtttctgtctattcttccatccgtctccacatagcgcatatcgtggttgcaatccgtcaccggagtccgcagccagtaaggccacctcacgccacccttataagcaatatgataactgtctccaagctggctgttattttgatagactttgtttatctgctttacatccattaagaatactttatccgtaacgttctcataataggcctgatcaaatccgttagcggctgcttctatatttgtgtcataaggcagatctgccccctggccttcgatcattcccgcattatattccggatgggatacgatcgaacgctgggttaccgttttaatcgctgcgatctcgtcctccttaaagccgtttaaaaagcctgctgcctggtcatatggattctctcctacaaagccactctttggagggtttccgcaaagccattctaccttcccggcttccgccttggaattcagccaggaacgcatattgctgtcacgccattgatttgagccatatgtcccacgctttaggttacggctgtgcgaacgcgtagcgctgttttcacttgttttggcatcataagccatcgttgccagcacctgatcggagagcatgagcggtcccatctcatcaacatcgacgcagcgccataagattggctgcccgttatagtttcccagcctgatatagtctccgatgctaatattgcttgtgccaacactgctcgtctcctctgcagctgcctgtgtacttgaaaatggcagcaccgacaataccatacaaatacataaaacaagtgctgtaagctgttttttcataagtagtatcctccctttcatctgttatgtattcccgtaaataaatttccgccgactctataaagcattctctaccttatcccatgtgtgggtcagttcaaattgtgcctgtgtcaagtaaaaataagtctatttcacggcagccttcgcaccctgatcctgcaccggatcatcccaggtcacatcaatatagcggtagctgcttccgtctttcacataattccacgcatgtgatccgccaccggcttcacccggaacggcgatcgaacagatgccggcttttgcggcaagcaggttaaaaacacctgcatagccctgacataccgcctttttctcaatcagacaaccatatgcggtataggcatcatcatatccgtatctgcgcgcgttctcatcgtagacacagtttttcacgagataattgtggatcgcacgcagcttctgtttgcgcgtcattccgtccctgataatccggggaataatcgcgttcgcctttgcattcgcctgttttattttacccgtgatctgcgccgcactcaggtcattacctgcccggtaatcaaatgttccatcggtactcttccagatgaccagactataattgtactccggatgatgctgcaatgcgagtacaaatgtctcgtaatacaccgctccgtccgcacaatagctagtgctgtaatcacgctttttcatcgccttaagcacatgcttataggcatctttttcggacttgacgactgtgatctttttcgtaaaccgaaaagatatgtcaaagttccctttttattatacaggaagtctcctataatgtcaagccctaaatcactgatttttcaggcttttctttaaatatttacctcataaaacagagccacaagtgtatgacagtcattgtatcttgtactgaatagttagaagagggtgcagtttataaagcgtccctttgttttgctttataaaggctataaatcctctgttaactatgatggtgaaccttccgtgtctaatggtatcgtgtaccaacttccttcgtcccacctgctcatacaccgagtgcccgctaagctttctaacagggtcattgccctacggagtgaactactgcaggctacagctcttgtttatattttgattttactgacctgccctttccgcagggtacggatattccgtggacgcttcccttgtttcgttacctgctggtcattgtgctgatgcagtgcttgttgcactccatcgttatcgggtttctttccagaaccctgcccgatttcggaatcatccgcaacccggcaaggctctggaataaataatgctgtcgattgtcttatgctgcaatcgcttccttcttttccggccgcctgatgtccatcagcatcttcttcggatcatagaccgttcccttcttcagaatcgtataaacgattctcaaaagcttgcaggctatcacaatcagtgactgcatctttttcagcggattgtcagggcgtgtcgtgtagtacacatggagttctttaacttcctccgcatgagccactgctgactttgccgcctggaataaccagtatctgagtcgtttgcgtcctctgtgactgattttggtctctcccttatgctttcctgagctacatgctacaagacctaatccgcttaatttttgtatttccttaacatcatcaaatctcgaaatgtctcccatctctgcaagaattccggaaagaatatttattgtgtcaggcaccattgttttcaaactgcataacatcatccggcggattcagagcatacaaaagtccatacggcgagctgtattcccatttcactgggatactgacaagcgccgggtggacatcctgccaacattccagtattaagagaacattcccggtttctatacagcggttaaatacagacatatcataatatttattgtgtcaggcaccattgttttttcattctcggcattggaagaacttctgcatatcttctggtgaaagaagaacatttcagttccattcctctgccagcaggaagtcacgaatattgcggtgtttgattccatctcggctcatatccagttcgtccatcgttacaacgtatttcgggaaattgtcacgaacaccggcaaacgccccaaactcacgctggatggtttcctccgaggcaagtagataggaaacctgaacatacagctttttcccatgatcttcacatacgaagtcaatctccttgtcagagactttcccaacagtcacagaataaccacggcgcagcagctccatgtagacaacattttcaaggacaaggttaatgtccttcatgttgccaccgtacacggcttcccggacaccatgatctgcaacatagtatttctcgttgacggtcaggattttctttccctggaggtcttggcgcttcacctgataaaacaggaatgcgtccgtgcaggctttgatgtagttcagtaccgtttctggtgaaacggagcgcccttcacttttcagatacttggaaatggctgtggaagaaaaggtagtgccgatgttggaagttatataagcaataattctctccagcatatccacatcacggatattgtttcgcttgataatatctttcagctctacggagttgaacaagtcccgcaaatactgacgactggcggcatcgtcgtagcgaaggttgctcaaatagggcattcctcccagcgtcagatattttgtaaagcattgtctttcgtctgcaccttcgtaaacggtgtgatacagctccataaactctctgaatgaaaacgggtaaatcacgaactccacataccgtccggcaagataagtggcaagctcaccggaaagcagcttggcgttggaaccggtaatgtatatatcacaatccagctccacccggaaagagttgatacatttttcccaatcagccacctcttggatttcgtcgaagaacagataaaccttgccgctgatttcttttgttctgcgaaggatttcatcatgcaatgcaacagccgtacaaaggtgtgcattgctcatgttctcaaaattcagggaaataaactgttctggttggaccccgttttgggcaagttcctcttggatcaggttcagcatgacagattttccactacggcgaatccctgtcagaacctttatcagctcatttccgataaaaggacgaatacggctcatataaatttctcgtttaatcatgtagaccagcctcccttctgaaactgtctatatggtaccacggctataactgattttcaataccgcaaatccagttttatcagatataattgataaaatacgaatttcgacacaatcaggcagttataccgagcgaagtttggctatgcgtttttattgtgtcaggcaccattgtttcatattgaaatatagtgtctctgtgcatgttctatatacctctgattatataatattcaatttatataatctctcaaatgcttttttatcaaagtctgcttctgtaatatatagctttctatcgctatcaatgtcattctaactcaatagtcatatcaattatacaattaaaagcaaagatgctgctaactgaataacaacatctttgcttgtttagaatggggattataaaattttaatgatagtatactgtgacataaatattttttaatgttgctgctgcaacagttcccgttgaataccttgtagattcaaattgaacataataatttccaacagggcttaaattataattgccaaaatctgcaaaagtaagagaactattccaacttttgctgtctgtatatctgtcaaatgtgccatctccattatcctcatctttagcaacaaataattcgatgtttccactacttccactactttttgtggatgtaaccactattttactgattgtggagcctgacggaacagatgtgctgctgattgtaaaagaaccaagagcggaagttgccactgtatcatttgttccaaaaaaggaatttaacattccaacagaatgtcgtgatgatccagaagttaatgctgtcggagttatttcaaatgtcattgttttctccgtctccgaataattttcctgagtttctgccgcaaaagctgtgacattcattgtaaaaagcatgacaacacatacaataatagaaaaaaacgttttctcataatgaatctacctccatactttatgtaatcatccccatctaaatatactaaattgaaaaatcaaatcttccaccgattttattatcctctggtttgatagaattccattcaatatttttaattttatccaaaagttcatcttttgaatttgcttgaacagtagctttttttacttcaatttgctttaattgttcctttttcttcgcctctttcttctccgcagctttcttttcctgaattttttcaagatattctttctgactagctgatgttttttctaattgagcaaagaatgttgtagttccatcactattaaaagaaataccaaactttgttatttttgtatcagtatctgcactgttttctattccgtttgtcttaccaaatgctctttcaaatccaaactgagcattgatttcatccgacatacgcaaagcaccttcaatactatgcatcttttcagcataatatttgggatcggatgccatcttctccatttcttcctttgagaaaataaccgtaaactctttatcactttgtgctaaaatatctttagcattatcaccattttcaaaatctgcaaccataaagtccatatctgttcttgagccacgcatatctttaagcattttttgtgcctctttacttagatttttttcggctatactttctgtcacatttttcttgaccttatcattttctgttgttttcgctgtttcttttttcttatctactgtacctgccttgtaggtattctgataacttccataaacagtacccgttgtattcacattcattgacatatcctttgtcctccttctctgaatccgttctttattatttattgtttctaatattatatatcggctttattccgaaaactataatcctccctgttatttttatcccatgattattgaaaatctaaaatttgaaattcactcttaaatcagattatgcattaaatattattgctattgacaaaccacctaaatatgaattaaaagatacttcttgctcaacagaaaaaagcagcctattgcaagtttattgtgtcaggcaccaattgttccagttccgcctggtgacatgtaatacaaccatcagatatcaggaggagagtatacatgaacgttgttattgccatcgattcttttaaaggaagcatgacttccctcgaagccggggaaagtgcctctgccggaatccggcgcatatatccggatgcagatatcaccatccgcccacttgcagacggtggcgaaggcacggtggacgctttgacgcttggctgtggcggcacatgcacacaggtatgcgtaaccggacctcttgggaaaccggtactttgcagttacggcattctggatgctggaaaaactgcagtcatcgaaatgtccggggctgccggaattacactcctttccgaaaccgaacggaatcctttgtatacaacgacctacggggttggggaagtcatcagagacgccattgccagaggctgcagacattttattataggaatcggcggaagtgccacaaacgatggaggaatcggtatgctgcaggcactgggatttgacctgctggatcaggaaggggttccggtacgtcatggtgctctgggcttaagggatctggctgtgatttcagactcccatgtactgccggaactgaaagagtgtacgtttcggattgcctgcgatgtgacaaatccgctctgcggtccgcatggatgcagtgccgttttcggtccgcaaaaaggcgcagatcctgccatgatccagcagatggaccagtggctttcctcctatgccgcactcgccagaaaaagctttccggaaacgaatcccgcgcatgcaggagccggggctgccggtggccttgggtttgcttttctcacctttttccatgccactctggaatccggtgtaaacatcattctggaagaaacccatctttccgactatataaaaaatgcagatattgtca

SEQ ID NO: 976 - DNA, 1047 bp, Unknown
  gut microbiota DNA sequence
attatgcggtccgaaccccgctgtgcacgcacaacggtttggcctctttccatttcgctcgccgctactctggaaatcgatgtttctttctcttcctccggctacttagatgtttcagttcaccgggttcccttccatacgttatggattggcgtatggatgactggagtccttccagccgggtttccccattcagacatctgcggatcaaagattatttgcatctccccgcagcttttcgcagcttatcacgtctttcttcggctcttagtgccaaggcatccaccctgcgctcttttttgcttgattattcaatcctcgttatcatagcgttgataactttcgtaaccaacttctggtcagttacttattattcattaaagaactttacggttattacgatgtcttgatcaaatagatatttaatcatcttatcattctgtatgaagttttcaaagtacatttctcagcagatattattttcatccactgataatggagacggagagattcgaactcttgaccccctgcttgcaaggcaggtgctctcccaactgagctacgcccccatttcaatctagcatccacctaccttcccataccgttaccagtatagtattatcggccgcttaagtcttaaccatcgtgttcgggatgtggacgggtgtttcccctaagcgcatcgacactagaaagggttttatttaattgttatcctgacaatatttgcttcgcaaacaccgccgttgataactcaacagtgaaaaatctctacttgatttccttagaaaggaggtgatccagccgcaccttccgatacggctaccttgttacgacttcaccccagttatcgaacctgccttcggcagctccctccttgcggttgggtcactgacttcgggcatttccaactcccatggtgtgacgggcggtgtgtacaagacccgggaacgtattcaccgcagcattctgatctgcgattactagcgattccagcttcgtgtagtcgggttgcagactacagtccgaactgagacgttatttttg

SEQ ID NO: 977 - DNA, 65493 bp, Unknown
  gut microbiota DNA sequence
cactcattccctgatatttaactttctcaggagctgtacctgtttcagttgttctataagagatgtttgttaaaccaagtgtagaagcgttcatattatcaatgctaatagaaatattctggtttgtgtttgcaccaacctgaagcttcttatcagcaaatgtaccatctaacagattctgcttgttgaactgtgttgtctctgaaattctgtctaattcttctgttaatgcagataactcatcgttgatagcatcacggtcaatagactggtttgtatcattagcaccctgtactgctaattcgttcatacgctgtaagatgctgtgtgtttcatttaatgcaccttctgctgtctgaataagagatacaccatcagaagcgttatcagaagctttgttaagtccacggatctggcttctcatcttctcagaaatctttaatcctgcagcatcatcgcctgcacggttaattctgtaaccagaagataacttctcagctgactttgcctgtgcaccagaagtgattcctaactgacggtttgcattcattgcggtaagattgtgttgtactaccatgcccataattgtttcctccttgaattaagttacagcttccatgctgtaattgatatgatatttaattgcaagatttctctctttacggccgtacgctccggtcagaggtttgtcttgtgtgggtaagcaacgggttctccttgcttacttgttatatatatcggacaaggactgaaatactttagtcccaattttaattttttatttttaactgctttttatagcgccaccggaacttttccttccagtattgcacggatctcatccaaattcttacctgtgatggatgcaatgttttccggggacattccactacggttcattttaagaataatttttgcttccgcaatcttttcctgtctttatgataacctatttatttttctccatcaagcagtttcttgtatcccaaatacccgaaataatctcatcattacagttcttatcaaattgttaacagaatcaattatttaaaaaagtgatggtgtattgtttttcatatacatcatcacttctttttaatcagttcctattttcgcaaatattcaccctacctttcttattttccgttctgtaaatgcaatacgcatatcataaaaatctctttattattcggaatcgtaatttactaaagaaatccataatcacctgtgcaattgtctgtatactttcaagtatatccggtatttttaaaattttaaggagcaaagacgatataattcctgcgataactacagtaattattccaacaatccaatttccacattgttttcctattatcgtgtataggttcaaaacaatttcattaccattaaaaattttctcaaattctgcctcttttttcattaccgtaacaaaaaatgcaatataaataaaagcacaaaaccatttctttaaatttccaagaaagactttccattcccataacctgttttcccaaaatacacttttatacaaaatagctggttccgttggcttctttaattttacattttcccattcccttttagcaacactccaatttaattttcgtattattttttgctttaaaggatattctccattcattaatgcatgctttccctctctgtattccttccaaaattcatataatcttttctgaaagtcacttaagaattcttcatcagcgtatcttttacttacattataaatgctatcctctacaacataattgtaacacagatcaacaattgcctcagccacactttttatttctactgatttttcttcttttaagctattcaaccatactgatctactctgtaaattttttccggaagcaattatttttgatttcacagcctgtaaacaattgcttccggaaagaaataatttttggaagttttcattatcaaattttgccctacgaacccagttaatcatatatggtaatgtataaacagaaccttccttaaccggattcatcgcatgctgttgtatactaatatgaaacatgagctcaatataattctctaattgccccacatcttgtttcaaattttcatctacagttctttcacctcatcccgcatttcttctgtcatattctgtacataggtcgtctgggaagaaatttcttccgtatttgcggcaatcgttgacactttctgcgtcatggtattcatgctttctaccagatctttgatcgaatccatactctgtgtaatctttggaagaattgcctcggctttctgatcgttctgtgtcagaagatctttcgtggaatcagacagtgtacggatttcctccgctaccactgcaaagcctcttccgttctcaccggcacgcgccgcctcaatggaggcattgagcgaaagcagatttgtctgtcccgcaatggcagaaatatcttcattgctctttttatatacactgatgaaatccgacatgatacggatggactcattcagttcatcgcacagacgggaaatatcctgaatatactgtgccagattggttgcttcatttgcagattcctcgtttgccgtattcagttctgcaatgttatcactcagggtaataaaccggtctgtgatatctgtaatcttctgctggcggatttcctgttccgtccgctcctgatcgcgaagttctgcaatcttttttgtctcttcctctgccatgccccgcacatagtgcacacagttttcttttacgttgactccattgtggatggcacgtaccatgttggtgcagcttgaatatccacaggattcgcagtccctgtgctgttcctcataggtatcttttttcatttctgcaaacaggcggttcttctcctgttcggacggttcctcaatatgtactgcgcgattggtgtagctacgcataaaatcgttgatgtccagctctccaaaagcgtccatgaagtttttcaaacgttcctccggtgccagtgtctctgcccacggactcctgcttttgctcttcctgccaaagtgtgccttctcctgttttgcactggttttgctgtttcgcagttttgcgattgtcagcatgacatcatcggttccccgtttcgaatctgtggcagttccgtagagacagcccttcgcacaatttaagatatctaccataaacggaagttctttattctgctgaatacgttttgcataggaacgcagatattcatacgcctcatgctcgccctctacctgacgcactacctgctctttcccaagaaaatgttctacattctcccgcagtccaccaggcatcggatacaaagaacccagtccgtattccagttcatcggtatatggttcacatccttcataatcgtttccgatatacttcatcatcttttcaaaagttacattataagaaacatatccgccgcaattgggatcggtaatctctaattttttggcaatacacgggctgatgaaagcaatttcatctgtgacctgcatgtattttttcatataaatagcagtacacatcatcggactgtgtaccggcatcagacgcggaatcagctccggtatatatttttccacataggtgactactgccggacacggctgggaaatgcccccgaaaaatttgtgttccgtaatgtatttcagatatccccaggttgtgatatccgcaccgaacgatacactgcagatatggttgactcccttactctttaaatatcccagcacacgctggtattctttgggataatttgccagaaatgccggtgccagtatcacggaaattttctttcccgatgcaaggtcttcaaagaagcggtccgtatcatcataatagtctctcgcttcatgtgggcagacatcaaagcattccccacatgcaatacatttgtccgggtctaccgttacataaccttcctgcgttgcaatatttgccgtaagtacaggacagccccgcacgcatttgttgcatccggtgcataaatcatttgtgtaaatcagttccataaacgcactccttattatgattttcgtataaacactacccctatatgcttataattttattactttttactatatttgtccagcaaaaccttgctttttccgttatttttatcaaaacacaaatggttgtctatgattttttgcagactggatttatatttttttcccattttggatatatacacaccgatagatcgcactatactaggatacaaagaactattttcaccaattcggaggttttccatgaaaaaagcagctgttatccatgatctgtccggtttcggaaagtgttcgctcacggcagcgattccggtattatccgcgctgggcgtgcagtgttgtccggttgcaacagccgtactgaccgggcagaccggttatccctgttatcactgtaccgatctgaccgccatgttaccggactatattgatgcctgggggaaaaataacgcacattttgatgccatctacagcggatttctgaccggagcggaacagatttcgcaggtgcttgatttcatccgccaattccgggaagaacatacgcttcttctggttgaccctgttatgggggatgacggaaatgcttatccgttttttactccggggctgttaaacgggatgaaagaactgacgcttaaagcagacgtgatcacgccgaatctgacggaagcctgtctgctggcagacatcccggaaaatgccttacttcactgccggacgaacacggatctgctgaagctggcagaagatgtggcactgcggctgcaaaaaaaagcctcacacccacaggatgtcgtgatcaccggtgtcaaatgccgtgatgagaaacatcccgtcatttataatattgctgccactgcaaatggaatttaccggcacgaatcgccgttttttgaccggagtttttccggaaccggggatctgtttgcctctgtattgtgtggctgctgcacaaagggcatatgcacggaagatgcgattctgcttgccgggaaatttttatcccacagtatcggggataccatgaaagaaaatacgccgggacgcgatggcgttaatttcgagaaatttcttattgacctgattgcagattcaaacgtgtaaaaacgaaaaacccggaaaagaatttcgcaattgatgaatccatacgatagaaagaaggaattgttatggcaaaaattttatatgtgtacaatgatcaggtatatgcaaatatcacaaataaatgtgactgcaactgtacgttctgtatccgtaaacagtttgatggtgtgggtgatgcggataccctctggcacaaagcagagccttctttaagtgagattattgccgcaattgatgcctttgatttcaccggctacaaagaatttgttttctgtggctatggggaaccgacctgtgcactggagaatctgatcgccagtgccagatatgtcaaagaaaaaacaggtctcccgatccgtgtcaattccaatggtctgggaaacctgtattataaacgtgacattgtaccacagctggcagaagtggtagacagtatctccatcagcttaaatgaggcaactgcagaaaagtatgaaaaagtaacccgcccatccttccctcatgcttatgaggcaatgcttgattttgcagaggaatgtggaaaacttatcccacacacgcagctgtcgatcgtggatattcttccggaagaagacattaaggcgtgtcagcgcatcgccgacagccgcggtgtccatctgaaagtacgtccatgggagcacagtgcataaagaagttaccgttctcatgcttacctgtgagcaccagcggcattacagtcccagtacatccagaaggatctgttcatctttcttttgtttctgtggatgctgtaattccgcatctgccaggcgggtacggatattctgcatccgctggtccagatctgcactgatctgtgcacattcgctcagttcctgtgccagacgctcggtttcatctgccggaacattctttttgtaccgcactttgtgctccagactcgcccagaaatccatggcaatggtgcgaagctgtacttcaactttcatttcccttttctcattctgtaaaaaaatcggcactgcaacgatcagatgcaggctgcggtatccgttttccttcggatgcttgatataatctttctgttcgatcagacggatatcatcctgctgaagcaggcagtccgccagcagatagatatcttccgggaaagagcacacaacccggattcctgctatatcattgatgttctgttcaatcgccgaaagcgtcaacggaatatttttccggcgcactttgcgcacgattccgtccagcgatttcacacgtgtcttgatggactcgatcggattacggtcatattccagcgaaaattgttcgtttaacactttaaacttcgtttctacttccatgattgcgcacttgtaatatgccatcagcgtatccagcggttttgtattttcctgcacaaaatccaaaaattcatcagacatcagacgattacggacaaggttttccgctgcctgctgcagctgcgcatttactactttacttaattcgttcatatctatttcctctttttctcctgtaattttctatataaataattgtgaaattcttagttccggcggactcccgtgtggtggctccggctgcggcctctccgatacgcactcaatatccagaatcaagaatttgcagaaagtgactgcgtgactcctttgatgatttgtgttcgttcaagtttcgacagcggcgcggtttgtgtccgtctgccaaggacgcgtccgaaggatttcgtgtctgccttagcggagtgcttcaaaatactgtgcccgcgggtcgtgtttgcgaccacatttatttaaggtcattcaaaaaagtccgtagggagacataaccgggagcgggcgccataaaatttttgaagtgctccgcttaggcagactagaaattctgagcgcatccttggcagacggacacaaaccgcgccgctgtcgaaacattgcccggacacaaaattagagccacgcaatcactttcgcaaattctaagattctgtctaattcgtgcgtatcggagaggccgcagccggagccaccacacgggagtccgccggagcacaaactttcccaattgttttaaataaaaagaacttcacggaaataaatttccatgaagctctccgcacatggactttcctgtctggtttccacatgcctatattataatggattcatccgcaaaacggaataaataaagtctgaactttttccgaattttatcttaatccttgaacagatcagtagaataataacgatctccgctgtccggaagaagggcaactacagtctttcccttgaactccggtctttttgccacttcgatggctgcctttaatgccgctccggaagaaatacctaccagcacgccttcctcttttgcaatatatttggaatactcgaaagagtcttcattggaaaccgggattacttcatcataaaccttggtatccagtgtgtttggaataaatccggctccgataccctgaatcttatgtggacctgcctttccggtagacaatactgcagatgtctcaggctctacggcaacgatctttacatccggattctgggattttaaatactcaccaacacctgtgatggttccgcctgtaccgacaccggctacaaatgcatcgacttttccatccgtatcttcccagatctccggcccggttgtcttcttgtgtgctgccgggtttgcagggttctcaaactgctccggaatgaagctgtctgcgatctctttgtgaagttcctctgcctttgcgatggctcccttcatacccttgcttccatcggaaagaacaagttctgcaccatatgccttgatgatgttacgacgctcaatactcatggtctccggaagaacgatgatcaggcggtatccctttgctgctgcgattgccgcaagaccgatacctgtatttccggatgtcggctcgataatggtggagcccggttttaattttccgtccttctctgcctgctcaatcatctcttttgcaatacggtccttaacagatcctgccgggttaaagtactccagctttgcaagaagtcttgcctcaaggccaaacttcttctcgatgtgtttgaactctaccagtggtgtgtgtccgatcagttccaatgttccttcataaatatttgccattttattatcctccaatttactctctctgattcaattccttattttcatacttctttagtaggaattatctgttgttatgaatatacaccctttcccaaacgctgtcaactactttttacgatattattttatacccctaaaaaatacacgacactccttatattttactccgctttgccacaattaagactccaaaattttaacagagccagaaactgcacaaaattcgtaacgtatcctataagaagcatcgtgtatttttatctatatgtgtatgaaaaaccctccgatttaattactcgtcatcctcatcgtcctcatcgtccgcatcctcaccgagcaaagcctcttttaaagttctccagccaaggactgcacacttcacacgcgccggcatatgggcgatatcgcggagtgccgatgcctcctcaagagaatcaatctcctcctcgctggcatcgcctttgatcattttcataaagatttttcccatctgcagggcctcttcttttttctttccgacaatcatgccaagcatgatatctgcggaagcctgggaaatcgcgcaaccgtccccgacaaatgcaccgtcggtaatcgtgtcgccatccgtctttaatttcaggaaaatatcatccccacagctcgggttgacaccctcaagaacaatatccgcatccggcagatcatgcttgaactccgggcgcacgttgtgctcggttaagatttcattataaaaacttctattttccatatcccattcgctcccttatacttgcgatgcttgctacaaattgatcggcttcttcttcggtattgtaaaacataaagcttgcccgtgtggcggaactgatacccagataattcaaaagcggctgcgcacaatgatgtccggcacgcacgcagataccgtcggcaatcaggatctcgctcacatcgtgtggatgcacatcatcaatggtaaatgtaagaattccggtgtgttcttctgccagatcagaacccagtacatgtacatgtggaagttcttttaatccgtcaaacgcacgctttgtcacagcaagttcccgctcctgcatcacgtcaaagccaacagactgtgcgtattttatggcagcatgcaatgctatggcaccggcagcatttacggttcccgcctcgaacttatgcggaagttctgcgtattttgcgctctcgcgggtcacggattcgatcatctcgccaccggaaagaaacggcggcattttctttaacagttttttctttccatataacacaccaattcccatcggtccgaaaattttatgtccggaaaatgcaaagaagtctgcatccagatcctgcacattgactggcatatgcggggtgctctgtgccccgtccacaacgatcacggcatctttttcatgcgccatggccgcgatctctttgattggattgatcctcccaaggacattggaaacctgtgtgattgcgacgatcttcgtcttttctgtaatctgttcccgcacctgatccagatcgagagatccatccgggcggcactcgataaaccgcagttttgctcctgtctgtcgggcgaccatctgccatggcagaagattgctgtggtgctccatgatggagacaagaatttcgtccccttcttttacattggttaaaccataactgtacgctacaaggttcatactttcggtcgtgtttcttgtaaaaataatttcccgcgcggatttggctccgataaaatcacgcacgccttttctggcattttcatacagttcggttgcttccacactcagcggataatttccacgcagcggatttgcattgtgtttcaggtaaaaatcgcgttctgcatcaatgacacactgtggacgctgggatgttgccgcattgtcgatatagatccattccctgccatcgactgtatgttccccgatttctgacagcagtggaaagtccttgcgataatcggtcatgctacacctccccaagttcttcgtcaatcattctggcaaagctgtcgtcttttatgattcctttcaggcggtcaatgtttgctcttgccataatattttccgcgtgctctttgtcgattccgcggctggcaaaataaaacatggtatcctcatcaagttccccaatcgttgcaccgtgattaccaacgacattttcctcggagcataagatcactggaacggttttattctccacatcatcgccaagcatcagtacattttccagctcgtttccgacagaatcggaagagccggtcttaaaatcaatcgttccacggaagatcttctttgcaccgtcgcgcagggcaccgcccacgttgatctcactctctgtatgctttccaaagtggttgaccacttcattcatgtcgatgatatgtgtgtgctgcccgatatagccgatatcgctcctaaagctgctcgcatcgccgtttaagttgatggtcgtatcggaatagatatctccttttccgagataaatctgtaccagctcgatacgggcgttttttgcacattctccctcaatctggttgtacacaagggaattttctgctgtgtgctgcagctgcaccagacgcacccgtgcatgttcttccaccgaaaggcttgtccttacggcaagtttttcctctgtctgataatccataaacacggtcacctgcttaccggccggtgctatgatatggatctttttgctgctgtatctttcctctccggtaatggaaaagcgtacctcttcggtgtttcccgctgttacggtttcctccggaagttctgttgtatgttctttgtcccacggaagcttggtctcgttgacatgtaaccaataccaggtcttcgatggaagtttattgattgtcatttctgtcattgttctcctcctaacctatgcttcccttcatctccagccggatcaggttgttcatctcaaccgcgtactcaaccggaagttccttggatacgttgtctgcaaatccgctgactaaaagtgcccgggcatcttcttccgtcatgcctcgtgacatcaggtaaaagacggcatcgtcgctgatgcttccgatctttgcctcatgtcccacggctgcgtctttggtacggatgtccatggccggaatcgtatccgaacgcgactcggaatcgagcatcagggactgacaggatactgctgattttgatcctttggcatcctttgccacaaccacgctgcttcggaaggtactgattccgccgtccttgctgatggaacgggtattcatataggagctggtgtttggtgctgcgtgtaccactttggcaccggtatccagattctgtccgtgtccggcaaatgtgacaccggtgaattccattttggcaccctccccctttaaaacgctcatcggatacaggcagcccacatgggagccaaacgatccggaaacccactcgatcgttccgccttcctcaacggaggcacgcttggtattcaggttgtacatattcttggaccagttctcgatggtggaataacgaagctttgcattttttttgacgaacagctccacgcagcctgcatgcaggtttgctacgttatatttcggagcggaacatccctcgatgaaatgaaggcttgcgccctcatccacgatgatcagtgtatgctcaaactgaccggctcctttggcattcaaccggaaataagactgcagcggaatggacacgtgcacgccctttggcacatagacgaacgaaccaccggaccatacggctccgtgcagtgctgcaaacttatggtcatgcggggtgacaagtttcataaaatactcatgcaccatatccgcatattccccttttaaggcgctctccatatcggtatagacaacgccctgtgcggcaacctcgtctttgacattgtgatataccagctcagaatcgtactgggcaccgacaccggctaaagatttgcgctcggcctgcggaatacccagacgctcaaacgtctctttgatgtcttccggcacatctttccaggaaccctgcatctttgtattcgggcggacatacgttgcaatgtgatccatatcaagtccatcgatggatggtccccagtccggaaccggcatctcattgtaaatctgtaaggactccaggcggaactgctgcatccatgccggatcgcccttttctttggaaagctgctccacgatctgtggggtcagaccttctttcattctgtatgcatctttttcctcatcgcggatatcatagatgctgcggtcgatatcttctacctgactcttttctctcatttcgcacgcacctttcttactgttcaaattcctcaaaaccgttttcgttgatctcatctactaaggaagcatctccgtttttcacgacttttccttcatccataacgtgggtgacatccacatgcaacgactctaagattcgtgtgctatgagtgataatcagaaggcttcccttgcatttttctttgtaaagctggatgccctttgatacggtacggacagcatctacatccagtccggagtcggtctcgtcaagaattgcaagctttggctctaacataagcatctgcaaaatttctgcttttttcttttcaccaccggagaagccgacatttaaatcacgttctgcataggactcgtccatggaaagaagtttcatggtctcggtcagttttttcttgaaatcccacagacggacacgctttccggtcttctgctcgagtgcattacggataaatgcgctcaatgtcacacccggaacttccagcggattctggaaggagaggaagattccctttttggcacgctcattcaccggcatctctgtgatgtcctctccgtcaaaaaagatctgtccggatgtgatggcatatttcggatgcccggtgatggcatagcccagggtggattttccggttccgttcggtcccatcagaacatgcacttcgtcttttccgacttctaaatttactccgtgtaatatttctttatcttcgacgtttacgtgcagatctttgatctctaataaatttttttcagacatttgtatttcctccatataaaacatgttgtttaactttcacaggaatgcgtcttctgtgaaatcatatcctcaagggtatgcttctcaaggtaatcattgatcacagcttccagtccctgccagaacggaagtgtggtacactctgcggtgctctcacacttttttcctccttcacacaggcacgcgaccggagctaaatttccttcgatcagttgaaggatctcaattactttatattccgacggttgtttgatcagacggtaaccgccaccctttccgctggcactctcaagcatcttcccttttgtcagtatggtcataatactttcaagatatttcagggaaatgccctgccttgtggcaatttctttgaccggaatgaattctccggaattgtgctgcgcaagatcgaccatcacacgcagtgcatatctgctttttgcggatatcatcatatcgttttaccacctcgtttcatgaaatacgaccgcagcgtattccgtgagttctacggtgtgattataagccccactcccctactatgtaaataggggaatgtgaaaaatcatgtttttcttccaatacaaattgctgtttaactgtgtggtctgggatcttttgtttttcagagggacggatttgcgggggattgttctaaatataagttttttcgatgcgacggaagaaggggggacattctctttctccagaaaaatttacaagtcagcgccgatgttgatttcaggttgatttgacaaaggttttacttttatgctattaacgttacatgatggaactacggcgcagttgtaaatttgttcttccgaaagaaatgtcccccttcttcctgtagataggaaaactataagtaaaagaatgatgtccgcaaatcctgtctgtggaacaaacataaaggcaccagaacctgcagttaaagggacgcctcaaaagcagctacgaatgccatgaactggaataagcataaaaataccctgttaaatcacttgatgataaggccgggtctctatagatgaaaaattaaaggtttaggtgacggttttccgaaattttaaggcttgaaatcaggaaatgtcacctatatagtaaaaattgtttctccagataccagttttttagaaaaagcggtacctggagaagcaatttttgatctatagagactttcctgtatctgaatgttaaattttcaatatataggtaccgcaatggtatcttttacatgaattttattggtatagataccacgatggcatcttttactgaattttattgatataggtatcacgatgatctttcctatgatcttccacaacgacaccgatggtcttcgttctcctcgtctttagattttttgcaatataattcggagtataattcagttcttcaattgctttgagtaccctctgctttgtctcctgactggcatttggtttcccattgataatattggaaacggtcgcaatcgaaacattacagtatttttgctatttctttaattgtaaccataacaccgcctctttcactgactgcataaataatatctttattatatgttatacctgtacctgtacctgcactcaaccataaaagcacaaaaaaacggtattttctataaaatgaaaaaagacccacgaatctctcatgagtctttctccattttagtttttttgcaaaatttatttattttttacagtgactttgcacttatttgtgataccgttagattttacagtaatggtaacttttcctgctttctttgccttgatcacacccttggaagatacggctgcgatcttagtattcgaagatttgtaagttacttttccaatgcttccctttacgcttaacttcgcagtcttaccttttttcagggttactgtctttttgtttaaggttggatttttaacggtaatttttacctgtccacttacaccgttgttagttgcggtgatgataacagagcctttctttacagcggtaactttaccgttggcatctactttggctaccttcgggttgctgctggtgtaggttgtaattccgcttccggatacgacatttgcaaggatattggtcttaccctttacatacagtgtggtattttcgctgacaactgcaacttttgtgtcacgcttgatatagctgatagaagaaccgtccggagtctcaaaggtaaggatggttgcctcacctttctttgtgatggcatacttgctggcctttgtaagtttctcactgtcggttgagatgtatacaccactgcttacatcttcttttccatcattgtcatatgcataaaatgtaaatggactctcggtatatgttccggttccattcggatcgaaatacgtcactccggttccgtccgctttcagttcacaatacatttttgcgtttttatactgcggattgctggcatatgcgaacatatctgcatcccagacacctgctaaaacgctctgctgtgctgcggtatctgcattcttcatttctgcaagattttcggtacagaataaagcaatgcagttttggatcatctgctcgtttttctctgtcagtgcactctttaagataccggagcctacccagtttgcatattttccggtgttgagttttaacagttctgtcagatcgctgccgtaacggaattcaatgtgataggttgttgccggagtatccgggcagaggaatacatacttaaactcatcctcgtttttgtctgtgctctggaatacataaccttccatcacaccgctgagtgcatcttttttcaaaaacttatacgtatgggaaacttttttgctgtcgcttgtggtaaattctactttgccaccgtcctggaaagaaacttcctttacatcattgataaatccacagtaaaatgcatttggatctgctttgtcaccataggtcgtagaacccacggaagccttcagcgtctttacggcttctgctgcagcacttcctccgacaacggctgctgcgtcatcgttccaatacttattgtattttacatcaaataatgcatccttgaacaactggatgtaatcgccttttactgcggtaaataatttatccgccttggagctgtcggactcctctgtcgggatcgttggtacacttgtgttggtgcctgccgccataaccggtgctgcagatgttcctgctaccgtaatggacaataacagtgcgagtaatgctttgcgcatctttttcataattcttctcctttcaaatctcaacagttagtctattgtaactgctgttagttttccattcctatagtagtcttttccatgttccgtgtcaagaagtgattacaaaataacctggattttatcacgcttaaccaatatgaaaatcttccagaaacagaaagaatggaagtctttgacggaatatgctatgccatgatttgatgtgaaattaaatgattctccacttacgattgtgcagcccgatttgatgatggtatgcgatagagataaatagatcaaaaccgttaccatttgcagaaatctctgcacggtaacggttttcatgttattgtttcggatttaccacatttccctgtacaacctgtcctggctcctgtccctttctcattccacgtaccacctgcacatttccgagaatcagataatccatctcacgctttgtaatcttcatgaaattctttcgtgaaatatagtagaacaatacgcccaaaagaatccatacaaccagcgcaataaacgattgtggtgccataaatgccggagaacccggtataatcaaaagtaacaggattgcaaccgagataaagcagcctcccatggcaactgccggatgaatccggttggtatccgtcggatcaccatatttctttaacaatatatatgccccggcacaggtaaagaaatatccaaatgccgttccgacagaacacatatcaactacccagccaatgacttccctgccgaaaaacggacagatgcagcagataatggtaacaaatacgacacaaaatgacggtgtcttatgctttggatgaatttttccaaatgccgaaggaagcatttttgcccttgccatgccaaaaagcagacggctggaagtcatgaaaaagccattcatgccagtgaagattcccatgcatacagcaattgctacaaagcccacacccagtctgcccattgcaaggtcaaggacagctcctgtatgccacttaaccggtgcaccggaagcatctttcatggtaagcacctgctgccacggcaacacactatctgtgacaagtgccatagctccgtaaataagtgctcccacaattaaagccgaaataatcagtttcttacatttctgcggtggaaaatcatattcttctgccgcctgtggaatacagtcaaatcctacatataaaaaaggtgccaaagcaagaattgaaacaaatccaccaccgaaacttttccctcctgccccatatgccggagccagatttgctgcatcaaaggaacctgtcagaacggttccggcaacagaaaccgcaactgctgcacacatgatcaaaaccattgccagctgcagatttccaactgattttgctccccggtaattcataattccaaataatacaataaaaaacaaagataatgccacttctcccatatacacatcatagcctgcaatggtatacagatatccacgattaaatactcccggaaacagatacgacgcaagcaccggaagggccgtcgcgttcagtgcgacaattgacaaatatcccagcgaaagcatccatccacagatataagatgcggttcgtccaaaccctttgtatgcataagcaaactcaccacctgccactgggaattttgcaatcatataggaataactgtaacctataacgatcataagcaggccgccgactaaaaatcccagaaacaaaggtagcggtcctcctgctctctgcgtccagagacctccctggataaaacatccccagccaataattgatcccactgctactgcccagatagagccgggtcccatagactttttcaattttgttcttttttccgccatacggattcctcccttctaccggtatttaatcttcatcctctctggtttcttcactgatcgtatatgcctcttcgatgtctgaaacaaagatttttccatctccatagtggccatacgctccgctcttggcactattgacaataatatccaccacttcatctttttctttatcttccacggtgatatagagcatgctttttgccatttcctgataaagcacatctcctacctgaattcccttttcttttccccttccggaaattgcccatttagaaaatgcaaaataaccgctttcttccaatgctttgatgacatccattactttttccggtcttacaattgctgtaactaatttcatagtagtattctccttttccacttttgtatcattaatacgaaaaagaggtcaggtatcctgtacctgacctcctcgtcatgattattatcttaacacataataactacaaaaacaaactaatttgcaagataccggtacattttatcaagcatttcatccgtaatttccactggattattataaaggtttgggtgtctgctgattttcaccagttccgcaatctgttcttcttccagatgcaggtcttttaaatcgcaccgcagtcccagtttctgtttcaatgcaaaaattgcatcggcaagtgcttctgcatccgcaaatcccaatgcctttgccagtgtttccacacgctctgatccggttccccttgcgttaatacggacaaaataatccagtgtcagcccacatgcttctccatgcggaatatgatatatgttcgtcagtggaaaggaacatgcatgggaagaagtcgttttaggaagtgtgaatgccagccctgcaatgacagatgcctcgcacattttttcccttgcttcttcatccgatggattcttatatgcccgatagagatacttaaatacaagtgccgctgcatgaatcgccagcgtatcacaaatcggctgatgtcccttactccaatacccttctatcgcatgggacaacacatcaattccggttcctgctgtcacagccggcggcatggtataggtcagttccggatcaatgattgctgctttcggataaaatccttccgatacaatcggtgcctttttcccatttgcatgatccgaaagaaccgatacacaggtcacctcacttccggttcctgcggtagtcggaatcgcaatcagcggcaaatgttccgccggaagtgcaacccccgtcccatggtatttccggatagaatcctgtgtcaaagccacgcttgcagcagcctttgcacaatccatcgggcttccgcctcccagggcaaccacaaatccgatatcattctgacggataatttccgcacaggcatccacttctgttacatccggatttggagatacatccccgaaggaagcaaccagcattccttcggattctttcataattttttctgccaatccacttttaaaaaagaaaggtccggctaccagaagcccgcgggcacaccccagttcctgcgctattttttttatttcctgtacccttccttttccaaagtaaatcttaacaggctgtaaataatcccatttcatacgcattcctccggttagtcacaatatttctcatctaccatggtaagaacttcatccagaattggcagatattcctttaattcttcttctgtaataatcaaaggcgggcagatctctatgaaattttcacgtccgaatgttgcaaatccacgcttctttaattctgcaaaaatccatggcatcaccggaccaggtactccatattcctgcatcggctctctggtttccttgttctttacaacttctaaggctccaaataatccaatgcatcttgcctcaccgatacatttatgtttctttaccatctcatccataaacggagctacgatttcatgcatctttgccacatgtccctcgatatcatgctccttataataagtcagcgctgcaacacccgctgcacatgctaatgtatgaccgctgtaggtaagtccacactgcagaacatgttcctcaaaatattctgcaaccgctttacttacaatacagcctccaagctgcacataaccacaggtaacaccttttgcaaatgtaataatatctggtttgatatcgaaattcataaaggcaaatgcttttcctgtccggtaaaaacctgccataacctcatcacagattaaaagaattccatatttatcacataacgcccgcacgccttccatataaccgtctggtggaagaatcactccatttgccccgacgatggattccatcacaatcgcagctacattctgcggaccctcataccgaagctgcagatccagtgcatccagatacttctttgttacttcagcatcgtccactccttttgtatagccatcacggtacatctgcggattcatgaaatgtacaaatccattcgcacctccgatttctgctgcatatcttctccagtcaccggaagcattggatgcaccaagggttgctccgtgataacttctgtagcaggaaaaaatctttgttctgccggttaccatacgtgccattttaattgcattttcattggattcggctccaccgtttgtaaaaaatactctcttatatgtatctgcgcctgccagttctaccagcatcttggcaagcacacttttcggttcggacgcataagccggagccataaaacacatcttatctgcctgctttttgattgcctctacaatctctggaagttcatgtcccagatttgaacataccagcagggaagccatatcagcatattttttcccgtcataatcgtaaaaataaattccctctgctctttccaccggtaatgcatctacaccggattttgaccatgactgcattacgtaatctttgtgcatctgtgcgatttcttttcctgttaaactcataattgtatcctccttcatgctttgaacttttgcttattttttcgataaacagaccatttctttggttactgtaaaatagaaaaagcgtccatctcacagattctttctgtgattggacgcctttgtctgatctgcctttatattagcgcataaaaaaagcagatacaatgtttcaaagtctaattttttttgtacttgagtacaaattctatttgtgaagtatctgacagatgccaaatccgagcataacctgcaaacgattttccaatctggtcagatccatctttaaaatctccgatgccttattgattttatagtttacggtattccggtggacaatcagctcattcgctgtatcctgcagactgccgtcatgccggagatagcattgcaggacgcctgccagatcggtatggtgcagtgcatcatattccagaagcggctgtaccgtatcttctacatacccctgcatgacttcttcgtcttttaatgcaaacaaaatgcgaaacatccccgcatttttataaaatacaagtttatgccggccgcagcattgttcgcctggaatatttcccataactgctacatctgccatctgatttgcggtctcataacttttatacagccggcgaagtccttctgcctggtttcccacacaaaaaagggcagtctccccttcttttagttcctgacaaaaatgttcaaaaatataagtcagcacatcttttttctctgtcccggtataatcgcataaaaccagtaccagctgtttttcctgcgcacagcaaagtattcgcttataattacagcgcaaatggctgctcagccgcgaataaagctgctccatacgctcgccttccactgtatttttctgcatcttcacccggatcgtaactgctgtataaatactgtctaccatataccccttcctcataagtggaacggtatacaattcttcttgtgccggacacaaaaatgcattattaagtgctgcggatacctcaatccgactctgctgttcttttgtgatgtcaaaacagataatccgcataatttctgccatgtggattttccacggcacttcaaataccggaaacgctttttcatttgcaaaatccaaaacatcctgtccgattttctcaacataaggtccaatattgatcacaatcccgctggctccgttgcgatatacttcctgcacaagccgaagcagcggtaacttctcactgattccgattcctgtcgtaaaagtaagttcctgcccctgtaaaaaagcagaaatggtatcactatcgaccatatgggtccaaaggacttcccgatccagccctgcttccccagcaaccagtttcatctccagatgtttcacctgttttacaatctctctcaacgtaatactcatgtttcccccgctacaatatcaatgataaaccggataccagaagaagtacatacgtcaggttcaaaaagactttctgagataccttttttaccagtttcttcccaagccaggtcgccataaacaaaggaataatactgattaaaattaacctgatatttccctctgtaaaaacgccctgccgtacctgtgataccagaagtatagaatttaacaccacccataccggtgcaagggttgcgcggaattcttccttctcttttaatacctgtgctgcataaacaacaagcagcgcccctccggagacaaacattccgtggatcactcctgccagtaacaaaataaccagcaaaagtgctttgggcagggtacgctgtctgtgacacaacagatttttccctgcaatcaataggataatcacaccataaataatcagaagtatctgctcggatggcactgttttacagatctgaataccaattgccatgcctgcaaccatacatacgcagatctttataacttcttttttattcatatgatgataactcatcactgcaatcatcagtccggacaacagcgccataacattgagcaccacctttgcgttatccataccaagcagatatatcgatggcggcatggcaagcactgtcccggcaaatccggtaatcgcctgaattacatttgcaacaaacaacacaaataaaaaaataatctctttcatatcatttcctcttttggtgttgtctgtttatcgtacaaaaataagcctggattcattatagcattcactgcttctgaaatccagacttatgtttcgctattctgtttcaattgttccaccgcacagcacatgatcgtcctgataaaagacagcagcctggccaggcgtcatggcacgctgcggttcatcaaactgtgccagcagtgttccgtccggctgcggatacagcgtacacggtgcacctgcatgcgagtagcggattttaccgatagccttgaccggcccggtcaacttttcttctgccatataattgatattatccacatgacagtcacgagaaaacaggctttcggacttgcaaagcacgacttcgtttgtctgcgggcgaagttccctgacaaaaataggcgtggatgaagaaatgccaagacccttgcgctgcccgatcgtgtaatgaatcagcccgcggtgctgtcccataatgtttccttcttcatcgacaaaattacccggtttgctttcttttccggtctcctgtgtaataaaagaggcataatcatgatccggtacaaaacagatatcctgactatcatgctttgtggcaaccggaagcccgatctcctctgcgatctggcggatatgaggcttatcataatctcccaccggcatcagggtacgggaaagctgatcctgtgtcagattgtaaagtgcgtaggtctgatccttcgccgctgtaacggaattgcggatcgtatagcggccattcggcagctgcatgatacgcgcatagtgtcctgtggcaatataatccgcaccaatctccagtgatcgatgaagcagtgactcccacttgacataacggttgcaggcgatacacggatttggtgtacgcgctttttcgtattctgacacaaaataatcaatgacatatttgtggaaatcttccttaaaattcatcacataataaggaatttccagacgctccgccacgcggcgggcatcctccactgcagaaagtccacagcagccaccttcctgtgactgcacaaagacatcctcatcctgccagatctgcatagtgacaccgattacatcgtatccctgttcttttaacagataggccgccacggaggaatccacacctccggacatgccgacaactactttttctttcatttaatactcctcttccggagcctcttccttctcactgatatcattgaccggacgctctaatccctcgatcttgatattgtgtttctctgcataatcccataaagcagcatgaattgcttcctctgccagcagggagcaatgcaccttcactggtggaagtccgtcgagtgcttccataacggccttgttggttacctgcagtgcttcctggatcgtcttgccctttacaagctcggttgccatactgctggttgccactgctgcaccgcagccgaaagttttaaattttgcctcctggatgatgccattgtcatcaatatccagatacatacgcatgatgtctccgcactttgcatttccaacagtaccaacaccacttgggttctcaatctctcctacgtttcttgggttattaaaatggtccattaccttttcgctgtacattttgtttctctccttctgcaaaatattctatccgtttttccgcacaaaatcctcatacagaggagacatgctgcgcagacgttcgataattgccttcaatttatctaccgtataatcaatatcttccatggttgtcttctcggaaagtgtcagacgaagacttccatgtgcaatctcgtgtggcagtccgattgctaaaagcacgtgtgacggatctaatgatccggatgtgcaggcgcttccgctgctgccacaaatgcccgcctgatcgagaaggatcagcatggattctccctcgataaaccggaaacagaagtttgcattatttggaagacggtcggtacggtctccgtttaagcgggtgtacgggatctctgcaagcacacgttcgatcagatgatcacgcagttttacttcatactccgtgttcttttccatattggcaactgcaagttccgctgcttttccaattccaacgatacccggaacattgtgtgttccggcacggcgctgacgttcctgtgctccgccgtgaatgaaggaacggatctttacgcctttgcggatatacatcacgccgattccctttggtccgttaatcttatgaccactggcactgagcatgtcgatattcatctcgtccacgttaatcggtacatgtgcaaatgcctgtaccgcatccgtatggaacagtacgccatgcttctttgcgatcgcaccgatctcttttaatggctcgatggttccaatctcgttgtttgctgccatcacagagatgagaattgtatccggacggatggctgcctcaagctcgtccagcttaatcttaccattttcatccacaccgacataagtcacttcaaatccgtgcagttccagccactgtgctgtgtgcaggatcgcatggtgctcgatcgcggatgtgataatgtgctttcccttgctgctgtatgcctctgcggttgctttgagtgcccagttatcggactcgcttccgcctccggtgaaataaatttcctcggtctttgccccgatcacatctgcgatctgctttcttgcttttgcaaccgcacgctccgactctcctgcaaagctgtaaatagctgccggattaccgtaatgctccgtaaaatacgggagcatcgcatcaagaacttccgggtatacctgtgtggtagccgcattgtccagatagattaatttactcatactcttcctactttcttttcttttttaataaggagcacatcgcatgagatatctcttcgagatacctcatatcacataatccccatttttttctctctgccagtcaaccagatcctgcaatgtgatatgatccacaacactgcagatggcatcattgatctttttccagagaatcagggtaacacattcttcccgtttctcacaggcaacatcgtctccctcgtcgaggcatgcaaccggtgccagcgatccctcggtcaggcggagaatcattccaacggtatactcctccggtgctttacgcaacagatatccaccctgtgctccacgcacactgcgcacataaccggcgcggtttaatacggatatgatctgctccagatacttgtcagaaatctcctgacgtctcgcaacatcttttaaactgataggtgctcctgtgttgttcaatgccagatccagcatcagtctcatggcatatctgccttttgttgaaatcttcatgataatctatctcttctttcttaaaaaaatgtacagcatttaaagcttagtattcctactaagttactatacattggtaagatagatttgtcaatctattatcaatcgatatttttcctgctttctttgcgcatttgtttctggcggtacatattctgatcggcaagtgacagatactcatctatagtctcttctccccccgcaaacgtcagctctacaccgatactgatcataatgttttccttggtcagccggctctgcacacgatccgtgtactgttgtgccttttcggaagtcgcatatgggaaaaatccgatgaactcatcgcctccgtatctgcatacatatccctgctgtgggcattcctcctccagaacctgcgcaattcttatcagtacctgatctccaaattcatgtccatatgtgtcattcacagatttaaaatcatccgcatccacaaagacaagcgcacatgctattcccttttcctgatactttgcaaatgccggacggataatgtccgtatacgcaatccggttacagataccggtcagcggatccctgttgtacagcatctggagtttgtttgctgcattctccagctgtttttgcttaaactgcgtttccagtgtctttacaatcgtgctgtgaatgtcataataatatggattatcatacagaaagcgtccgtttttcattaccagatagccaaccgactgttcccggaaatgaatcggggtaaacagataggcattctgacttcctgtttcttccagatggcggttcagttccccgacactggcaaatgccattctcttatggttctcaaatccatctgccaccacaagattcttttcatcatagccttccaccggaaaatccgtatcctcatcggccgcaaacagcttgcggtccaccacaaaatataccccgtcacatctcagtttctggaaatagtcaacaatatattcaaaaatttcccggaaaccattgcaccttgccatctgcgcttccaattccacgagaagggaatcatcctcatcttttttgactgcggcgacaatcttttcctttatatattcacggtaatttaccatgccgttattcggacagccacaactttctccgtaaatacaggtaaccggaatatagttgcgttcttccaccggttttccttcccagatacggagcagtacatccacacaaagctttccgatctcctcccggtcctgaaatacagtcgtaatctgcggacggaaataggctgccttatccagattatcaaagcccgtcaccagaaaatcgtccggtacgcggtacccccactgttctgcctctgcacagattcctgccgcaatattgtcatttgcacagacaaacacatccggaagtttcgagccgctatggacatactcccgcatatagttcacgccggtctcatagtcgtaatccccacataaaatcggattgtcatccaatgtcattccatattttttcaggcattcgcagtacgcagcaacacgttcaaaatttccgaaagcatcttccgggcctccggcaaaaacaaatctgcggcatccatgcacttcgtataaatgtgtcataagttcacggatcggacgccggttatctgcgcctacataataaaatccgctgatataccagtccagggaaagaaccggaaccccgcaattctgcaggcgttctacaatcttttctttttgccggacatccacaatattgcttccatccagtataattccatcaaacgctgacagatccggcagattataaatattatattcgcccgtattatgcaatgcatctttgctccaattgccataacaattgtactgatacaaagcaatatcctcatccagttcccgaattctccgaatgattccatctacccaggcatacgtgatcatccggcgccagccgtctgatatcaatgctatttttttcaattgtcctcccccatataccaattcatgccgatatgtttaatttatcacaaaaaaccaaaggcttcaatgctgttctatacaaaaaacatgtatcctttgtgatttttcactttttatgatatgataggagtctagactttagaaaagaggatattttatggcaaaaggaactgctgggaaaaactattgggcacttcttttgatgattctcgcaggtgttgtactgggtggctttatcggtcagcttagtgccggtgttccggctctccgctggctgaattacggacagacctttggtctttccaacccactggtacttgatctgggaattctggtgctcacatttggattaaccataaaaataacgatcgccggcatcatcggaattgtgctggcgatcctgatttatcgattcctgtaacaggtgcttatttcaggaaccgctcgagactgcgcatatgctccttcatcgtctcccgtcccatacggtaggcggcaaggagtctctgccggtctctttctactttgctgacttctatctttttgggtggacgaatgacaaacaattccccacgttcttcttttccccggatatattccagttcttcgttgtaatgctcatgccggtgttccatggcatcaatcatcgccggatacctgcgaagcgatactttcgccagcggcatcagctgattcttttttttcacataatcccgcggctgcgtcagaaccactaccgttttatcaaacccaagttcctgcattttctgcaccggaatggaatctgctacgcctccatcaagcaattcatatccatccacgcagaccggctttgacacaatcggcatggatgccgatgctctcatccattccatttctgtcttatcacaccgatccacttttttgtaaagagctttcccggtttttgcatctgtcaccaccacgtaaaaatccatcggattcttgcggtaagtctcataatcaaacggatcaagatgctccgggatatcatgataacagaactgttccccgaacatatcccctgttttcaaaaatgtgcgcagtcccgcatactgcggtttattacagtacgctgcattgtaacgaatgacacgtcccggctgactagacttataattacagccaaacactgcccctgctgacacgcccatcgctccgtcaaatgttatctgatgctccatcatcacgtcgatgactccggcggtgaacattccgcgcatggctccgccttccatgaccagtccttttttcatcatcgaatcccttctttaaataagcaatactttttgattctatcatctgttttgtattctagctttctttctccatgatttcaaggggcgaaaccatgattctaccttaacatttccttatttttacataatcccgctttcttctgcccaaactaataaatatttgtagaggaaaaggagtatgccctatgtatggttcactattttatgtattgcccattctggcagtaattgcaaaaactgttttccgcgcagtccttcccttactgatcggctgtatgattgcctatgtagttaatatccttatgtgtttttacgaaaaaggatatgcaagaatatgccgtatggcagccattgcgcccttacaacgtcccctatgtatgacactctcctacctttcgcttgtgcttgtgatcctgatcttatggtggatgatcgtccctcagctgttatcctgcatccggatcatcgcaaccgatttcccccaggttttagaattactgtgtgagtgggcaaacgaacatctgcaaatggatcttggcatgggaaacgaaatccgggcatggatgaatgaacccttttgctgggatacactgattgtaaaaatcccccgtctggcaaaaggcatgaaaacttccctggagaaacttggcagctggcttttaatttttctgccgggactgatgttttctttttatctgcttgctgccaaagaatccctcttacggatgggcagttccctgatcgaccggtgtttcggtgttttccaagggaaaaaaatacgttatgtactgacggttctcaatcagtccttccatcattttctggcagggcaaaccatagaggccgtaatcctcggtatgctttgtaccatcggcatgtggattcttcggcttccctatgctgccatgatcggttgtctggtaggtgtaaccgcactgctaccggtcatcggagcttatatcggtgccgcagccggtgcgtgtatgcttcttacggtttccccggtaaaagcactggtatttcttatctttttaacaattctccagcagatcgaaggcaattttatctatccccgtgtggtcggacattccatcgggctgcccggcatctgggtacttgccgcagtcattgtcggcggtggggcattcggtatctggggaatcctgtttgccgtgccacttgcagcagccatctaccggctgctccgtccctcaatcaattaaagccgtgcagcaagctgcacggcttcttaaaaataagcagaaatcaaatagagcttacgctctctgtgttttttaaactaaatggaaccagttcatgtgtggccggtttgttgagatcaatcatgccaaacaacagatcaatactttttctggcaatcttttcatacccctgacaaaccgtcacaatctttggattataataatctgcaagaagtgttccgtcaaatccgatcaccgagatatcctccggtacccgcagacccgcatcaaaaattgcgcgcatggcaccaactgccatcacatcactcatggcaaaaaccgctgtaatggatctttgggaagccagcatccggttcatggcattgtatgcactctcatatgagaaccgcgctaccgcataactttcttcctcaaattcacagccatgttttataaagctacgcttcgctcctgctttacggtatttacttggggaagataatgccatatctcccccgataacagcaatatcgcgatgtccgtgatcaaacagataatcaaccgccatctccgcagctgccatatcatctgttgaaaccgatgcaagattccgaaatcccagtttatccgcccgatctgtcaccagcacacacggaacattgaccagttcaaattcttcatgaaagtactgtatattacctccaaggaacaaaatccccattggcttatgttccctgcacatccgcacagcctctttcacttcatctgcatcttcatccagataatgcacccgcagggaataatccgatccctcgatagtatcctgaattacctctatgatatttgtaaacagcatattcgaagtaccttttacgagaatcagaatactctggctcacggtctgttttaaatgcttggcattgttatttggtacaaactggtaagcttccacaattcgcataatgcggtcacgggcttcttcgctgacatctcttcttccattcaggacacgggaaaccgtactgacagaatatcctgcctctttcgcaatatctacaattgtcattccttcacctcgtatatacagacgaaaggtctattttctagcccttgacagcacctgcaagaactccttctattatatatttctggcacacaatataaaagataataattggcagaattgcaagaacaagtactgccatcatggcaccccagtcgatctgtccatgactctgtttcagaaactggattgcgatcggaatggttttatacttattaatattcaacaccagactcggcagaaggtaatcattccatacccacattgcctcaaggattgctaccgttaccgtcgttggctttaaaattggaaaaaccaccttaaaaaaggtctgtaatggtgtacatccatcaatcattgcagcttcttcaatttccagggaaattccctttacaaagccggtaaacatgaaaacggccagccccgctccaaatcccagatatacaacaataattccaagaggattggacagatgtaaaaggtttgcaaattttgataacgtaaacattaccatctggaatggaacaatcatggaaaacagacacagtacataaattgttttcgtcacttttgtatggactctggtaatataccatgcacacatggagcagcagataataatcaatgcaaccgagcctactgtaataaacagggaaatcccaaaactgttccagaaatttgtcttacggataccgttggaatagttcagccaaccacagaatgcacgttcaacaccatggataaatttatcccagccagcggaaagcggctctgttccaagtgtaaacggatgtctgaaaataaaggcttttcttttaaaggaatttaaaaggactaccagaattggtgcaatccataaaatgctgataaccgtaaatgccagtgtccagatccagccatgttttgcctgacggacagcacttacctgattgttattctttttagccattagtcctgcacctccttgcttgtggtcagtttattctgaatcagcgcaataactgcaaccagaataaagaagataaccgctttggcctgaccaacgccctgccatccggtcgtgccgtacattgtgtcataaatatttaatgccagaagctgtgacatcttagccggattaccaccggtcagagcgaagttctgatcaaataacttaaatccattggtcagcgtcaggaatgtacaaatggtgatcgtcggcatcagcatcggaagtgttacatgccggagcagctgccaggaatttgcaccatcaatctttgccgcctcgattaattctcccggaatattctggattcctgcaatatagataatcatcatatatccgatctgctgccagcatactacaataatcataccccagaacgcataccactgtgtggatacgattgtcttggagaaattggataatacgctgttaaaaatcatcagccagatataactgagtacgataccaccaatcaggtttggcaggaaaaatacggtacggaaaagattggtacccctgatgcctttggtaagtgccatcgcaatgagaaatgaaatcacattgatgatcagcaccgatacaaccgtaaataacgctgtataccataatgaatgaataaatgttgtgtctaactttccgtttacaaaaaagattctcgaatagttctgtaaccctttccatttccagtctgtaacggttgtgaacttacaaaaagataagaaaattccatatacaaacggtacaataaatccaattgcaaatgcaatcattgtcggaagcagaaaaatcgggaaatattttttaattgctttttccataatacattcctttcactaactgcagcccctgccagtaccagcccgcactgcaggtgcttctttaaaaaaaggagtaagcggcatgccacttaccccttttcccatcatctttgattactgtgcatcatcttcatgggcgatcttccactgatttgcccatccatcaacaaatgcggtctttacagcatcccactcaccttcacctgcggtataggcagtcagggcagaaacaacatccgctctccagtcatctacgtttggagtagcattgaagctccatgctacagatgtttttccgtcagtcattaacttgtttgcagcctgtgcaaatgcattctttgtctcgtaatcacctgtaaatgtatcatatggagcagtaagtcccatctgatttgtaatggcatcacgtccctcgtcagaagtgattacccagtttaagaactcaagtgttgcatcaatatcttcctgagatgcctttgcgttcactgcccagtagttctcagtaccaacacaaagtccttcattctcatcatctacaccaaagtaaattggcatcatggataagtcatctgctgtaacggcatatccgttctcctcgtttgttaacggagagaactcccagtcaccattctggtagaagactgcctctcccataccaaactcagattctgcgtttaatgcaccggaatttaatgtcttaggatctgctgcggaatcagatacatacatatcccatacatttttgaagttatcaagataagttcccttaatggactcttcaccggctgtaaggtcacatccatcatccttgaactcatagtacagtggcatatttgcaagatgtccggcaaatctccaggaagatccgtcatccagtcctgcggaagcaaatgcctctgtcaggtcagttccaagttccttattgatgtcatcaatacgggaattgatgtcatctgcaactttctttaaagtatcaaagttgttaatctcatctaccgaagaaactacagcaccatccatgccacagtatccttccagaattgtcttgttgtagatcaggccgtagcactcatagcagtttgcaatggcagctaccttatcatcatagttgattacaagagacttatctgtcaagtgcttataaagttcagagtccttcaggtcatatgtataatcgttccatgtctgtgctgcggaagaatttcccacattgaagatggtaggtgcatccgactttgccatctcggactgtaatgttgtgttgtactgtccgtctgctgcagtaagcacatttacctctacaccggtctgatcggtataggtcgctgccagatcctgccaggcttcgtctgtctctggtttaaagtttaacatgtaaacctttccagaactcttgctggtcttgtctccaccctgtgtggatgtgccacccttatcgcttccgcatcctgcgaatgctgtgacaaccattgcggcaaccattaatgctgatacaattttctttttcatattttcaccctcctgaaataaatacgttcgtagcgttaccgttcatacggcagcccctgattgaaaacgttcacggcaatgtttccggtaacgttttcagtaagcagagtatacacctattttgcacagtttcgcaagtgttattctcatttttgtgaaataagtaagttttcctctctatttttcgtgcatattgcacaacgcttttccctttgcttgacatgtataggctgtcgatatatactttcatgtatagactgtctatagtacttatcactgaaaggaggtcatataccatgggtattgacaaaaatctcgtacagggaagcatggcattgctgcttctgcgccttttggaaacgaaagatatgtatggctacgaaatgattgaagctcttcgcagcaaatccaacaacgtctttgaactgaaagccggcaccctgtacccactgctccactctctggagagcaagggctatgtgcggtcctatgaggatgcctcttccgggaaaaaacgcagatattaccagctgacagaggccggtcggcatcattcttccgaaaaaaagcaggaatggatggcttatcaggctgctgtaagcaatgtgttaagttttgaaggaggaatctgatatggaggaaaaagaatatctgcagaccctgggcgaacagattttaaacccacatgcacgtacccatgtgctggaagaaattcaggaacacattgacgaacagatgcaggattatatagatacaggaatgtctccggacgcagcagaaaaagaagctgtccggcagatgggagacccggttgcagccggcacggaattaaaccggatccatcgtccccggtttccgggtgttttgttcggcattgcggtggctcttacattatccggaattttcatgcaatatatcctgtatggttctgaaccacttaacaccacctattccaacaccgtgtttatgcagcatgccgttttctatcaggtgattggcttcggcattattctgtttgggatgttcagcaattacatgtgtttatcaaaatacagctggtttttatacggtctgtttttgggattcgcgctgctcgcctgcttctttccgggcacgttctctttctggcagacccgtacctttagctattatctgtgtctgctgtacccactgccctatgcactgctgctatactccaaccgggaaaaaggatggaaaaccattgtctggctgcatgtgctgtcactcctgtttttcggagcgatcctaagccacaccagtggttttgtatggccgccggttctggcatttgtttttctgtccgtcctgctgtccggaatctgtatccaaaaaaggattctgcccggttccaaaaaggttctctggtgctggacacttcttccttatatcggaatcgcagctttggcaggcagcctgtttttacgtccgcaaacctatctgtatgaccgcctgttgactgcactcggactgcagcatactgacgacggacctggctttacgagacttgccctgcagtatgaacagacacgtttttccctgttcggtggaagttctgtcagtgaccgtcttccacgggaagaactttactctacctatctgctgcacagtatttttctgtggttcggcattgcggccggcattttaatcatcgctgcacttaccttttttgcgctgtacagcatgcactgtgcgctgcggcagagcaaccgtctggcaatgctgcttggtactgctgccagcggagtccttctccttgagctgttcaactatgtactgacgaactttggcatcaatctgttttataccgcctctgttccgttcttatcttacggacttaccggcacagttgccaattccattctggtggggattctgctggggatcatccggaaccggaatgtattgtatgaaaaagaatccggcccagccgtgattccggatactggaacggtttaaacagcaaacggcatagcctgtgatccctgcaatatgtaccggatcacagctatgccgtttttatcttgttttatttccgtagtaaaagaaaaatcgggtgagctggcggcttctttgccaccggatcatccgattttagtatctgcctgttacaaatcgcaggaaggataccggtttgcgtccgtagctcttcgtccgtttcacgtaatccttgtaatactgaactacctgagcaaaggacatggttggatcgattgcatacatcatcgatacacctccttttttattttggtgtgcgcccttctcaattatcttatgtcatatgggctgatatgttcgaaatgattttctcatttcttgtatacattataacaccgtctttggtagtattcaacaaaaataacgtaaaatttttgtgcaaatcacatattgcttttgtaaatattgctcataaataaatgttcccgcaacaattctttctgcgtcctctctgctgtccagaaaatattattgcctgtgattacagcttttagtgcaattggttccacacccgactttttatattctgccagaaatacatccacctgatccgaattcatttccgaaaaaatcagcatttctgccggaaattccggaccatcatatttttttgcctctctggtaaatccctgtatctgcgccagagtgcccagtttctgggaataatccttgcgggcaacatctatgatacggatgcctaatgtcctgcatacattctgaatcactgcgtatttatcccggtttatacgaaaaagtaatattgtctgtgccataattttctccctgctgattcgctgccttatctgtgtctgttttcatcagactccaaactccctgtaatcctccggcaaaaaacgatggtaaatgatatggattccctcatccttaaaacaataataatagggatcttcctcatcctccgcaaaccggaacatccagtcgaattccccattttcgatcttctgacattccacatgggacgaatgtttacagaacagttcctggatctcctgtatggtacagccatgcctgccaaccagttccaccagttcccggataaattcatccggcttttcatgctcatggacatacacacttccctgttccggaatataaaaacagaaacgctctttttttgccgtcacacctacatccccgagtttttcctgccaggtttccggcagatgctgcaggcgatgaagcatttgttcttctccctcctgcacgtcaaaaaagtgattcagagaggacaggggatagtataaccggatggcttcttttcgaaatcccagttttgcctgttcctctttgatcgtgtccgtcagacttttttccagccgctcgtatcccatcctgtcctcctgtatctatagctgcatgataaaatctgctttaccgatcctgcagcagaatctgccgtgtcttgggatcatccggcggcagattgcagtgcaggacatgaaatcctccggtctgtgacccttcaatcacattgattgccccattgtagagtcttgtctttccggttccgatctcatgattcgtaagccctgccagaagcacattgattgccgctccatgggataccgcagccactgcctgatgccccgttgccgcaagaagctctatcgcacgctccatgcgtttctgcacatcggcaaacggctccattccttcgacatggtcgcctgccgcaagtgcaaaatactcttttttatcttttaccagttgtccggaaaacggaccaagatcccgctcaatcagctcctgcatcggctctacaccgtctctgcttaacccgatctgtgcagcaatctcctcccctgtgcagtgtgcacgtttcagtgggcttgtatacacagcttctatccccagtccctgcagcgtctgcccacagcgcacggcctgtgcaatccctgcctcattcagttcaatatcttcccttccctgaaatcggttcacatgattccagtcggtctctccgtgtcggatcaaatagattttcatttcttatgcttaccagcctcaaaaaatttctttgtttcatatacaaccacaccatttaaggcaaacagcgcgatcatatttggcagtgccatcaaaccattaaagatatctgcgatggtccagactgcacttacggtcatatacggtccgataaatactgccagaatataaatccagcggaacaccattacttttttcatatttccaccggtcagatattccagacatctctcactgtaataatcccatccaagaatcgttgtaaaggcaaaaaataccagacacatcatcaggacaaaagaagataccgcatgagggaacggaagtccgttctggaacgcatatgtagtaacctgaacgccctcgagtccatccacctgccatgctccggtcagtacaatggaaagtccggtcagtgtacagatcacaatcgtgtcaataaatgtacctgtcatgctgacaagtccctgacgcaccggctcatgtgtctgtgctgctgccgctgcgatcggcgcactaccaagtcctgcctcgtttgagaaaatgccccttgcaacaccgttttgcatggcaacaaacatactgcctaccacaccaccggtgactgcacgcggatgaaatgcgccctgcacgaccgtaacaaccgctgctgggacttttgtaatattacagataattaaaatcaatgcaaatacaaaatatgcaactgccataaacggaacaacaatctggctgacacttgctatacgcttgattccgccaatcagcacggcacccacacaaaatgcaaggatcagggaagcgactacaaccgtccaggaataagttccaattcccggaattgccacggtatgaaccttattcggatcaaaaaagttctggatggcactggcaataccgttcacctggctgaatgttccgattccgaacagacctacacagactccaaaaaaggcaaaaatctttgcaagccatttccatttcggtcccattccctgttcaatatagtagaacggaccacccagactgtgtccgtctttgtcaactacacggtatttgatggcaagtaatccttcggaaaattttgttgccattccgaaaaatgccgccacaatcatccagaacaatgcccccgggccgcctgcgcataccgcagttgccacaccgacaatgtttcccgtaccgatcgttgcactcagtgccgtacataaagctgcaaaactggatatttctcccttgccgccctcttcatttttgaccatccacttgagtgccagcggaagcctgcgcatctgcaggactcccagacgcacggtcagtaagataccgccgcagaggatcaataccataagcgggactccccagacgaagttgtccacggtctttaaaaatgcattgattgttgtccacataatttttctccttattttcctttttcaaaaggcttttcctgcgtacaaatgtgctttgtacgcgcacattaaaaattatacgcaaaacaggaaataagtgcaagaaaaaaatcttttttgtcggtgaaaacataaaattctgttgctattttaaatcagaaaaaatatactataagaaaaacagatcagatttaagggggaattttccatgaaaacattcatcggcacaggtgtgggacagccggaaactgccgtgcatcaggcagtacagggacttacatccccaagtgcaattctttttatggcttcttatgaacatttcaaagaaactgcctcacgcttaaaagaactttttccggatactccgtgtatcggaacgatcggaaccaaactcgtaaacggacaggtgaatgattccggtcttgcggttcttggatttttttctgatgtgaagatccgctgtggtatcatcaccgaagccagccgttgtccggttgcgggcacaacgcagcttctgaagcagattgcagagatttctcccggcacagacgatacggtatgcgtggaatattgtaccggctccgaagaaaagctggtaaccacgtttacatcctgtctggaaacaaagggcatccatctggcaggaggcaccgttttcggtgtcccggacggcaaacctccggtcgttgcatataacggagaattatatgaagatgcctgcgtctatgcactgatcaaaaatacaaccggaaaaatacgtgtatacaaagaaaacatctatgaaaaaacatcggctcagagtcactttgccacaaaagtcgatgtgtcccgtaaagcactcatcgaacttgacggcagacccgccgcagacgtatacagcgcagaacttggcattccccgtgataaaatcgttgacaacgtattggtcaatcctatgggacgtgcggtgggcaatcaggtttttatctcttccatgaacggaatggatacagacggcacactgaccaactacaaacgaatcaataaaaacgactgcatttatttcttaagcctcggtgactacaaagcaacagaacagcagacacgccagcagatccagcaggacgcatcccatatttccctggttttatccattgactgtatctaccggtatctgctctacgaaaaagagggatatttttctacatatgcaaaagacatggcagttctcggaccacaccttggcattgtcggcggtggcgaacagtataataaccagcatgtaaaccagacgatggtctgcgtggtatttgaataggaggaactttttatgtttggaaaaaagaaaaccacaggagccgcaacacctgttccacaggtttccaataaaaagaaagtagaagattatctgacatccatgtcttttctcagccattttgtcattgacaaaaaggaatctctcgttgaagaagagatcaagaccgtgcgtgagattgataaagtaaaagactcttacaccgacgtcattgaacacaatgcctcgatccgcgaagctgttgattcccttcaaaaagaattcggaaaaatcggagaaatttccggccaatttacggatgtaatcaccgatgtgaccagcgtatccgacgacgccatgcaggatatccgtgatcttaaagaaagctcagccaaagtggaaacgcagttcgcagagattcataaaatctacgatgagtttcaggctcgctttgatgaaatccgtgctaccatgcaaaacattgtcggcatcgcaaaccagaccaacctgctggcattaaatgcttccatcgaagcggctcgtgccggtgaacacggaaaaggatttgccgttgttgcagatgaagtcacaaaactttcgatcggcatcaaagaactggtgggtgatgtaaacaaaagtatggaaggtttgcagacaagctccgaaaatctgacccattctctgctggatgtacgggatgcactggatgcttcccgcacacagatggacacaaccgaaaatatcttttcccatatcaatgattctgtgtccggcgtagaaaatgttcaccgcggcatcaatgaggttgtggaaaactgcagcggacaggtggatcagctccgggaagacatggaagcccatgaaacccgttatgcccaggttcagtccgatattgacggcttaaagagcctgatgacagaaaagggatttatctatgaggacatttccaatatgatggaacaggctgatccattgatcgaaaatatcaaaacggaattaaacaaataaatctcattattccccatcttctgcccagagccgtgcgcaccgcacggctctctgccatcccctgagcagctttttgcgctccccagagtccattaccggttcaaaccttcgtcccagctgccagttttcccggatttcatccctgtctttccagtaacctgctgcaagtcctgccagatatgccgctccgagtgctgtcgtctcaatacattccggtcgaagcactgccgcatcaatgatatctgcctgaaactgtacaagcatgttatttgcactggctcctccgtccacacgcagaccattcagcgtcacgccggcatcctcttccatggcgtgaatgacatctttcgcctgataggcaatagactctaatgttgcacggataaaatgttcctttttgcatccccgtgtcagcccgacaatcgttccgcgcgcatacggattccaatacggtgcccccatgccggcaaatgcaggaacaatataaacaccattggaatccgggactctcttggcatattcctcggactgtcctgcggtacggatcatacgcatcccgtccctcagccactggatggccgcccctgccacaaaaacacttccctcaagtgcatattccacttcccctgcagtacccgcagcaatggtcgtaagcagtccatgtctggaaatgattggttcctttccggtatgcatcaaaagaaaacaaccggttccataggtattttttacatcccctttttcaaaacagcactgtccgaacaatgctgcctgctggtctcctgccacacccatcacaggaattttaccgccaaaaatctgctcctgtgtctctccgaagaaaccactcgacggccgcacttccggcagcatttctttgggaatgcgaaacagctctaatatctcttcctcccagcagcatctgtgtatgtcaaacaacatggttcttgccgcattcgtataatccgtgacatgcaccgctcccttggtcagattccagatcagccatgtatccaccgtgccaaacaaaagttcccctttttctgccgcctcacgcgcgcctttcacatgatcaagaatccatgcgatcttgcttgcggaaaaataagcatccggcaccagacctgtccgcttctgcagcatcggtccatatcctttttctttcagttcatcaatctgttctgccgtgcgccggcactgccagacgatcgcattgtatacgggttccccggtctttttatcccagacgattgtggtttcgcgctggtttgtgatgccaatggcacggatatttttggatgatgccccgatattcgccattgcctctatggcaaccgacatctgggaggaccagatttccctcggattctgctctacccagcccggctgcgggtaaatctgtgtaaattctttctgtgccatcgtgacgatttttcctgcatgatcaaacaggatacagcgggaacttgtcgttccctgatccagtgccataatatattctttcataatctgtaatccccccatatgattttcctatagcttttctttttcctattttactgcatattcccatttatcaccagttcattttctcgtcaattgtggttttaacaacatattttccatttgctttctgataaattacttcttgcttacaaaataaaatcaaaggagtatcttattatggaacataaaatgttttgctatcagtgtcaggaaaccgcaggatgcagcggctgtacccagatgggtgtctgcggcaaaaagccggaagtagcagctatgcaggatctgctcgtctatgtgagcaagggattatccgcggtcacaacccagctgcgcaaagaaggaacaaagatttcagaagaaaccaaccacttgatcacctggaatctgtttaccaccatcacaaatgccaacttcgacaatgaggcgatcatcgcacggattcataacactctgtccgtgcgccgcacactcattttacaggtaaaagatacctcaggtctgccggaagctgctttctgggatataaaaacaaaagatggctctgacgcatcggatgatgtgctctttgccaaggcaaaagaggcaggggttctctccacaaaagacgaggacatccgcagtctgcgtgaactgatcacttacggattaaaaggtttgtccgcttactccaagcacgccaatgtactgctttcggatgatccggaaattgatgccttcctgcagcgggcactcgctgcaacactggatgattccctcacagccgatgacctggtcgcactcacactggaaaccggaaactatggtgtcagaggcatggcgatgctcgatactgcaaataccagtgcctatggcaatcctgaaattaccagagtgaatatcggtgtgggaaaaaatccgggaattcttgtctccggtcatgatttaaaagatctggaaatgcttctggaacagacacagggaaccggtgtagatgtgtatacacactcagaaatgctgcctgcccactactacccggcattcaaaaaatatccgaactttgtcggaaattacggaaatgcatggtggaaacaaaaagaagaatttgaacgtttccacggaccaattctgatgacgaccaactgtattgttccaccaaaggacagctacaaagaccggctgtacaccaccggtgctgccggctatccgggatgcacacacattgatggcgaaatcggtgcacagaaggatttctcggcactgatcgaacaggcgaaacactgttctgctccggaagaactcgagcacggtgaaatcattggtggctttgcccacaatcaggtacttgcacttgccagccagattgttgaggccgtcaactccggcgcgatcaaaaaatttgtcgtcatggcaggatgcgatggacgggcaaactcccgcaattactatacggattttgccagagcacttccaaaagatgcggttattttgactgccggctgtgccaaatacaaatataataaactgaatctcggcgatatcaacggaataccgcgtgtccttgatgccggacagtgtaacgattcctactctctggctgtgattgccctgaaactgaaggaagtattcggtctcgatgatatcaacgatctgccgattgtctacaacattgcatggtatgagcaaaaagcagtgattgtgctgctggcactgttggcactgggtgtaaaaaatatccacctgggaccgacccttccggcattcctttccccgaatgtggcaaagatcctcacggacacgtttggcattgccggaattggtaccgtagaagatgatttaaaactgttttttggcaaataatccacaaagtctgttttttgtctgttttcctttgacaaacggtatttatgagaggtatgattattatacaatttaacgattttgcatatttggcagaaggagaacattacatgaacgaaaaacagtatttacgagccaacaagcgggtatttctcgctgtcaccattatctttgcctatatcacgctgaccatgcttgctgcactggcggccagccacggggaccactttgtccggattatgatccagtgtctggtttcggtcggtgtgattatcctttccgcactgggctatctgacccgaaagaaaacgcacacctgtgccatcatcctgacaaccgccatgatggtcggttatgcagctgttgctttactaaataccacggaagggacatgggcttacgcgcttcccctcattattgccgccatggtttatctgaatgaacggcttatgaaaataataaacagcgtatttctgctggtaaatatcgttcgtctgatgctcagttttgccccacacgcatctgctgcactggccaacaaggtgctggcactgtttgtcctgcttcttgttgcatacgcttctatcagtattacacggatgcttgtgcttttctttgatgaaaacatgacggaaattacagaagctgcggataagcagaagaaaaaccacgatcagatgcttctcgttgccgaaaatatttcccggcattttgaagaagcaatgactgtgcttgacagtttggaaaacagtattgaggtcagccacagttctattcaggaaattgcagacagcaccgaaagcaccgctgaagccatccagaaacaggcggttatgtgttccaatattcagggcaacaccgatgcggcagaagccggcatccaccagatgattgaagccgcacatgaaacggatgctactgtaaaatccggtgcacaggtcgtcctggaattaaaggaacaggcacagaatgtggaagaagccagcaatatcacggtacaggtcatccagagcctgacttcaaaagtcgaggatgtccagagctttgtcggatccattattgaaatttccaaccagacaaatctgcttgccttaaatgcttccattgaggctgcgcgtgccggggaagccggaaaagggtttgctgtggtggccgatgaaatccgccagctttccgaacagacaaaaaatgcctctgccaacattacagaaattatcgacaaattaaacgatgacacaaaacgtgccaacgaaagtatcgaaaactcagttgcttccgtagaaaagcagaacgaactgattgagaatacacgggagaaattcggcaatgtcggtgaaaccgttgaacgcctgatggaagatatccatacggcagaagaaaatatccagaaaatccttgatgccaccaatgttatttccgataatattacccacctctctgccaccggtgaggaagtggctgcctcttccaccgaagggctgcgtatggcagattccacggtggacaatatgaagggctgtaaaaaagttctggagaatatttacatgcttgcagaagatatgaaagattccgtagagcacaaagaactcggataactctgtctgccaaaaagccggacgctgtttacacaacgtccggctttttactgtttacagaaaatacaaaagtgacaggcaaacggccatgccaaggaatgccatccggtacaacagcacattcgcacaccggatatcttccggttccaccggacgcagggcatcccctatcgtcggtttctttacagtctttccaaaataactggcatcccctgccagccggatgccaaggcttcccgcacaggcactctcggtctgcgcagaattcgggctggcatgtttccggctgtcccttctccagatcttccatgccccgatcccgctaaaacgcttccccggaaggaagcttgccacgatcataagcagtgccgccacgcgggatgggatgaaatttaccacatcatccagctttgccgcaaatcttccaaaatacaagttcttttcattcttatatcccaccatggaatccatggtattcaccgccttataggcaaatccaagcaccggtccgccgactgccagataaatcatcggcgcaatcacaccgtcggatgcattttccgcaacggtctcaattgctgcctttgccacacctgtttcatccagttgttccgtatcacgcccaacgatcatggacactgcctttcgcgctgccggcagattctgcttttgcagctgctcatataccttcatgctttccactttcagacactttgtagcaagaatctgataggtcataatggcttccacggcacagccaatcgccggatgcagcccgtatgccccctcaaggataacggcggttacaccggttgtccatgcgataacaatcacaaccatcgcaaacccgcgcagaaatttttttgtgtctgacagttcctttttattcagtttttccagtgatgcgatcagattaccaatcagacggatcggatggggcagccaatgcggatcgccaaacaacagatccagcacaaacccaagaaacatcgcaaagaaatgataactcatactttttcttttaactccattttattctcttgtaaggacaggcgcagatgatagccctcggcattttttacctgatacgaaaaataatcaccaccacagtagtgcgaaagcagcgccatgatcgtacccccgtgaaccacagccgccaccggaagcggctcctgtatcataccgttgtcttccgtttcccggcactttggacacgctctgtatgccagctgctgccggatctgttccataaccagctccatcccatccacacatcttgcgataaaagcctcccggctctcacctcccggaaatgccagcgttccaccactgtcaatccatgcctgatagcgcggatctccattcagctgtgcataattcctgccttcaaattctccaaaatccatttcgcgccatggatcaatttcgatctgtggaatttgcggaaataaaatttctgcggtctgccggcagcgaagcatgggacttacaaatacatatggcatatcccatgtcctgcatacctgtgcccattggtcttttcttttctccagctgctgtctgccgtcctccgaaagcggttcatccgtctgtctgccaatataccggtgttctacatttcccagcgtcattccatgccggatcagatacagttctatttgattctctgtccaattccacatacaatccgttccaccctttctgcttttgctgcaatttcacaaagcagccgtcccagccgctcacgatattcccgctcgaacgaatcaagcggcacaattccattgcctacttcatcgcagataattactgtatccggatgtttttccagataagccatactttctgcttccggggatggagacttcggggcactttcctgcaatttctctcgaaaccattcttcaaaattgtcccagatccgtgcttccgcgatgccccgcacctgtgttacatatacttttttcccctgagcagtgccgccaatgtataattccattaatgtactccctattgcttgatattttatattaccacgtttcgacaaatttatctatttatgctatactccttttgttttcgctcccattctggcaacagaagggaggtgtattttgtggattctatcgtttcattctttgtttctgtcgtggcaggtatagtcacctattatatctgcaaatggttagacagtaaacattagcggcaattaacctgaatggatgctcgaccatacaaaatgagaagaacccccagtagcggcaactactgggggttcgtttttggtgtacttgtaaaagtatcgcctcattctttgttgattgcattatatcatacacaatcaccaatttcaagtataccccaattcatcatcctttttgcaccagtagcgcgactttttcaaatcaacactgacacggctgccgccaccgccattgccccctcacacagcgtcagaaaatatcccgccgtatctccggtgattccgccaaattccctgtaactgcgccagcgatagtaaccgaacactgcaaatgccgccgccaccgccagaattcccgccataagcgaaagccagagcataaacagtacacacaacaacgtctgtgcataaagtgccccttttaccccacgctcatgtgcggtactcgcaaaatgatagagcataccatccgtttttgcggaacggaaggagaccacactcaggccactcaggcagcgtgacaggaaaaatccacagcaaaacacttccagcgcacggtaatccacaatctgggaaagagccgccacataaatcaacccgaattccgccagcttgatcacggaaaaagctccaatgtgggaatcctttaaaatttccagttttcgctctctgggctgataggaatgcaatgcatccatggtatccataaacccatccacatggaagcccccggtgataataagtgggagcgcagctgatatcagaataaatgcaagcgtactgattcccaataacgcagacaaccgaaaccatccccagaggatagcaccgatcactgccccgatccacggaaaaaagcacatgctgtaacgcatgtcttcttctttccacacaaattgtggcatcggaatttttgaataggtggaaaacgccaccgcgattcctctaatgatgtgcataacctgcttcctttctctcttttaccggaaccggaatacctacaacgacttcggtcaccgtatccgccaacgccgccactcccgtattgatgcgtccgagtgcacggatatatgcctgcgttgtcgcatcataggaaatgccatcctcaaacacgttattactgacaatcaccaacttgtccacttttgcggaaaggcttttgattccctgcaatatgtgtccgacaaccacatcttccgaaacgatgtccgcaccggaaaacatctcatttgcaaccagattggacatacattccagcagggcacagcgaggacgttccgtaacattttgccctgcgcgatccggtggttccatggcttgctgtgctcttttcgaaaaatctacttccccgatatcacgcggctgttcaatcgtaacaaatccttttcccgcgcgaagtctccggtgtcttgcaacttttttttcgccctccgcatcgtacacctgcatggttgcgatataatatttattcgtttttccatccagcagatgctctgcgtaagccgattttccgctgccgcttccgcccaaaaccaaggtgatcattctgtttccccataccgctcgtactgcgcaatttccatcgtatcaaatgttgtctgatcctcatagagtgccagcgccagatccagaagggaaaacagcatcacggctcctgtgccctcaccaagccccagtcccgcatctatgaccggatgaagtttcagttcctccgcgatccattttgccgcgggttccttgctcagatggctcggcagaacaaattcccgcacacccggcacgatccgctccgccaccagtgccgcgaccgatgagatcagcccatccagaacgaccggcacatgatacagtgctccgccgatgcatacacctgccattcccgcgatatccagaccgccgaatgccgccagcatggaaagtgcatgcgctgaccggatctctttttcatatttctccagtgcctgcgcaatgacctgctgcttgcgcaacagccccgcgtcgtttaatccggcaccacgtccagtcacttcttctgctgtgcgtccggtcagtgccgccacaagcatgctgctcgtcgtcgtatttccgattcccatctctccagtaccgatcagctgatagcctttgtctttgcactcccggaccagatcaattcccacagacaatgcctgcaacgcttcttcctctgtcattgcaggttcctgcagaaaatcgcgcgtgccctgcatcactttgcagtcgcgcacccccggcagcgtttcttttgtgttgattccaatatcgaccgggatcacatccacaccggcgcggcgcgccattttgccaaccgagcttgcctgctgccccataaatcctgcaaccaccgcggtcacttcctgtccggactggctgactccttctgcgacaatgccgttgtctgcgcacatggtgaggatcacttttttttcaatggaaagactgctgcttcctgtgattgcgccgatctgcgcaaacattgtctcaaactgccccagaccatccagcggtttggcaattttgtcccagcttgcttttacttgcgcgtagatctgtgcgtccggtggaatgattttaagtttctccatttcttttcctgtaatcaaatgtattctcctgtcaatcaaacggaaatccggctctcctgcaaaatagagtatacatactccatatccagatgctcccgcaatccctgtgcgagcttgtcatactgctgttccttaaatgcatgataatcaccgccagcctccggtttccatgacaccctttttttgtcggccaatgcctgtactatgcgcacggcaatgtctccatcgtcaaaaatgccgtgcacataactgccgtatacgccgggtgcttcgctgcctttttccatgcgctgtaccccgtcggttctgccatctgccagctgtaccagtggcgtctgatgttccccggtagaaaccgttgtctttcccatatgaatctcatagccggaaaattccaatccggaaagtgtggaaaaaataccggtcacattctcaaattttccacgtgtctgcgtacgcattttttccggcatcagggtcgtgtcggtgtcgatcagttccataccacgcaagggtagtgccccgtcgcgctttatgcgctccacggcaattgtatccggctcatgagaaattgcttcgcaatgagccggatagagcggttcgcatagcgaattctcattctctaccccatgtgggtccgaaatggtacgccccagcatctgatagccaccgcagatcccccagaccgggatatgcaccgccagctttttgaccgcggcttccagaccgttctgccgcatccagcgcagatcacccatcgtatttttgctgcccggcagaaaaatcatatccggctgtcccagttcctgcaccgaagaaacatagcgcacggacacaccctccagccgttcaaacacgttaaaatccgtaaaattggagatccgcggaaaacggatcactgccagatctatcacgcctacatcatggttgtccaactgaccgctcagactgtcctcatcctcaatggaaagatgcatatatggaactactccggcaaccttcacgccgccgcgttcctccagcatctccactcccggatcaaggatcgtcttgtccccgcggaatttattaataatcagacccttcacacgggctttttcatcctcttctaaaagtatcaaagttcccaaaagctgcgcaaacacgccgccacggtcgatatcccccaccagaagcaccggtgcatcgaccagttttgccagccccatattgacaatatcatccgatttcagattgatctctgccgggcttcccgccccttccatcacaataatgtctgcctgcttttccaactccgaaaaagcctcgcagatcgtcggaaccagctttttcttatacgcaaaataatcccgcgcccgcatatttccgagcacctcaccctttacgatcacctgtgatccgacatcattggtcggtttcaacaggatgggattcataagcacggaaggcttcacacccgccgcttccgcctgcatgacctgcgcgcgccccatctccagaccgtcttcggtgatgtaggagttgagtgccatattctgtgatttaaacggtgccacgcgatatccatcctgcgcaaaaatacggcaaagtcctgcaacgatcaggcttttcccggcatttgacatcgtgccctgcaccatgattacttttgccatgtttgtttccttcctgctaaccagcaatcacaaccctgcaatccttcttgaagcatgcaattccatatttgataaaattacgcattccgtcctgcttcagcttatcgacatatgatttttcttccatctgtttcaaagcttcggcacatgcagcatccagatctccattcccggcatatttcagttctatcacaattcctgttctgttgttcggcacctcaacaagaatatcgctgtagccggttcctgactctgcatttgactttataagccagtttgctttatatcccaaaagcccaagtaaaatgccatggtaaaaattttctttcttttcctttgcaactgctgtatcacgtatgcttatggtattccaaagatattctccaaagagctgctctattttttctgtatttttttctaaaaacgcattgcagaattcttccagtctcttaccgtcattcgcggacgtatcccggaaccattccctgattttcttgataaaaagattttttatctctttattgggaattgccaaacgtatctttccatccgctgtacgcccctgttttgtcagatatccggtcgtaaaaagtacgctccacagatttccaatgtttttatcaagctcatcatacgtaagttcctgtgaaagttccttttcaatacactctcccgcgatcagacgctcaatttcatccttggtctgcacatccgccttatcaatcaatctgcggacgatcgcatttccactcgaattagaccagtaatcctgtggttcaaccgtttgatcatagttaagttcatccacataatttatgacatcccatggacagtacacatccgcatttccaaagtgatagccatcataccattcctttgtttccggaaaatgtgaagccagaccatacgacgcaaggagtttttttacctcatcatctgtgaatccaaactgttcatcaaatctggaatccataatagaaagtaccttaaaattattcaatcctgtaaatatactttccttcgatactcgcagacatcccgtcagaaatgcaaactgtaaataattattcgtctttaatgcctgaccaaaaagacctctgatcagagaaaccatttcacgataatatccattctgatatgctttatccagaggaacatcatactcatctatgataattactgcctttttcccgtgatgcttatataaaagctgtgacagtttacggatgctgtcttctatattctcatccgtacctgtaagcattttagcgaaatatgccttatcctcgtccgtaagtgcatcacttgttttgagataataatgccggtccatttcattggcaagaatcgtgccgagcatcctcttcgcatccgcaaatgtcagaccctccacccctttgagcgtgagaaatatcactggatactttcccatgtacgcatcgcatagttctttattctttgcaatatataagccttcaaacagtgaaacatctgcaccgatttcaaaaaaacttttcagcatgctcatattcaatgtcttgccaaagcgtcgcggacgggtgaacagtgttacttccccccaattcatcagaatctgttctatgagatttgtcttgtcaatgtaataaaatccgttcctgcgtattttttcaaaactgtcaattcctaccggtaatttcaaagtatttaccatatgaacctccaacaaacagatcattttgccatatttacatatagtataactgattgacaaggtaattacaatttcctttcattaaacggtcaccgaaatacactgtcatgatttactctccattccaaaaacattttcttgaaaagatccccatgttccgttaagatgatattgtaacgaaaaacaatatatcagggaggtagttatgaactatacaattgaaggagcaccaatgcctgtcgtcatctgtaacttagagggcggcgaaaccatgcttacggagaagggcgcaatgtcgtggatgtccccaaatatgaaaatggaaaccacaacaggcggcggaatcggaaaaatgttcggtcgtgctttttccggtgaaagcatgtttatcaaccgctacaccgcgcagggcggcaccggactgatcgcatttgcatccagctttcccggagatatccgtgcatttgaaatcgcaccggggcaggagattatcgcccagaaaagtgcctttctcgcatcaactgcaggcgtggaaatgtctgtttttttccaaaaacgcattgccggcggtctcttcggcggagaaggatttatcatgcagcgtctgtccggaaacggcaccgtctttctcgaatttgacggacacatcaaagaatacgagcttgcaccgggacagcagattgtcgtcgatactggatatctcgcggcaatgaccgcaggatgttccatcgatatccagactgtaccgggtgtaaagaatatgctctttggtggggaagggatctttaataccgttatcaccggaccgggacgtgtatggctgcagagtatgccggtcgcacagctcgccggagcgatcagcccattcatcccaaataaaaattaatcattttcgaaaaaatcccggagccgtttcccatgctccgggatttcattttatatcatttttcaaattttccgaatctcaaaactgttttttccacgggtttttacctcatataatacactgtctgcttccttaaacagtttttcataaggaactttctccgtcatatacacagcacccagactgaatctgttttgacacctcattgtcataatccgaatacgactggtacttcacctcaataccaggatatttcttgttaaacccatccaggtactgctgcatatcctgctgggagatattggatgctaccgaaatcgttcccctgatttcgtttttctgtgcagcatgtgccacacttccaaagtctgccggaaactgtaacagcacaagcagcgtcaaaagcaccgccaccatacgctttttcttccactttttcatctttctcatccttcttttgcagccttaccgcgcttcatatgccctggatacacgcttatactctgccggttccgtaatctgttccacaacgatatctccgtcttccgcatcacggtatcgatacagatacacaccttcctgaatctcatcctcctctatgagagacactgccatatagtgcttctcttcaacggtaaaagtatccatgatggcaaactctttttccgtgccatccgaaaccggaatgctgattacttcatactcatccataatattctctcccttttatcgcggtactttcgaaaacaatgcaaatgcattttcccgtgtggtttcctccacttcttccgcggaaatccctttaatctttgcaatcttttcaatcacatacggaatgttgcgtgaatcattgcgtgttccccggtgtggttccggtgccatatacggacaatccgtttctaaaacaatggcggaaagcgggattgcctctaccgtctgaacgagttttctggcatttttaaaagtcacgacgccacctaccccgatccggtatcccatctttacatattcctgcgccatctccggcgaataggaataacagtgaatcactcccttgattccgtcctcgcgggcctttttcatgatctgcatcgtatcctctgcagcatccctggaatgaataatcaccggaagatccgcttcctgcgccagtgcaagctgtcgcacaaaccagtaccgctgcttttgctgtacctctggttccttatcccagtaataatccagtccgatctcacccacggcaactgtcttttgcagcgttgtctgctgtctgagccatgcataagtgtcctcatttaaatcatccacgtcactgggatgtacgcccaccgcagcataaagaaaagggtattcctgcgccagcgaaagtgttgtctttgtcgtcgcaatggaagaccctacattaatcaccggtgaaatgccgcgctgcggtaaatccgcaagcagcatctcccggtccgtatcaaattttgcatcatcgtaatgtgcatgtgtctcaaaaatcataagaagtgcctttctatcagatcaagttcctccatgatgatacagtttggaagtgtatccgaagccaccatgccccgcacctgggcataatccatccagcgcacactctctatttcttcggtctgcagttcaaattcctctgcttcccgatccagccagagcagataaacatttgaaatctggtgatcatgaaatggctgtctgtgaaattcactgtcaacgtccttatgcacctgtccgcaataaatcaggtccgactcctgcactgtcacattcaattcttctttcagctcccgaatggcggaaggaatatactcctcccctgccggtatatgtccggcactggaaatatcatagcagcccggaaatgaatctttctgcatacatctcttctgtaataaaagctgaatccgtccgttcctgttgcgagcaatccagacatgggatgtacgatgccgcacaccctcccggtgcgcctctgtgcgttctacggtttcaccggttggtgctccggtttcatctacaacatcaaggatttccataatttatgcctcctatttttatgcctccgaccttgtttaacagatctctgcaccgcttggcattggtttctccggtgtcatcagagaaagtgtgccgttttcgtcctctgcacacagcagcatgccctcggacaatactccggcaagttttgccggctttaagttcacaagaaccataaccttcttgccgaccatctcttccggtgtgtaatctttacggataccggatacaatctgctttacggtgtttccgatttttacctgggagcaaagcagcttctttgactttgcaactgcctcacaggagagaatctctcccacctggaactgcatcttcgcaaaatcatcaaatgtgatctcttccttcggatccatatcaatgactgcttcatctgcggtctctccgccatttaatgctttctgttctttttcgtactcttccttctgctttgcctgaatggcatccacttttggctggatctcttttgcgtcaattcttgcaaaaaggatctccggagcatcggttacttttgttccatccggatacagtccaaactgattgagttcatcaaaatcacgcaatgatgtcgataactgcgccacgattttttctgcggtttccggaaggaacgggtgcagaagacttgcgccaatcgtgatggactcagtcagattgtaaagaacctctgccagacggtctttctgtgcctcgtcttttgccagtacccacggggttgtctcatcaatatatttattgcaacggcggaacagtgcaaatacttcggaaattgcatctgccacacgaagttttgccatcttcccggcaatacggtcacgggttgctgtcacaacagctttcagatctgcatccacttcaccggtgactcctgtggatgtgaccacaccaccaaaatatttattgctcatggaaacggtacggtttaccagatttccaagaatatttgccagatcagagttgaaacgctcaatgaccagatcccaggtaatcacgccatcattctcaaacggcatctcatgcaatacaaaatagcgggtagcatctacgccaaacagatctaccatgtcatccgcatagattacatttcccttggatttgctcatcttatccccgccctgaagcagccatgggtgtccaaatacctgctttggcagtggcagatccagtgccatcagaaagattggccagtaaatggtatggaaacggacaatatcttttccgatcagatgcagatcagccggccacagcttcttaaactgatctgtggaaccatccggatcatatccaatctttgtgatatagtttgtcagtgcatccagccagacatatacgacatgtttcggatcaaaatctaccggaattccccagctgaaactggtacgtgatacgcacagatcctgcagtcccggaagcagaaagttattcatcatctcattcttacgggaaaccggctgaatgaagtccggatgggtattgatataatcaatgagccggtctgcatatttactcatcttaaagaaataagcttcttctttggcaggctgcacttcccgtccacagtccggacatttgccgtctacaagctgggattctgtccagaaagactcacaaggtgtacaatacattccctcataagatcccttataaatatcaccctgatcataaagctttttaaaaatcttctttacacatttctcatgatcctcatccgtggtacggacaaagttatcataagaagaattcacaagatcccagatccgctttacctcaccggaaacctgatctacaaattctttcggtgaaatatctgctgcctctgctttttcctgaatcttttgtccatgttcatcagttccggtctgaaaatagacatcatagccttcggctctcttataacgcgcaattgcatccgcaagaataatctcgtacgtgtttccgatatgcggcttacctgaagtataggcaatcgcggttgtcatataaaacttccctttattttctgccatgtccttggcctccttatctcacattcgctctccccattttaccgaattccacgccatttgtaaagtatcccctattcgtccgtttttctgtttattcaagaatattttcttatatgccaagaatttcttgctgacctgtttttccgtagactaatatgcttttatccagttttttccagtacaaaactgccaaagataaatgagaaggagcaccaacatgaaaaatatacaaatcggggcagccttaaaaacgatgcgaaaaaatcgtggctggacgatccatgacgtagttgtacagctgaatgacctgtacaatatcgcagtcgccgaaaaaaccgtgtacggatgggaaagcgatcaggcctatccccgcacggaaacattgctgctgctctgtgaactgtatcagagtgacgcattcaccggaaatctcctgcacattcctgcagacaaatccttcccgatcactgcagatgaacggcatgtcatcgaaatgtatcgccggcatccggaactacaaagcgctgtaaaacgcgtgcttgatgttcccgtcaaaaaaccttctgcaaattaaagttctgatatcctgtcccctgtaaaaactattttccaaaattcaccctgtcacagaagtttctatctcatgcagatataaatcacataaaccacatataaaaccagcatcacaataccttcttttctgctgattttttcttttgtccatgcaaacccccagatcaacaggctcaaaacaatcaaaataataatatctatgatgttttccatcaaaaacggcatcggactgataactcccgccagaccaagtacaaacagaatattaaaaatattggagccgatcgcatttccaagtgccatatcgacttcatttttgcgtgctgcaacaacggaagtgacaagttccggaagtgaagttccgatagaaacaattgtaagtcccaccagtgtctggctcattccaattttcaatgcaatattgctggcactgtctacaaccacatccccgccaatcacaataccagctacaccaaccacaaggaacaacaggctttttggcatcgacattactttctgtgcctctgccgcttcaatctcttcactttgcggttgcccgccttcttttcctgctttcaatgccatacgaatcattgttccgataaatatggcaaaaaacaccagaaatacagcactgtcaaaacgtcccagtttcattcccacaccaccgagtatcataagcagcaacgctgcgaacacggaatatgggaaatcacgctttaatgtagatttctgtacagcaaccggggtcattatggcacagaacccgataactaccatcatattaaaaatattagatccgaccacattgctgattgccagcgtattcttatgctggattgctgcaacaacagaaaccgcagtctccggaagtgaggttcccatggcaacaatcgtcaggccaataatgatggccggaacatgaaaccgttttgcaatactggaacttccctccacaaaaacatctgcccctttgaccaggaagaaaaatcctgcgatcaaaaaaacaattgccagcggcatggaacatgttgaaataaattctgtcatatcttttccctctttctgtaaaataatgtgttaaaaggcaatcatgcccaagtgctccaatagtattttcaagccaataagtatgaggattacaccacctgcaatctctgcttttcttttgtagcgggtgccgaagaaattaccgacaaccactccgatgaccgataatacaaatgtcgtgcatccgataatcagacaggcttccatgatggatacatttaaaaaggcaaatgtaataccgactgcaagtgcatcgatactggttgcaactgcaagaagcagcatctctttgtgatccagtggcagatcttttgctccaatttcctgcacgtctttatcacgaaccgcttcaattaccatctttccaccgataaacagcaacaggaaaaaggcgatccagtgatcgaccgaagtaatgtatttctgaaagcggattcccagcgcccagccgagaaacggcatcagtgcctgaaatcctccgaaatacaatccaatcagaaacgcatgttttttgttgattttttccatgccaagacccttgcagacggataccgcaaatgcatccatcgagagtccgacaccaatcagaaataactcgattaccattcttatgttctccttttgtgaggggattcataccttgcgcttctgtcctgatatatcaaaaagagacccaatgcgcaccaatgaaaaccgcgactacagccacgtttttccggtgcacatgagtctcattctttaaggcttgccaggtccaaatgaccggtatgttgacaagtcacacaatgtgcgaactactccctcacatacttttgtctatgaattaggtaaactataacaaacggtctttgagttagtcaatacgaacttcttatttgctgatgacttttgcaaacttcttcttaccacgctttacgacctttccttctccggcaaactcgtcgagcgtgtaactggtactgatgtctgtaactttctcaccgtccacagagactccaccctgctgtacggcacgacgtgcatcggaacgactctcacacagagaagcctttacaagaactgccatgatatcgagcttgtcattgtacagatcatctgcagtcacttcaaccgtcggcatatgtgcagaaaccccgccgcctgcaaacagtgcatgggatgcctctttggctttctttgcctcttcctcaccgtgtaccagtttggtcagctcataagcgagaatctcttttgcttcattcagcttggcaccttcccatttgtccatctcatcgatctgctccaatggcaggaaggtcagcatgcggatgcactttaacacatcggaatctgccacatttctccagtactggaagaagtcaaacggagaagtcttgttcggatcaagccatacggcaccggactgtgtttttcccatcttctttccctcagagtttaaaagcagattgatcgtcatggcataagcatcttttccaagcttccggcggatcagttccgtaccaccaagcatgttactccactggtcatctccaccgaattccatgttacatccatatttctggtacagtgtgtagaaatcgtaactctgcatgatcatgtaattaaactccagaaagcttaatcctttttccatacgctgcttgtaacattctgctgtcagcatgcggtttacggaaaaatgtgcaccaacatcacgtagtacatcaatgtagtttaaatccatcagccagtcggcattgtttaccagcattgccttgccttctccgaaatcgatgaaacggctcatctgctttttgaagcagtctacgttgtgctgaatggtttctggtgtcatcatctgacgcatatcggtacgtccggatggatcaccgatcatggctgtaccaccgccgatcagcgcgattggcttgtttcctgccatctgcagacgtttcatcagacacagtgccataaaatgtcccacatgcagactgtcagctgtcgggtcaaaaccgatataaaatactgcttttccattgttgatgagttccttgatttcttcctcgtcggttacctgtgcgatcagaccgcgggcaaccagttcgtcgtaaagtgtcattgggtttcctcctgtaatttaacttttttgatttttctggggctttatgtccctttgctccatatctataaaaatccaaataaaaatcccctcgtcctaattataaggacgagggggatctctcgtgttaccaccttaattcgcatgctgttcacacagcctgcctccgcgagtgcagctacactccagtgcgtctaacgggcactactccgttacagcctacttgcctgcgcgttcggtgtaaagctcagggatgtattccctgcggtaaggggggacccagcttgctggggggattccttatcgcccggtttatgtttgttccataagccgtggcagggggg

SEQ ID NO: 978 - DNA, 15312 bp, Unknown
  gut microbiota DNA sequence
agaaaatgccggactggatgcagtaaaagatgtgctgcaggaaatgttaagagaagataagatctatatcgaacgggtcattccctatgcgcaggcaggcgtattgcagcttgtgcgaaataagggagaacttgtctcagaagagtatgtgccggaaggaatttccattcgggcatatgtccctatggaggtatacggaaaactgtaatcgctgtgtgtgaaattttataatcctttcttttggctatggttttaatggaaataagtgaaaaaataagtaaacaacaggaaatacaagtcggaacaggtaactttttggaaaattaatgggaataggaaattgtggaatatgggtgaatttcctaaaatataggcatctaatgataatatgattttacaggaggacagtcaggatgtcagatgttgttgaaaaacagccgttaaccgaagattacctgaagaagatggatgcctactggcgcgcagccaattaccttggtgccgcacagttatatctgctggataatccacttcttcgagagccgcttaccagagatcaggtaaagaaaaagattgttggtcactggggaaccgtaccgggacagaactttgtctatgtacatttaaaccgtgtgatcaaaaagtatgatcaggatatgattttaatttccggcccgggacacggcggaaacttctttgttgccaatacttatctggaaggtacctatagcgaggtatatccaaatatcggagaagatatggatggactgaagaaactgtgtaagcagttctctttcccgggaggaatctccagccatgtagctccggaaactccgggttccatcaacgaaggtggtgagctgggatattccctggcacattcgtttggtgcggtatttgataacccggatctgattgctgcctgtatcgtgggagacggtgagtccgagaccggacctcttgcaacttcatggcagtgtaataagttcttaaatccggagagcgatggagcggttcttccgatccttcatatgaatggatataagatcagtaatccaaccattcttgcacgtatttctcatgaagaacttgagcatttctttgatggatgcggatggaaaccatattttgtagagggcgatgatccaatgaccatgcaccgcaagatggcagagacacttgataccgttatggacgaaatcaaggcgatccagaagaatgcaagagaaaaccacgataccacaagaccaaagtggccaatgattgtacttcgtactccaaagggatggacaggaccaaaggttgtagacggaaagcagatcgagggatctttccgtgcgcatcaggttccgatcatgatggacaaaccggagcatctggaaatgttaaaagagtggttactcagctaccatccggaagaattgtttgatgagaatggaaaactgattccggaactgaaagcacttgcaccgaccggagaccgcagaatcggttctaacccacatgcaaacggtggtaagctcttacgtgacttaagacttccagatttccgtgattatgcacttgatgttccggcgccgggaagcgttgaggcacaggatatggtagaacttggcggatttgtccgtgatatcttcaaactgaatgaggattccaagaacttccgtattttcggaccggacgagacaatgtcaaaccgtctgatgaaagtctttgaggagacaaaccgtgactggaacaatgaaaaactggattccgatgaattccttgctacagatggccgtgttatggattctatgttaagtgagcatatgtgtgagggatggttagagggatatcttctgacaggacgtcatggattctttgcaagttatgaagcatttatccgtgtggtagattctatgtgtgcacagcatgcaaagtggttaaaggtatgtaatcagcttccgtggagacagtccattgcttccctgaacctgattcttacatccaatgtatggcagcaggatcacaatggatttacccatcaggacccgggatttttagatcatattgcaaataagaaggcagatgtggtacgtctttatctgccaccggataccaactgtctgctgtcctgctttgatcactgcatcagaagccgcgattatgtgaatgtacttgttacatccaagcatccgagacagcagtggctgaccatggaacaggcagtaaagcattgtacacagggtatcggcatctgggagtgggcaagcaacgaccagggacaggagccagatgtggttatggcatgctgtggagatactccgacactggagacattagcagcagttacgattttaagaaaggcaatgccggagattaagattcgtgtgatcaatgttgtcgatctgatgaaacttgagccaagcaccaagcatccgcatggtctgacagatgcagagtacgatgcactgttcaccaaagataagccaatcatctttgcattccatgggtatcatacactgatccacgagctgacctatcgtcgtaccaacagaaatattcatgtatacggatatcaggaggaaggaaccattacaacaccattcgatatgcgtgtacagaatgagattgaccgtttccatctggtaaagagcgtaattgagcatcttccacagttaggaaatcgtggcgcttatctgacacagaaaatgaatgacaagcttgtagaacacaagcagtacattcatgagtatggtgttgatatgccggagatccgtgactggaaatgggatttataaaataaaatatcaacgggattctttgcggaactgtgccggagtcatccggtgccgttccgtaaatattttgtagaaatatcctttgtttttgtagccgacttcggcagcaatcgcatcgattgtcagtctggtgtgcagcaacagttcttcggctttctgcagacgcagatgctgcagatattccgtataagtcattccggtccggtttttcagtaaccggttgaaataatcttcctgaaaatggaattcttcacagagcattcgtatggaaatgtttttcatatgctgcttcatataatcagaaatttcttcatataaaatccagttcattttctgtcgcagtttttttgacagcgaaaattcatattgtgtatttaaaatacgaaaaatgcgcaggagaagtccccgacagatgatcggagaagcctcatcatgacgctgtaattccaaaagaagtgatgtcatggtttcatccatctgtgagactgcctcctctgcctgagggagaaaatgcagatattgctggagcgatttctgttccatcagtgccatcttcaggaacgagctgatacgctctgttgtaatctgccggttcataatgtcctgaaacatcacattggtaatgccaagaaacagaagtgtggcagaagttccttccatgatttcctgatgcagacagtttttgtcgatcaggcagacttcaccccggtgaaaagtaaattcattgcccagaattttctgccggtattctccgtcaatgatataaaacaattccagatattcgtgtgagtgcatctgcgtgcgcatgccgggtgtaaactctttttcataaaggaacgagggctgggagggcagaatcgttgcagaaagcatatgtccgtcatgaatatcccacagcagggaaaacagatgttcattttccggaagcggataggttttgacaacgctttcatgagccgaatattccggatgcagaatctgaaaccggctgaagttatccgggatctgtgtatttgcactctgataaatcaaatgttttgtaaaattcttcaaatccatggaacgtctcctgtaaaaaattactccaccatggaggtggagtaattgtaagtgtatgtttttgcctgttatttatttcatggcatttttcttggcgatggaagcacgcttgcgcatcgtaggatccagaattctcttgcggatacgcaggctttccggagttacctcaagaagctcgtcggtatcaatgaagtcaagagcctgctctaagcttaatttgcgaggcggaaccagagtcagtgcctcatcagcagaagaggaacgtgtattggtcagatgctttttcttgcagacatttaactcaatatcttcggctttggaactctgtccgatgatcataccggaatatactttttcgccaggtccgataaagagcgtaccacgctcctgtgcggagaacagaccgtaagttacggattcaccggtctcaaatgcaatcagggaaccggtagaacggtaagcaatctcaccgcggaatggctcatatccgtcaaacatggtattgatgataccgtttcctttagtgtcggtcatgaactccccacgatatccgatcagaccacgggaaggaatcttaaactctaagcgggtataaccgccggcaatggaacccatatttaaaagttcacctttccgctgctgcagtttggagatgacggcgccggtaaattcatccggtacatccacgtaagcaagttccattggctcaagttttttgccattctcatcgtagtgatagagaacctcggctttgctgactgcaaattcatatccttcacggcgcatattctcgatcaggacggacagatgcagctcaccacggccggatacttttaagctgtccgggctgtcggtttcttcgacacggagagaaacatcggtatttaactcacggaacagtctgtcgcggatatgacgggaagtgacatattttccttcctgaccggcgagaggactgtcgtttacgatgaaattcatggagatagtcggctcggaaatcttctggaacggaatagctaccggattttccggagaacagatggtatctccaatgtgaatgtccgcaataccggagatggctacgatggaaccgatctttgcttcactgacatctactttatttaaaccatcgaactcatacagtttgctgatgcggactttctcaagtttgtccggatcgtgatggttgacaacgactgcttcctggttgactttcagggaaccgttgtcgactttaccgataccgatacggccaacgtattcgttataatcgatggtactgattaaaacctgtgtgttggcatccggatctccggtcggggccgggatatagtttacgatcgtctcgaaaagaggagtcatgtccttcttttcatcgtcgagattgtacatagcgtatccgtctcttgcggaagcgtagatgaacgggcagtcaagctgctcatcggaagcatccagatccatgaaaagctctaacacctcatctatcacttctgcagggcgcgcttccggacggtcgatcttgttgatgcagacaataaccgggagatttaaagcaagtgctttcatcagtacgaatttggtctgcggcatggttccctcgaatgcgtctacgacgaggactacaccatttaccatcttaagaacacgctctacctcaccaccgaaatcggcatggccaggcgtatcgataatgttgatttttgtatccttataaaatacagcggtatttttggacaggatagtgataccacgctcacgctcgatatcgttggaatccatgacacgttcctgtacttcctgattggcacggaacacaccgctttgttttaacagctcatcgaccaatgtggttttaccatgatcgacatgggcgatgattgcgatattacgaatgtcgtctcttgttgttaccataaatttaaccttctttttaatattgtttaactttacataaataacctatcctattttatcataaaaagctgatttcgcaagcttttttcaacgtacaccggcgatttaagcgttttagatagttttcgccggccttatcgacaaggtttgatgatttctaccaaccattaaatggtaaaacagaagcctatcaaaaatttccacaaaaggaaggagtattcatggcagataaaatgtgtgaaaacaatcaggtcactattatgggagaaattgtatcggacttttcgtatagtcacgaggtatatggggaaggattttatatggtggaagtatctgtccatcgcctgtccagtttcgtcgattatattccggtgatggtatcggagcgtctggtcaatgtgcaggagagtgcggagggaaaatgcgtctatattacaggacagttccgttcattcaaccggcatgaggagcataaaaaccgtctggtgttatcggtttttgcgagggagtttgaactggttgagcagtttgaggaagaaaatgcagccaaccagatttttctggatggatttatctgtaaagaatcggtataccgaaaaacacctctgggaagggagatcgcggatcttctggtcgcagtcaaccggtcatatggcaaatcggactatattccctgcatctgctggggcagaaatgcaagatttgcatccggattcgaggtcggatcacatgtgcagatctggggaagaatccagagccgcgagtatgtaaagaaagtcagtgagacacaggtggagcagagggttgcttacgaggtatccgtcagcaagattgaattcctggagtagacttgattatttgacgcttttgtgttatcttacataggatttcatttagttaagagatatcatggaggctgaaatggacagaggagtgattcaggtttattatggagagggacatggtaaatcgaccgcggcaatcgggaatgcaattcgtattgccagcgagggaaaaagcgtcattatcattcagttcttgaagggaaaaaatgaaaacgaactgacatttttaagccggctggagccggaaataaaaatattccgttttgcaaaatcggatgagtgttttgaggcactttccgaggaggcaaaacaggaagaaagtatgaatctgcgcaatggattcaattacggaaagaaagtcgttacgacaggtgcctgcgatatgctaatcttagacgaggtacttggaattgtggacgaaaaggtgataagccctgaagaaatctgtgagctgtttgccgtaaagccggaagaaatgactctggtctgcacaggacgcgttctggatgaaaaaatccgtgaggcagcagacgaggtttataatatcgcaccggagaaatagattgacagactatgccggtggtggtagaatgaaagaaatacatgggatagaggtcgcgtaattcatgagtagcctgttggatgtggcagacacagtcgaatgcaggtaaaaggggaaagcgccgaaagaaccggatgactgcagtctggtttttgggcatgcggtgaataatcgtatgactgtcagaagcgtatgagcgtggatggagagctatcagatctaaaaaaggttagattgaccagctcgttttgagctggtttttttatttagaaaggagaataaaacagtggcaatttttaagggagccggagtcgcaatcgtgacaccaatgaagaacaatgaggaagttaattatgataaacttgaggaactgattaaccagcagattgacggtggtacagatgccatcgtaattgcaggtacgacaggagaaagcgcaacacttacgatggaagaacaccgtgatgtgatcaaggcagccatcgagtttacaaaacatcgtgttccggttgtggcaggtaccggttcaaactgtacacgtacagccatccagctttcacaggaggcagaagaggcaggagcagacggacttctgatcgttacaccatattataacaaggcaacacaggtaggcctgatcagccattattcacagatcgcagacagcaccaagtgtccgatcattatgtataatgtgccgggacgtaccggatgtaatcttcttccggagacggttgccgagctggtccgcaccaagagtaatctcgtaggattaaaggaagcaaccggaaatctggcacaggcttccaagacgatggcacttaccgacggaaaactggatctgtattccggtgaagacggtcttgttgtaccgcttatgtcaatcggtgcagtcggtgtgatttcggtatggagcaatgtggcaccgggcaaagtacacgcaatgtgtgaaagcttcttcaagggtgatattaagacagcaagaaaactgcagctggaggcgcttccactggtagatgcactgttttccgaagtaaatccgattccggttaagaaggcattaaacctgatgggtatggaagtaggaccgcttcgttccccactctgtgagatgagcgaggctaatgcaaagaaacttgcagaagtaatgaaaaattatggaattttagcatagatcagggaggcacaaaagaaaatgacaagagcgatcatgaatggctgcaacgggaagatgggacagtgtatcacaggaatctgtgcgcaggacccggatatcgagattgttgcaggaattgatacttatgatggaatcaaaaatgattatccgatatttgccagtctgaaagagtgtacggtggatgcggatgtaatcattgatttttccaatgcaaaagcagtggatgcgctgcttgcatatggtgtggaaaaacagattccgatcgtgctttgtacgacaggactttccgaacagcagcttgccgatgtggaaaaagcatacgaaaaagttgcaattttaaaatccgcaaatatgtctctcggaatcaatactctgatggaactgctcaaaaaagctgcacaggtatttgcgccggcaggatttgatatggagattgtagagaaacatcataaccagaagctggatgcaccgagcggcacggcactggcactggctgattccatgaatgaggcactggatgaggcatatacctatacctatgacagaagccagaagcgcaagaagagggataaatacgaaattggaatctcttctgttcgtggcggcaatattgtcggagagcatgaagtgattttcgccggacaggatgaggtgattgaattcaagcatacggcatactccaaggcggtatttgcaaagggcgctgtggaagcagcaaaatttttaaaaggaaagcctgcaggacattatgatatggcagatgtcattgcggcaaaataaacgggaagagaggcactgataatcagtgccttttttgcgcaaaatgtttgacagtgcagctggttcatatttataatggaaagaagaaacctgacgataagaaagaggtagaaaatgaaaaataaaaccagaaggcttgcagcatttttgctttctgcagcagttgtcataactgctgttccgggaatgcaggaacgggtttatgcccagaaaaccggcggatacacagagtcacccaaaagtgaaaatgttccggtggtaaaagaaacaaaatccaggctgaaaaaggcagaagcagtgccgtccgcctatatgaacaagttgtcggaacttacgatccgctatcctggcgtgcgtgatcagggaaaatatgatacgtgctgggcattttccgcaatcggacttgcggagtttgatctgattgcagacaatcagacggcagacaaaagcattgatctgagtgaattgcaacttgcctattttacttataataatgtagaagacccgctgggtggaacatttggcgactctttaaatattatgaaccataaaaattatctgaccatgggcggaaatctggatttcgcgagccggacgcttctgcagtgggaaggggtgacggacgaaaaccgtgtaccgtacgccctggcaccgaccaccacgacactggcaaaaagttatgcttttgatcaggatgtggcacatctgcagaatgtatacattattaatattcacaaaaatgctacccaggtgaaacgtgagattatgcagcacggatctgccggactgggactgtatatggacggaacgaccaactatgtgggatctgcagtctatgcagaaacaggagagaatgtggcaacctattactgcccgacaagcagtgttgcatcgaaccatgccgtaaatattgtgggctgggatgataattttccggcatcttcgtttaagaataaaccggcaggaaacggagcatggctttgcagaaacagctggtcagacaagacggagaacagtatcaacagttatttctggctttcctattacgataaggcaattgaggatgctgcctggatctttgattttgagtccgcggataactatgattataactatcagtatgacggtggagcggatgtgggaaaattgttgggaatttcgacttctgcgaatattttcaaggcaaaaaaggcagacaatgagctgattaaagcagtttcgatttctctttccaaagatgccagtgtcccatatacgattagtgtatatacccatctgacaaacctgcataatcctaagagcggcgtgcttgctgcgaaggtatccggtacgacaacctatgccggaacccataccatcaggctggataaagcggtatccgtacccaaaggaacctactatgctgttgtggtaaatctgcagaaaagcggtgccggactcgatatggaatatgcagtcagtgacagcagtttgaccagcagggtatattgtgattataatcagagttttctctatcgttacggcagctgggaagatgtggcggatgtaagcaccagttacggcggcagaatcggaaacatctgtatcaaggcatatgcggacaatgcagggacaagtatcggtgcggtaaagaatataaaagcggtccgaagtgcaaaaaatgcggtacgcatttcctggagcaaaacggcaggtgcgaaagggtatgaaatttatcaggcatccagcaagaatggaacctataaaaagattgcaacaacgacatccgcaaattataaaattaagacaacttcaaataagtcggtatattataaagtacgcgcttataagacaacgcaaggcgttcggatctgcggaaaattttccggatctgtcgctgtgaaacgttaaaagaaaggaaaaagaatgaccattttaatcaaagggggacatgtcatcaatccggcaacacagatggatgaggtggcagatgtcctgatcaaagatcagaagataaaaaagattggaaaagaacttccggaaaaagaagccgaacgtgtgatcaatgcggacggatgttatgtgatgccgggatttattgatatgcatgtacatttccgcgatccgggatttgaacagaaagaggatatttataccgggatgcaggccgctgcgcatggtggatatacgacagtgctgaccatgccgaatacaaagccggtagcagacaatccggatattgtcaattatgtgcacaacaaagcaacgtccgggaactgtattcatgtcctgcaggttggtgcggtgacaaagggacagcagggaaaagagcttgcggatattgaaggaatggttaaggcaggaagtccggcaatcagcgaggacggaaaatctgtcatggatgccgctttgtatcgggacggtatgcttgaagcagcgcgtctgggcattccggtacttgcccattgcgaagatatccatatggtacgcggaggtgtcatgaatgccgatgcaaaagcaaaagaactgggacttccgggaattaccaattccgtggaggatgtgattgttgcaagagatattattctggcaaaagataccggggcacagcttcatctgtgtcattgttccacaaaggattccgtgctcatggtaaaagtggcaaaggaagaaggtgtccgggtgtcggcagaagtgtgtccgcatcactttacgctgtccacagacgatatgaaagaagcggataccaattacaagatgaatccgccactccgcacaaaggaagacgtgaaagcactgcgtgagggactgcgggatggcattatggaagtgatttccacagaccatgcgccacacacatttgaagataaaaaccgttcgatgcaggaagcaccgtttggaattgtcggactggaaaccgccgcatgtcttacacataatgaactggtactcggtggatatctgacgccgatgcagatggcagcgtgtatgagttaccatccggcacagattgtcggtattgataagggagatatccagccgggaaaagcggcagatgtcgtgatctttgatccagaggaaacctaccgcattgacaaaaacacatttgcttccaagggaagaaatacaccgtttgacgggaaagaagttacgggacgtgtaaagtgcacgatctgtgacggcgaagttgtatttaatgaattaaataagtaataaattaagaagggaaatcaatcacatgatcaacaaattagtagaaaaaattaaaaagaccaacgcacctatcgttgtgggactcgatccgatgctttcttatgtgccggagcacatacaaaaagcagcgttcgctcagttcggtgagacgttagagggagcagcagaagccatctggcagtacaataaagctattgtcgatgcaacatacgacctgattcctgcagtgaagccgcagatcgcgatgtatgagcagtttggtgtggccggtgtagcggcattccagaagacggtagattactgtcacgagaaagatctggttgtgatcggagatgtaaagcgtggggatatcggttccacatccgcagcctatgcgaccggacatctcggaaaagtacagatcggaagcaaaacatataccggttttaatgaggattttgctacagtaaatccatatctgggaaccgatggtatcaagccgtttgtggatgtatgcaaagaagaaaagaaaggaatctttattctcgtaaagacctccaatccatccagcggagagttccaggatcgtctgatcgacggtcgtccgctgtatgaactggttggtgaaaaggtagcagagtggggaagcgaatgtatgggagattcctacagctatgttggagcagttgtcggagcaacgtatccggagcagggggaaattcttcgtaaagtgatgccgaaatcgttcattttggtaccgggttatggtgcacagggaggacagggcaaggatctggtacatttctttaatgaggatggattaggagcaattgtaaactcttcccgtggtatcatctgtgcttacaaacaggataagtataaagagcagggaatgacaccggagaacttcgcagatgcctcccgtctggcagtcaaagatatgatcgcagacatatccggagcacttgcacaaagataaaaataaagtcgtgattttacaaaagggagacagttggattttatgagcgaaaaatttcaggaaaatgttacggtgctgaagcagcagtgcatcggaaaagatatctatgacatgacaatccagacgaagcatattgcaggacatgcaaaggcaggacagtttgtatcattgtacagtaatgatgccagcaaactgctgccacgtccgatcagcctgtgtgggattgatgcagaggcaggaacacttcgtctggtataccgggtaacgggagaaggaaccggaacggaagaattctcccggttaaaagcgggcgatacgatccgggtactgggaccgcttggaaacggatttaccgtggagccgggaaagaaagctttcctgatcggcggaggaatcggaattcctccgatgcttgaacttgcaaagagcatcaaggctgccggcacctgtgaatttgtcagtgtgatgggataccgggatgcacagacgtttcttctggatgaatttaaagaacagggagactgttacgtggcaacggaagatggaagtgtcggtgcaaagggaaatgtgctggatgccatcaaagaatataaattaaatgcagatgtaatatatgcgtgcggaccgacaccgatgctgcgggcgttgaaagcgtatgcagcagagcagggcatgacctgttatatttccatggaagaacggatggcatgcggaatcggtgcatgtctggcatgtgtgtgcgattccaaagaaaaagatgcacattccaatgtgaaaaacaagagaatctgtaaagaagggccggtatttctggctgaggaggtggatctgtaatgaatacaagtgtggaattatgtggtgttaccttaaaaaacccggtaatgacggcatccggaacctttggctccggagcagaatacagtgaatttacagacttaaaccggcttggtgcggtggttaccaaaggtgtggcaaatgtaccgtggccgggaaatccgactccgcgtgtggcagaagtctatggcgggatgctcaacgccgtgggattgcagaatccgggaattgatctgttctgtgagagagatattccattcctgaaaaaatatgatactaaaattattgtaaacgtatgcggacactcgacagaggaatatgtggaagtggtaaaacggctggcagaagagccggtggacatgctggaaatcaatatttcctgcccgaacgtaaaagagggtggaattgcttttggacaggatccgaaagcggtagaagcaatcacaaaggaaatgaaaaagtatgcaaaacaaccggtgatcatgaaactgagtccgaatgtcacagacatcacagagatggcgcgtgcagcggaagcaggtggtgcggatgccctgtctttgattaacacgatcacgggaatgaagattgatatcaaccggagaaaatttgttcttgcaaacaagaccggtgggatgtccggtccggccattcatccggtagccgtgcgtatggtttatcagacggcacaggcagtaaagattccgatcattggaatgggaggaattatgaatgctgcagatgcgattgagatgatactggcgggtgcgacagctgtatctgtcggcaccgccaatttccagaatccggcagtgaccatggaaattgtagaaggcattgagcgctacatggaaaaatatcatgtgagcgatatcaaagaactaatcggtgccgtttcggaataataaagatatggtaactgcttactgtttttgaatatattgtaccagggatttcattttggcagcaatgttttccagaatctgtgtgtttacggtctctgcatccattgtttcggatgcatgggcggtcagttcttcagaaactgcggaaattgtctgtacggaatctgaaattgcctgattagagttacgcagatctgtggtattgctggtcagttcctcgatactgttctgaatcaatgtcacttagttaagctttttacaaattaatggatttgtgtgcatctagcgtgaaaaggatgt

SEQ ID NO: 979 - DNA, 41081 bp, Unknown
  gut microbiota DNA sequence
taacgtttacacaaaacttgaaacggtctcatttgaattattttttctttacaacacagcgtttcttatagaatgaaatcccataacaaatgacttcatcataatcatcttcaaaggatttggcatacatgagatcatccatctgctgcacagctttttcacatgcggtgtctaaatcgttgagagatttggcgtacttggcttcaaagacagcaacgcggccattgagggagtcgtacacaaccacatcactgcgtccttccccatgttctttattggagtctaccatataaccggctccggcaaatatgccagctaaaaaagcatgataataatcttctttgtaatcatggtaactgattgttttgcgcagaagttttgtcatttcaatagaaattgtctttgcatcctgattccatacggcatgaaacagagtttcacggttccaggtcagggcgctctcctgaaaccattttaaaatggttgtctcaaaaatttcccggatttctgcattcggaatcatcagtgcggatataccatccggcaaattttcagggagatctgcatcgcgggctttcgtcagataacccgtgagataaagaatactccagagattgtcttcggaagaatgcagatagtcgtaagtaagattttcatcaatctgttgtgtaatatatccgcctgaaagcagggtttccaatttccgggtaatggtatttccggcataatcaataaaagaacgaacaatagcattatcactggtgtttttccagtaacttgccggcctgacatcgggattgtattgcagatctcgcatataattcatgacatcccacggacaatagacatcgacatctccaaagtgataaccatcataccagaatttcaaatctttggaatgttctatggcatcggcatcccgcagaagctgttctacatccttttgtgtaaatccaaaatattcattcaaacggcaatctgtaatggtgtcagatacaaaattatttgtcccggtaaaaatgctttcttttgcaatccgaaggcatccggtgatcactgcaaaccggagggcagcattatcttttaaggaagtactgagcattcctttgataatctcaagcatctggtcatagtatccattagagctggcttttgcaattggcacatcgtattcatctaacaacaggatgactggttttgcataataagaagccaaagcttttgtcagcaatacaagactttgtttgatctcagagacagtggctttgcgttctgcaatatgatgtatgatttctttatcataatcgtttacagaatcactttctaacagataaaggtgctgctggtataaatcggaaatggtatacaccagcatgtcgcaggcactggaaaaggtaagtccatccacatctttaaaagataaaaacaaggttgggtactgattcatccattcatcacataaagcagtatttttggaaatttccagcccttcaaatatggttcggctgtcttttcgaatatcaaaaaaacttgccagcatacgcatgccaagtgttttcccaaaacgccggggacgtgtaattaaggttacttcagcagatttcgtctgtagtaatttagaaataaatccggttttatcgatatagtaataattattttccctaagcttttcaaaatccgaaacgccgacgggaatgttaagatctaccatatacctgtctccttgtatacatcatttcttaaaaaccaagtatatcatatcatgaagaattttagatgacaatgaaattaatattgcgcataatcaaagaatgtagcagaataaaggtgcgcataatcaaaaagtatggaattttatgcatttctccatacatggtaatgatgatgtaaaaagaaaagtggagataacattatgattaaaaacatcgtaaaaggcaaacagattttttcaaaaaaagcaacccctgccacagaagccgacaggcaggtaatcaccgatctcttagacaccctgcgtgccaaccgggaaatctgtgtcggcatggctgcaaatatgattggcgtaaacaaagcaattatcgttgtagcggccggaccgtttcagtttgcaatggtaaatcccgtgataacaaagaaatccggggagtatcagaccgaggaaagctgcctgtcactcgacggagccggaaactgtaccagatataaggagatcgaagtagattatctggatcagaattttaaaccacagcacggaaaatattccggctggacggcgcagatcatccagcatgaaattgatcattgtaacggaattattatttaattaggaaaggaaaacgatgaacgaggaaaagaacgagacaagatgggacaggcttcttgcggttcgcaccactggcagagacgatacaaatgcggatcagtatcgttatccttatgaacctacgccttattcagttttggaacgtctggcaaacagcggactgattcgaaaggaaaacacattgctcgactacggctgcggaaaaggaagagttgatttttttatgtcatatcaaaccagatgtcagtctatcggtgtcgaatataacgagcgaatttatgaaaaggctatgaataacaaagagtctgccgtggcttccggcagggtattatttgcacttgcaaatgcggagcggtatacagttccggaaacggtggaccggatttatttttttaatcctttttcgctggaactgctgaaaaaagtaattgcccggattttgaattcttattatgaaaacaggagaacagtaaagttgtttttctattatccatccgatgaatacatagcttatctgatgaccgtagaggaattgttgttttccgatgaaattgattgcagagatctgtttgacggaaacaatgtacgggaaaaaatagtgatatttgaaattgctgtttaactgcgtggtctgttcagagggatggatttgcgggggagactgttctaaatataaggtttctcgatgtgacggaaaaaggggacattctctttctacagaaaaatttacaagttagctctggcgttggtttcaggtacgtggagtaaagttgttcggtttacgcaattcgctgtgggttgtgagtgccagagcaagttgtaaatttgttcttccgaaagaaatgttccccttcttcctgttggctggagaaaatataattgagaaacatatttccgaaaatcctgtctgtggaacaaatataaaggcaccagaacctgcagttaaaggcgctcccggaagaaaattcgtgtaaaagataccattgtggtatctatgccaataaaattcatgtaaaagataccattgcggtacctatatattgaaaatttagcattcagataccggaaagtctctatagatcaaaaattgcttttccaggtaccactttctcgaaaaaagcggtacctgaaaaagcaatttttactatataggtgacatttcctgatttcaaacactaaaatttcgaaaaaacgtcacctgagcctttaattttttatctatagataccagtccttatcatcaagtgatttaaccgggtgtttttacgtttatttcagtttatgggattcgcatatcctttccaggcgccccttaactgcaagttctattatggaaatttctatttgtcgttaattaagtatgtttgaaaaataaaacggagacatttttgatgattcaggatattattatagtataaataaaacctttttgccagttcaggacaatataaaagtgtaagggcaaaccccttaaatcgatttaagagagaaaaaggatcagggatggataagcacgaatttgagcagtttgtcaccgaacatggaaaagacattctgcggttctgcaggatgaatgccgggagtacagagcgtggaaacgaactgtatcaggacaccatggtaaagctgttggaaaagcaaaaaaagcttgatgcggcgcagaatataaaaagttatgcaatgcagacagcaatcctgctgtggaaagcccggaagatccgtcgcagaaacaggcatttttaaagctgcagataaaataaaaagatccttataaattccttagaattctcctttatactgatattacaaatcaagaggaggatgaaacatggaacagaatatgatcacaatcagaaatctgtcaaaagaatttaaaggacaaagcgttctgaaaaacattacaatggaaatccccaaaaactgtgtatacggacttttgggggcaaacggcgcgggaaaatccacgctgttgaaaacaatcaccggattgttaaaccctacgtccggtgaaatttattttgaggggcataagtggacacgggcagatctggcggatattggcgcgctgatcgagacaccgcccatttatgaaaacctgacggcgtgggagaacatgaaagtgcgcgcgcttcttctcggaattccggatgaaaaaatccaggaagtactcaaaaccgtcgacctgacggatacgggaaagaaaaaagcaggggctttttcacttggaatgaagcagcggcttggcatcggtctggcacttttgaatgatccgaaactgctggtgcttgacgaaccggtcaacgggttagatccacttggaattcaggagctgcgcgcactgatccggagttttccggaaaaaggcattacggtgatcatttcaagccacattttaagtgaaatccagcagaccgccgattacatcgggatcattgcaaagggaacggtgggatttgaaggaaaactgcaggaacagcaggatctggaagcgttgtttatgaatgttgtcgcaaaaggagggaatgaatcatgaaacattattttcaggcggaacagttaaaataccgtcatacttccgtggcagcaattacgctcggcatgccgatgtttacggcgttgctggcattctggctgacctcttcctatttttccgttgatgtgtacaactggtggtacatcgggctgtatccggcgtttctgggcattttgtgcagcatcatcgggaaaaaggacaaacagaaaaagaattacacgatatggtcactgccctgcggcatggaacagatctgggacgcaaaaatccttgtcggaataaagatgtcggcggttgcagttgctggacttacgctgttttccatgatggggcagatgctgctggaatccgtggggaatctgaagatgaggcaggcaatcccgattccggcacagatactggcaggaattgtgttgtggcttaccacactctgggagattccgttctgcctgcttcttgcacagaaaataagcacatttctgatgcttgtgatccatgttggaatctatagtattttgtctacgtcggtatcgttaaaaccgtggtttgcgttgtttccgggagcgatcacatcgcggctgatgtgtgtcgtgatcaaagtgatgccaaacggactgccgtttgagccggggcaggtgacctattctccggaactcggcagagtgagtggtctgttgattggaattcctgccgcacttctgtggtttctggtattctggctggcaggcagaacatggtttcgaaagcaggtggcagaatgacaaaacgtgtgatgggaagtgtccgggcggaacttttgaaaatgaagcatacttttttaattccgtttcatgtggcggtgccggttatcatcgctggtttcatgctgttttattatcgcgggaccataggaaatcccatgggacagaccatggcatattttgaactgatcggtatcgggcttccgtttgtggtgagcattgtgtgtgcgggaaatatcggacttgaggagcagaatcattttcaggtatttctcgggaactacaaagtaaagggcaaagggtttgttgtaaagggcgtggttctttttggcatgggggttcttgcaattttcggggcagcagttctttttgctgccgggtatcattttttactgggaaaagaggggattggcatgcggtatgtgcggctgacggggacactgattttcggaagtgtgccgttgtatctggagcatttgttcctgaatctgatctttccaaagaccgtatcccagtgcgtgggcgtggcgcagtcggtggtgtccgccctgtttctcaccgggcttggggagggcagatggcagttttttccggctacgtggagtgcaaggggcattcggtactgcaatgatcccgtaaacgggaaacgtgtgttgttttgtctgttgcttctgtttctgatgtgtgtcataatcggagtatggtttcataaatatgaaggaaggcagtgcaatgactgagatattggcaattgatgatgaccgggaaattttagctgtgatcaaaaaagcacttttgcgggaagggtatcaggtgacggcacttgaagatccgctgcaactggaggaagacaaactaggcagataccagctcattcttttagacgtgatgatgccgggcatagacgggtttgatctgtgccgcagaatccgtgaaaaagtggattgtccgattctgtttctcacggcaaaaaccgaagagaaagacgtaatgaccgggcttggcgcgggtggggatgactatatcacaaaaccgttcgggatcggggaactgcgggcgagagttgctgcacatatccggcgggaaaacagggaaaaaacgcatacgatctgtatcggggaggtgcgtttttccatgcaggagagaaaaatctatgtgcaggaacatgaacttgtttttacaaaggcggaatatacgatctgcgaatttttggcattaaaccacggacaggtattttcgaaagaacggattttagagcatgtattcggatttgacggggacagcaacggttccgcaattacggagcatgtaaaaaatatccgtgcaaaattccagaaattcgggatcaacccgattgaaacggtttgggggatcggctatcgatggaaatgaaaaaaagaagacaaaaaacactgaccgggctgtttttgaaatttgcggcgttattctgtctggatacgttcggaatcggaatgttctgtctggtgtttctggtattaagtccaatgacaggatttacgctgcctgccaattatgcggagctgcaactgacggaccatacggaagaaattagggctgcgggaacagatgtggaagctctgattccggatggatgcagatacgggatttacgatgcggcggggcggtttaagaccggaactttttcggcagatgcgcagaaaagggcatggcaggggtataaaaacggcagtaagtatgcatccatgggaaagtattaccgctatattaagcagaacagcggcgatatctgtattgtaaaatacgatttgcatatgaggtatgcgtacgataaattaaacggcattgttccatctctggagatactgacaccggtgcttggcgtggtgctgtttttcctgcacgccacattgttgtccggccattttgcaaaaaaattaaaacgggagcttaggcagctacgcgaagttacggaaaaaattggacaaaatgatctggagtttgaaaccggaccatcgcagattaaggagattgacgatgtgatgtcctcactttccggcatgaaagaagcattaaaagattcgctgaccagacagtgggacgcacagcagcagaaaaaagagcagcttgcggcactgacacacgatatcaagacaccgcttactgtcatcaaaggaaatgctgagcttttggcggagacggatttgtctgcggaaaaccgggagtgtacggatgctattttggcgaatgtgggcagcatggagcagtatttggagcatatgcggcaactgctgtatggacgtgaccgcgcagaggagacagaagtagtcacctgtgcgcgtttgaaagagcagttcaaagaagcagccatgcagattgcggcagcggaaaaagttccggttgtttttcaggaggattccctgtgtgggaatgtatgctgcaagccaggaccggttggcagagcatggaaaaatgtggtcagcaatgcggtggaatacacagaccgggcgcgcgggatcgtggtgcgcctgcagatggaagtgtatgaggggcaggagtatctgactgcaaccgtccgcgattttggaaagggtttttcggagcaggatctcatctatgcagatcaggaattttacagcggggatgccagccggcatgaccggacgcatcaggggcttggtcttgcgatcgcaaaaaaattcttaaaagagcagggcggcatgctttgtttttacaaccacgcggagtctggagcggaagtggtgtgccggatcaaaacggctgagttgttttaaacaatacatcgtcaaatcgggtaaatggtaagtataaaatttgaaagccaatattatcatgtatggaaaatgtaaacggttacatggcaaaaataacaaaataaatagggaaaatgacctgaaaaagagaaaaaactgtgcaatacaacgaaaacaaagagcatatattgacataaattttgcataagcatataatgcaatcaatgaaaacggttacataaggaggcgttaactatcgataaaaatatcacaatatcagatattgcagagagagcaggagtctccaaggcaacggtatccagagtattgaactctccggacattgtagaagaacatacaagagaaactgtaagccggattataaaagagttacattatacaccatcccagacggcaagaaatctttctatgaaaagttcatcaacaattggtgttatcgtaccagaaatcagtaatacctttttcggagaattgttttcaggggtcgaagatgtaacaaagaaacataactattctctgctttattctggaaatgacaatgataaagaggctgattataaagctttggatatgatgaaaatgcagcgggtcagaggattattatatattcctgcagtgaactatgtagcattaggcattctggataagttgcagcgaaagctggatcggatgaattgcccgattgtatgtatggatcgagacgttggactcaaatgcgatattgttcattttgatgatcagagtgcggttcgtaaagcagtgcttgccttggcgaatgaggggcacagtaagattgcaattattataggtgaggaagaaaatattctttccatccaacgttttgaaggctatctggaaggcctcaaacaggcaggaatccagtatgatgagaagcttgtattaagaggttcctatacaagggtgtctggttatcaggtaacaaagaggatgattgcacaggaagatcagccgacggctgtgattacatgcaataacctgttgagtaagggttatttgcaggcggtatgtgaacatacacacggaaaaaccgatttgtatacacatattggtctggatgagattgatatgatgcaatatcttggtattccttataattgtatccagcgtgatgcatatgaattaggtcgttcggcggccgaattactgatgaagaggattgaacagccggaggaagcatatcagcacatgatattgagttctccgttaattcatcagacgttctagtttataaaagagtgattgtgtgttactcataaaatacacaatcacttacttattacaaaaaaatgaaagcggtttcattaaacgaaaggaaggtaagatatatgaaattagcaatgggatgtgatccggcagcgtatcggttctatcagaaattattagagagaatgagagacgaggggtacgatattattgacatcggatgtgagtccgaacaggaagccgatggcggaaaatatgcagaaatagcagaaattgtttcaaacaaagttgtgaacagagaatgcgattgtggaattcttatttgcggaaccggtcagggaatggcaatggcagctaacaagattccaggaattcgtgcagtgctttgttacgatgtatttccggcggttcttagcaagaatgataataatggaaatgttttgtgtacgggcgcatggtttatggagaagaaaggaattgatttcacaatggcaatgattcatgcgtggctgttctctggttatacagggacacatgaagatggcatgcaggcgcttagtcgccttgatcataaaaaatatcaggaggtgatgtaacatggatcgttttcaggagttgtcaaagattgcattggatgagttatcagaagtttttgcaagaatgagcgatgaaaatgtcagggaactattggaggaaatcaaaaaagcagaccgtatttttctgctgggtgcaggaagagaagggctttcgacgagagagtttgcaatgcggttaatgcatttggggaaggagtctcattgggtatgggacgatacaactccatcaatgggcaaaggtgatttgttcatctgtgcatgcggaagcgcagacgtggcgcatgaaaatatactttgtgacaatgcaaagaaaaccggcgcaacgcttcttctgatcacaccgtctgcgaaggggcacattctggatatcgcagataaagtggttcggattccggcaacagcctataaggcggtatacaattcagaggatgaatatgtaccgaccgttcagatgatggggaatcagtttgaacaggccttgctagtattctttgatgttattgtaatgatgcttagcgaagaaatgggaatttccaatgaagagatggaatcccgccacagaaatattgagtagataagaaaaagggggacaaaattatggtaaaaaaattattagcaatggttttaggagtaacaatgttgattggtgcaacaggttgttcggcggttgatacaggatcgggaacaggaaccagtgatacaaaatcagatacgcaggtaagtgtgaatgcagatttattagatgcaacacagtataaatctgataaagaggcagcagattggaccatcgcagttgttgtaaaagatggaacttctgactggtttaagcgtatgcaggtcggagtcgatgagtttggtcagacaaagacggttaatgttattcagaaaggaccagctaatgcagatgcagcttcacaggttcagctggtggaagatatgattaatcagggagtcgatgctctttgcattgttccgattgatccgggtgcacttgagtcagtcttacagaaagcaatggaaaaaggcattgttgtaatcagtcacgaagcatctgaccttaagaatacattgtatgatgtagaagcatttaccgcagaagattttggcgacacaatgatgcaggaacttgcaaaagcgatgggtgagaagggacagtacgcacagatggttgcctacacaacgtcgacaacacatatggaatattctaatgctgagtatacatatcagaaagaaaactatccggacatgtccttaattaatgataccgtaccatctgctgaatcatctgaaaaagttgatacagcatacgagaaagcaaaagagttattaaaagcaaatccggaactcgcaggatttacaggtgcggcttctgttgatattttaggtgaagcacaggcaacagaagaattaggtttgacagataaggtatcaattgtcggtgtcggtacaccaaatgccacaagagagtatgtaaagaacggaacaattgatgcggtatgtctgtgggatccggcatcagcaggttatgcaatgtgtgatctggcttataaagtattggcaggagatgaaattacagaaggcattgatcttggacagaaggggtatgaaagcgttacaattcaggaaggtgcaaatcgttgtgtattaggaaacgctccgttaattttaaatacggacaatattgacgactatgacttttaaattttagatccagtatcaaaactccttataaattttgatggaaatccggattaacgaaacatatgaaaaacatgtttttccagtggctgcgatgaagttgacggtatccggatttcctgtaaatgaatgatgtttagaaagagagtgaggggccaatgtcagaaaatattttgtgtgtaaagaatatcaagaaatcatttggcggtgtgcatgcattaaagggtgttgatctgaccattaaaaaaggcgagacacattgtcttgccggagagaatggatgtggaaaatcaactattataaaagtaatttcagggttttacaaaccggatgaaggtaccattgaaatcgatggaaaaggatatacaaatatgtctacagcagatgcgattgcagcaggtattcaggtgatttatcaggatttttctattttcccaaatctcacggtaatggaaaatctcgcattcaatcaggtattagcggaaaagaagaaatttgttaataagaaagaattcagaaggatagccgaagaagctgtccgaaaaattaatttcgatgtagatcttgacgcgcgagtggaaacacttccggttgcagataagcagttgattgcgatttctagagcactgctccataacgcaaaactcatcatcatggatgagccgacaactgcgttgacaaaaagagaggtaacccgtctgtttggaatcattgaagaattaaaaaaagaaggcattacaattttatttgtttctcataaattggatgaggtatttgaaatctctgacagtattacaattctccgaagcggacagaatgtataccattgcccggcgagtgaaatgactgaagaaaaattcacttattacatgaccggaagaaacattgatacttctgagaaaaaagaagtgaaagatttttcggagaccgaaaaagtcctggaggtgaaagacttatctgcaaaaggatttgaacatataaactttgatctgcacgcaggagaaatcctgggtattgcaggacagctgggatccggacgtacggaactgagccttgcattgtttggaatgctgaaaccgaccggtggcagtatttgtatttcgggtaaggaagtaaaactgaaaaatgtagcagaggcacagaaacaagggattgcccttgttccggaggatcgtttgacggaaggtttgttcctgccacagccgatctacaaaaatattgcggtaacgagtctgaaagagctttccggagcattgggaagcgtgaaagaatctgcgcagaaagaattatccgagcactgggtgaaagaaatcggagttgcaacgaaagatcatacacttcctgttcagacactttccggtggtaatcagcagaaagttgttcttgcgagatggctggcaacgcatccgaaaattctgatcttaaacggaccaacggttggtgttgatattggagcaaagtatgatatccataaattgttgcgggaactggcaaagcaggggatggcggtgttggttgtgtccgatgatgtggctgaaattacagcgttgtgtgatcgggctttgattatgaaagcaggaagcatgaccggtgaatttaaaggtgaagatctcacagatgacaatctgtataagtcgacaatataggagaggggtggaaagatgaaacttaagatgaaagacatattgaagcagacagagttttatgtgttttgtattattgtggcattcgcattcatcattcaagtacgttccggacagttttttaccagtaacaatttaatggatctggttcgatcaatgattatacctggaatttatgcaatatgtgcgttacttagctttgtaagcactggtgcggatgtatcatttccgttaattgcagcactgtctgcttatattgcagtaacactgggcaatcaattttcattaggtgttattccgatttttgtgattgcaattgccgttggctgcctgattggatgtattaatggatttttcatagtgaaatacaaatttaacagcttgattgttacacttggtacatcttctatctgcagtggtattttatttggtacatttgaagcaggaagaacggagctgcctaagaaactttatgcgctgagtaagattaaccttgttacggtaacaaattcaaaatccggtcttagttcttcacttccgtttacgtttgttatcatgatcgttctttatttaattgcatatttcattcttaattatacaatggcaggaagaagtgtgtatgcggttggaggagatgaagtcagcgcagagcgggcgggtatcaatgttggcaaagttagatttatggtttttgttgtgaatggcggtattgcagctattgcaggtctctgttatgcaatgatgtcgtatttttatctgccgaatgaatatgccggagaagaaatgcttgttattgcagcagttgttcttggtggaacgcgtatggttggtggtattggtacacttagggggtgccttcttggaaccttgcttcttacaatggtttccaatagtttgattttgcttgggatttctgtatattgggaaaaagtatttattggagcaatcattattattggtactgcggtatccgctatgcaggcgatgcgagcatcaaagacatcagcaaagaagaagggggtagagtaaacatgaatgaagcaaagaaaatgaaaaagagcattaccttacctttcgatgacaactcaaaaagactgattattattcttgtggtactgttgtttgttacaggaattacaaagtcctcacagtttttaaatgttggtaatatccagtcaatcggaaagcagctgacagaatatggtcttatgtcacttggaatgggtgtctgtatgctgagtggtggaattgatctgtccactgtctatattgcaaatctttgcggtattagtgcaggattgattattcagagtaatacaagcggtgcagcgggcattgtacttgcatgtgttgttgcacttgttgtaggtgctttatgtggtatttttaatggatttttggtcagctttcttaatattccgccgatgctggcaactcttggaagctatgaactgtatatggggatatcgattgtattgtcacagggaagtaccgtttccgcagatggtcggtttaatattctttcggcaatgacaatttttggaattccgttaccatttattttgtttttactttgcacggttattttgacattgatcatgagtaaaacaagttttggaaataaagtttatcttgtgggaacaaatgcaaaatcgtcgaaatttgcaggaatcaatgtaaagaagaccacactttgctgttacatgatttccggaatcctgtccgctattgcaggactggtaagcttatccagattgaattccgcgaaagctgattttggaacgagttacacaatgcagacgattttggttgctgtcttaggtggaattaatccggatggaggatttggtaatattccgggtattgcctttgctgtgattattttacagacattatcatcgtatttgaatcagttcccatccatcagtaattactacagagacatgatctggggtgtggcattgcttgcggtgctggtattcaatattacaatttcgaagaaacgtgcaaaaaaggcagcgtctaaataacaaaggagagataaattatgcaacacggaatttattatgcatattgggaacatgaatggaatggcaattaccactattatattgacaaggtggcaaaacttggatatgacattcttgaaattgctgctggtccgcttccggaatatagcaatgaggaattaaaggcattaaaggatcatgcaaaggaacagaatattcgtcttacggttggatatggcccagcactagagaataatattgcaagcagtgatccgcaggtgcgtaaacacgcgctggatttttatacggatttattccagagaatggaaaaaatcggggcaaccttaattggcggagcactttattcctgctggccaattgattattcgaagccggttgacaaaaaaggtgattgggagcgtggcattgaaggaatggcaaaacttggaaaaattgcttcggaatgtggaatcgaagtgcttggacttgagtgcctgaatcgttttgaaaatcatgtgctgaatacggcggcagaaggggtatcttttgttaaaagcgttcgggaactggaacccaaggcttccaatgttagtgttatgctggacacctttcatatgaacatcgaagaagagagtatcggtgccgcaatccgtacggcaggaaatctgcttggacatttccataccggagagtgtaaccgtatggtgccgggcaaaggcagaattccctggagagaaattggtgaggcacttcgcgatattcggtatgataagacagttgtaatggaaccttttgtaatgccgggaggaacggtaggacaaaatattaaagtatggcgcgatattgttccggataccagtgaagaggcattggatcgtgatgcaaaggcagcattggaatttgaacgatatatgcttggttaaacaggaggaaacagcgtgaagcagtatgatgtgattgctcttggagagctattgattgattttacggattatggtaaaagcgagcagggaaatcctgtttttgaagcaaatcccggaggtgcaccatgcaatgtgcttgctttactgaaaaagtatggaagatcgtgtgggtttatcggtaaaattggagatgatctgtttggaaaaatgctgacagacatactggacgaaattggaattaatcataatggactgattgttgatccgtattataatacgacattggcatttgtgaaaaactttgaaaacggagatcgtgaattttcattttaccggcacccgggagctgatatgatgctaaaggcagaagaggttgcttatgatcagatcaggcaggctagaatttttcattttgggacattatccatgacggatgaaaaggtgagagaagcaacggttcaggcaatcacattagccaaagaacagggattgttaatctcttttgatccgaatcttcgccagcctctctggaaaagtctggatgaggcaaaagttcagattgcatatgggttaggtcaatgtgatgttttgaaaatttcggataatgaaattgaatttatgacagatacatcagattttgatgaaggtgtacagattttgatggatcaatatccgaatattcgattgttgaatctgactgcaggtgcagatggaagttattcctattatcaggggaaaaaggtatttgcaccatcgtatctgctgggagggacagtagatacaacaggggcaggagatactttttgtggcagtgtattaaattatcttttggaacatgatgtcgatcatctgacagaagaacaattgattgaaatgctcagaatctcaaatgctgctgcatatcttgtcacaacaaaaaagggtgcgattcgttctatgccgaatccggatgaagtcggaaaaattgttaaaagtaaatagcacacatatttttaatctctgcattactgtgtttatacagtttatgcagagttttttgatgtgacaaaagcagggggatatgaaatgtcaataaaaattactgtaaacaacggaaatctgatgcaattttcgcattgtaaataaacgcgcaatatgctaatatgtaaaaagtttcataaagaagatctttggtgcctgtcatataaagccgctttgcatgggatatatgggcttgtatgcacagggtaaaagggaaacaggtgaaaatcctgtacgaactcgtcactgtgattagggagtaactgcaagaagcacatcgcatgagaaatccgctgacgcggatgcgatgtacgtaggaaatgcagcttaggctgcatttcagatgccactgatgcagctgcattgggaaggcgaagcatgttatgatgatctatgagccaggaaacctgccaatgatctggtacagaaagtttttactttcagatcacgagtcattgatcgtactgcatgttacagaaaactgtgtgggacagccgtccacagacagttcctttttgcatgggttgattgctcctttcggaatgttccgggtggggcttttcttttggcactttggatgatgcgtgatcttatgagatgaagcaacccgtcaacccaaagaatacatcgcatgagaaatccgtcagggtggatgtggtgtatgcaggaaatgcagcctatgctgtatttcaaaaaggagagaattatgagaaagaaaacacttgcattgtttctgacatgtgtactggctgcaggcatgcttgccggatgcggaaacaaagacagcaaagacaacaatcaggtagaaaattcgcaaggcacagagtctgcaaaagacgatcaggcagctgcagatgaggtagcagaattgattgatgctatttatgttcaggaaagaacagataaaaccgatgagcagtgtgctgctgcaaaagaagcatgggacaagctgacagatgcacagaaagcacttgtttccggtgaaaatgcagatccggattatttcggcagagataccggtgatgcttccaaggatgatccgttaaatcaggataatatcggagataatgaaatccttgtcgtaagctttggtacatcttttaatgacagccgtgtcgcagatatcagtggtgtggaaaaagccattcaggcagcaaatccggactgggcagtccgcagggcatttaccgcacagatcattatcaatcacgtacaggcaagagatggcgagaagatcgacaacgtagaccaggcattacagagagcggttgataacggggtaaagaatctggtgatccagccgacacacctgatgcatggggcagagtatgatgaacttgtcggagagctggatgcatataaggataagtttgagaaggttgtcgttgcggaaccgctgcttggcgaagttggtgatgatgcaacagtgatcaacgatgacaagaaggcagttgcagaagacattacagcagaagccgtaaaaaccgcaggatacgattcactggatgctgcaaagaaggacggtactgcatttgtattcatgggacatggtacttcccattctgcaaaagtaagttacagccagatgtctacacagatggataagcttggttatgacaatgtctttatcggaaccgtagaggggaagccggaagagacttcctgtgaaaatgtaatcaaggcagttaaggacgcaggttacaagaaagttattcttcgtccactcatggttgttgccggagatcatgcaaacaatgacatggcaggagacgatgacgattcctggaagagccagttcactgcaagcggcaatttcgacagtgttgacacacagattgccggacttggtgagattgaagctgtccagaaactttatgtagagcatacaaaaaaagcaattgagtcacttggaaaagtttccaagtctgcttcttccagcgcggtatccgcgctggaggacggcacttataccgcaaagtttaataccgacagtgggatgtttcatgtcaatgaagcagacaatggatgtggaacccttaccgtaaaagacaaaaagatgaccattcatatttgtctggtatccaagaaaatcgtaaatctgtttctgggaagcgcaaaagatgcagaaaaagacggtgcagaattgttacagccaacgacagataaagtaaaatacagcgatggaacgacagaggaagtttacggatttgacgtgccggtagaagaacttggaaaagagtttgaccttgcaattcttggaaccaagggaacctggtatgatcataaagtcagtgtatcagatgcacagaaaaaataaaatgtgagttgtctgccagacggcggcaattccggtacatcgtatttgaaaatgatgtacatgtgtcagaagttacaagaaaacagataggatggatcggagaaatcatccggtcaaagagaaaaagtatgaaaagcaggaaattaacggtaattatcgtgtccctttgtatgtgtgtgtcggttttgtccggctgtggttctacggcagaaaaagaacaggtgcagcatgccacggaaacgcagactgccaccgcggaaccggacacatcgctggaagacggagaatacaccgtaaatgtagaactggaaggcggaagcggcagagcttccgtagattctgaagcaaaagtaaaagtgacggacggacaggcatatgcaaccatagtctggagcagtacctattacgattacatgctggtcgatggaaaaaaatatacaaatgagaacgagggcgggaattcaacgtttacatttccaattgccggagttccgtgtacgatggatgtagtaggagacactacggccatgagccagccgcatgagattgattacaccctgacattttcttttgcaaaagatgtaagttttaaagatctgaaacagaccgggcaggtaaaattgtcctatgccgatcagtttcagatcgatgaatatggaaattataagctgattacgatcgtggacaacggtcgttttttgcttattccgaaaggggttccggtgccagcggatgtaccggaggatgtaaccgttttacagcagccgttaaaccatgtgtaccttgtatcgtctgcggtgatggatctgatctgtcaggccggtgggctgtcacacgttgcatacaccgcattgaaggaagacgactggtatgtgcagcaggcgaaggatgccatggcagacggttctttggtttatgctggaaaatacagtgcgccggattacgaacagctgttgcagggtggctgcacatttgccattgaaaatacgatggtcacgcacaatccggaagtaaaggaaaaactcgaagaacttggcatccgggtgatggtcgagcgttccagttatgaaaagcatccgctgggacggctggaatggatcaaattgttcggtattctgtttggaaaacaacagcaggcagatgactattttaataaacaggtaaaacgtgtgaaaccgattatggaaaaaaagagtaccgggaaaaaggtggcattttttgcagtttcctcggacgggacgatcactgtgcgcaagccaaacgactatgtctctgcgatgatcggacttgcaggcgggacctattcactcggaaattatacggatgaagaaaaaaatgcactttccacgatgaaaatgcagatggaagatttttattctgcggagattgatgcggatgtgctgatctacaacggaaccattgagggggaattgacgtccatcgatgagctggtaaagaaaaacagcctgtttgcggattttcaggctgtaaaaagcggacaggtatatacaacgggaagcaatttttaccagcagtctaccggaacctgtgattttatcgaggatctgaatcagattctgacgggagaaggggatggaacgtaccggtttctgaagcaattgcagtgagccggagcgtacggatgtacaaataataacaattgtcgtaatgcatgaggagcagaacatgagatcacaaataaaagaaaaaaagaataattccgggacagaaacaaacagaacgctccgctatctggtttcttttcttgtgatcatgggattgctggtcgttttgtttttctggaatatcggtgtcggaagtgtggaaatgtcttttttcgatttcctgggcgtgctgacaaagcatcagccggattccacactgtatcagattgtctggaaaatccgtctgccccgtatcattgctgcagttctgctcggaggggcactttccgtatccggtttcctgctgcagagttttttccagaatccgattgcaggaccgtatgtgcttgggatttcctccggagccaaacttgtcgtggcactgatcatgatctttcttctggaaaaagggattatggtcagttcccttggaatggtggtagctgcatttgccggttcactgcttgccatgggatttgtccttctgatttcgtttcgggtatcgaatatgtcgctgcttgtagtgtgcggtatcctgattggttatatctgttcagcaattacggatttttgtgtgacgtttgcggatgattccaatattgtcaatcttcacaactggtcgatgggaagtttttccggtatgagctgggagcacatccgcatcatggtcataattgttggaatcacggttgtgattaccttcgggcttgcaaaaccgatcagtgcttatcagatgggagaatcttatgccagaaatatgggcgtaaatgtaaaagtgctgcgcattgcactgattttactgtcaagtctgctgtcggcatgtgtgaccgcgtttgccggaccgatttcgtttgtcgggattgcggtgccacatctgattaaactggcaacccacacggcaaaaccgattattctaattccgggatgttttctcggcggcgcagtgattacgctgttctgtgacgggattgcgcgaaccgtgtttgcaccaacggagatcagtatcagttcggtgacggcggtatttttagtgccggtggtaattgcggcaatgttgcgaaagcagcggatgtgatgaatcgtggaagacaaataacgtgcagacagaaagccaaaacggataaggacgcaaaggtaggaagaaagttactatgagcagacacaaaaatgcagatggaaaataattggaaagtgatgaaagaagaaaacggaaaacaacataacggacagaatatgctaaaggagccagggcagtttcctgcgcaagatataccaaacgatgacgagcagcttacgatgcgtgatctgaccgtaggatacgaccggattcccctgattaaaaatatcaatctgggtgtccggccaggggaaatcctcacactgatcggaccaaatggctccggaaaatcgacaattttaaagaccatcaccaaacagcttaaaaccattggcggcagcgtttttctgggaaaagaatccatgagggaactgacggacagtgaaatttccagacatctttcgatggtcatgacggagcgcatccacacggaactgttaagcggcagggatgtggtggcaaccgggcgctacccgtacacggggaggcttggtatcctctcacaacaggactggaaaaaggtggacgaggcgattgccctggtgcatgccggggaagtgcagcagcaggatttccggagaatcagtgatgggcagaggcagagacttatgctggcgcgggcgatctgccaggacacacaggttctgattcttgatgaaccgacttcctatctggatatgggatttaaactggatattcttacaaccatccgcatgttggcacggaagaaaaacctggcagttatcatgtcattgcatgaactggatctggcacagaaaatttcagacatcattgcgtgtgtgaaaggggaccgtattgaccgggtcgggacaccggaggaaatcttttccgggaactacgtgcagcagttgtacggtgtaaagccacagcagtttgaaccgcagaccggacaggtttttatggaaagaccggaaggaattccagaggtatttgtgattggcggtggtggaacagggcttgcggtttacaaccgcctgcagcggcagaatattccgtttgcagcaggcattctgcaggaaaatgatgtggagtacgcagcggcatctgcacttgccgcttgtgttttttcggaaaaagcattctttccggttttggaagaaacctttttgcgggcaaaacaaatgctgggcagttgcaaaacctgtatttgtgcattgacagaatttggtccttataatgaaaaaaataggcagctttatgaatatgcaaaaaaacttggcaaagtatgtgcagagatataattatataaaatgccatttttgcctgtgtaaaatcttggagtgcgaactgtatttagctatataattttggggcatataaaagtatatcaccttcatttcatgctattgcagaacctagatgggacatatgtaaaaaagcaggggagaaagtcccgcgaatctaaagaagagggacatatagaaaaaagcagaggaaaaagtcccgcgagtccaaggaagagggacatataaagaaaaagcagaggaaaaagtcccgtaagtctaaagaagagggacatatagcgaaaaagcaggagaaaaagtcccgtgtgtccaagaaagagggacatagctccggaaaaatcttctatatatcccagacaccagaagttatgggacataattgctcacaaaatctacatatgtcccaagaagcaaaagccgtgggacataatcccacaaaaaacctgtatatgtcctgccccctcttgattcctgcaaaaatgtgaggtataaaacagaggaaggagttcatccttccaaataattcaaaacagagcacgaaaaggagtgaattaatatggcaagaaaagattttggagcaaaaccatacacctatccacagccggtatttattctcgcaacatacaatgaggacggcacggcgaatgcaatgaacgtagcatggggcggaatcagtgaaggaaacgagatttctttctgcatcagtgccggacataagacaacaaagaatttccagagaaccggggcatttaccgtaagcatggcagatgcaaagcatgtggcagcctgtgattatgtgggaatcgaatctgcaaacaatgtggcaggaaaactggacaaagcaggttttaccgtgacaaagagtgcaaatgtagacgctccgatcatcaatgaactggcagtctgtgcagagtgcaaagtaaaaagttatgatccggaaagctgcagactggtagcggagattgtcaatgtcagtgtggatgaagctgcaatgaccgacggaaaagtagatgtggcaaaagtacagccgatcacatttgatccgttcaacaatgagtattatgtgctgggcgaaaaagtgggaaatgctttttcagatgggaaaaatctaaaataattctaaacaaaatctaaaaaaaacaggacgtatccttgacgttttttaaaaatcgaggtatagtacgctacgctttgtgatatcgttgcaccacaaagccagcgtacttttttattaaaaaaacgagggggaatcagacgatgactttttaccaggaactacaactgagttcagttggctcaaaacagctgatcaaaaacacaacagacaaaaaagaaaaacgcagacatatcctgatctataattttaaagtctatcttgttatggcattctgcgtcgctgtggttacactgtttagtaaaatattcggtgcagataacagtgtaccgggagtggttgtgctgctggcagtacttgtgctccggcaggcagatttcggggtgcgtaccagtcatgggctgctctgtattgcgggaatttttgggattttaatcgcaggaccgagaattactaatatgatgcatccggttccggcattttttgtgaatgtggcatgtattctgattctcatgattttcggatgccacaatgtgatcatgtcaaaccagtccacgtttgtccttggatatctgcttttgcaggggtatgatgtgagtggacatgcctatgtgctacgtgtgatcagtctgttgattggtatgggaatctgtatggctgtattttataagaatcagaaaaaccgtccataccgccggacgttcctggatctgttccgggaatttgatgtgcgttccgcgcggaactggtggtatattaagctgacactgattgtttcttcggcactgctgatcgtgtcactgctcggatggccgcgtgctatgtgggcgggaatcgcctgcatgtctgtatgtcttccatttcatgaggacagtgtggagcgtgcaaaacgcaggggaccgtttaatattgtggggtgcatgatcttccttattttgtatcatgtgttaccggaatccatgtatccgtatatcgggatgatcggtggaattggtgtgggttattctgcaggatatgcatggcagaccgtatttaatacgtttggcgcactgtcgattgcatcggggttattcggtgcaggtacggcagtgacgctgcgaattatattcaatgtgatgggatctgtatataccgtcgtatgtgacagatttttggatttcctcagaaaaagaacggaaatccaccgggtgggtgagatggcataaaatcagtagatcacccggttccgcccactctctttgccgagataaagcttgcggtcggcttcctgaatgacagattccatggtatgatttctgccaaattcttcgactccgaatgtcatggttacatgaatcagtttgcgttcgtataatacaggagtgtgccggatatcatccagaaggtcagacatcaaaagctgaacctcctccatatccatgccgggaaatacaaacaggaattcttctccgccccagcggcagacttctcctttttcgcctattaccgtgcaaaacaatctggaaagtgtgcggagaacttcatccccggcatcatgcccgtaagtatcatttacatgtttgaaaaagtcgatatcccccatggcaacagtcagggtctgtaatttatgctgcgtgtatctggaaatacatgtttccagacgcttatacatctgccaacggttgaaaagcccggtcaggggatccgtggatgcgatatgttccagttccagattgtaacgtataagcttgtgttccatctgctgggaattctgggtgaaaataatcataacggtgatcaattctgcaaaaataaacaaagtgtctatggtctgtatgcagatactggcatctgtggaaagctggatgaccggcagatgataccgtgtataggaatacaaaagcaggcggtaagcacatgtgcagattccaacaaagattttagtgcgtatgcggtggaaagtgacagcaaaatttaatacaagaagtacaaacaggaagtgctgtacaccgcagtcccacccgaatctctgtataaatacagtaatccacaataacgtcagtaattgtgaaaaaatggaagcaaaatgtgtgtggttcagataggtaatccggaaagcaaatacatataaaatgctacagatgagtgtcagcagggatgaaggaacatcccgaagaaagcagcagacacaaaaaaggacaagaaaataaacgctgagaatcagtgcatacagacgcagggtcacagcagtggtttttgtctcatttggattttgtacatcctgaaatataaacgcccctatttttttatgaatcatatgtaatcccccaataaacatatgccgttccaaaacatctataagaattatatcacagtataagaaaaagaaaagcgcatttttcacatactatccatacttgaattcatggaaattacattgtataatcagtaaggttgaggaataaaataacaaagaacatataggaggaatctattatggttacttgggacaacttggatacccttgcttcttttcagaacctttcaaaaacaggtcgcatagatctgaaaaaagttatgtctggcgagaacggggcagagcgtgtgaaaaattacagtattccaatggcagagggattggtgtacaactatgctgcaaagcaggtggatgatgatgtactggaagctttggttaagcttgcagaagaagcccagctttccgaaaaatttgaggagctttacaatggtgcagtgattaacaccggggagaaccgtctggttcttcatcagctgacccgtggacagcttggaaaagccgttgtagcagatggtgtggataagcgtaaattctatgttgagcagcagcagagaattgcagattttgcaaacaaagtacacgcaggtgagatcacaaacgctgctggtgaaaaattcacaacagttgtccagatcggtatcggtggaagtgaccttggtccccgcgctatgtatttagcacttgagaattgggcaaagaaaaacaacacattcaggatggaagcaaaattcatcagtaatgtagatccggatgatgcagcagcggtattgaattctgttgatgttgcccattccattttcgtacttgtttccaaatcgggtacaacacttgagacactcacaaatgagtcatttgttaaggatgcattaaagaaagcgggactggatgcttctaagcatatgatcgcagttaccagtgagacttcccctctggcaaagagtgatgattatctggcagcattctttatggatgattacatcggaggacgttattcttctacatcagccgttggtggagctgtattatccctggcattcggaccggatgtatttgcacagttcctggatggcgccgcagcagaggataaactctccgcagaaaaagacgtattgaagaaccctgagatgctggatgcactgatcggtgtgtatgagcgtaacgtactgggatatccgagcactgctgtgcttccatattcacaggcactcaatcgtttcccggcacatttacagcaggtagatatggagtccaatggtaaatccgtaaaccgttttggagagcctgtaaattacccgacaggtcctgtcattttcggtgagcctggaacaaacggacagcattccttctatcagttactgcatcagggaaccgatattgtaccactgcagtttgttggatttaagaataaccagcttgacacagatgttgtcattcaggacagcacaagccagcagaagctctgcgcaaacgtagcagcacagatcgttgcttttgcatgcggcaaagaagatgaaaaccgcaacaagaatttcgagggtggacgcccatcttctattattatcggagatcaggtaaatccgaagacactcggtgcattgcttgcacactttgagaataagatcatgttccagggattcttatggaatgtcaacagcttcgatcaggaaggtgttcagcttggtaaagttcttgcaaagcgcgtacttgcacatgagacagacggagcacttaaagtattcagtgatctgttaaacatctaatcggatttttgtctgaagcaggtcagagatataagacatatataagaaaaaggagtatggaaaacaacggtgtttttcatactctttttttgttcttgaaaaaatatgggatgattgacaggaaagaagccattagagtatcataggcttagcaatggatcagggagtagaaaaacgtgacaacatttgaaatgctgcaggaactgcttgcgcaaaatgaatttgaacttttattgccggaggaccatacagcaaatacaacagagcaggatatccggttggtttatcaaatgaatgataccgtggagagttttcttgtttttcgggaagcaatcttcacaggcacatacaaaaaggattatgaaggaaaactggatgcctcttatgaccgggatcagaaccggtatgtgcttggggtgcggcagggagacagtgttattaccctgttttatcagaagctggagctggaagtaaatctatataactacggagagattgcacatttctgggttccgcggcatgaaaatctgcgtcagctggaatttcggattgcagtgctgtgggacaagtatacctatttgggggaaaattactgcagtgagggggaaaagcacctggttcatctggcggatgtcccggcacttaatttctgttcttactgtgctgcaccggaaccgtatatggtgccacatgagatgccgaaagagtctttcctgcagggactggatgtgatggagcagctggcgaagcaggcgaaagactggctgctggttggctggattcacttttatcgcagacatccatcaacgattgtaaccagatgggtggcacacgtcctgcaccatagcattcattttggctttgtgaaaacacttacggaaacgatcaaaaaggagacggccatctatccgcgacgcctgttcggaaaaagcggagaggaacggctggcactgtgtctgaaaaaagcaaacgcacggaaggaagaactggaaaagacgggcgcatatgtagaaattgtgcggcaggagccatttacaattgcaaaagatcagctggatttaaaggtgtatctgctggtcagccgccaggggatggtaaaccagaagattcaggtggaggaaatagagttgtaatatggtggctatttttgtggcttattgttatctttgccaaaggtatatccacgaccaaagcaggttaggccgaaacttaccactgctataaagtcgacaatactcatggcttagccctcctttccagcggatttctatgtaatcagagagtaacaataacgaataaaaagacaatcaggttagaatttgattgaaagactttttctaaaatgatagtatagatacatgggaaactagagagccgggcggcttaccctctttttcggaggggctaaccctccagacgaaagaaaggagggcgttgccaatgtatgttacatattctgatttgattcagatagggatattcatttgcgcccttgttggattgtgttacacgattttcaagggaaaacgaaaatagccgccattactcgcaataatgacggctgttgttaaaacagatttttaattattggggtaagccgcttctctagctttccctttttctatacatagaataacatatcttttgaatctctgcaaggaaaagtgtgaatcgattcataatttgttactgttcactcagcacctgaacaccatgctgttcaggtacacattttccccctttttgtgaaatgagttgacttcatcacacaggtgtaatatattgaagaaaacatatcattttcggagagggggaatttttatgtggatgttactggggattcttgtagttggtgcgcttggaggcgtatgtatggctgcactccgcaatgtgagcggggatgtcggtggaggcatgggcagagattatatggaaaaagagtggggaattacagaaaataaaaaagagtagaaagacaagatgggattattagaacagatcaaaaaaccgaatgcaaaagcatttacacatagcggaaaatttcatgcggatgatgtattttcatccgcattattgttgtatctgaatccgcagattacaatcacaagaggaaaccgtgtgccggaagattatgacgggattgtatttgatattggcagagggcggtatgatcatcaccagagagacagtcgtgtgcgtgaaaatggagtaccgtatgccgcctttggtctgctatgggaagaactcggaggcgaaatcttaggcgggacgttagcgcagcggtttgatgaagaatttgtgcagccgttggataacaatgataataccggagaaaagaatgaacttgcgacactgatcggaaactttaatccggtgtgggacgcacaaaaaaacatacagaaggaagaagaacgcatatctgctgagcctgcgctgactgcggaagaaaaatcccgtggtctgaccaaagaatttcagcgggcggtacagatggcaggaatgattctggaaaataaatttgcgcgttatcgtgcggatgcacgggcagatgcacagatcgaggaagtattaagtgcacgggaagatctgacagatacaaggattcttgtcctttccgaatttgttccgtgtcagaagaggctgaaggagacggatatagcgtttgttattttcccgtcaaatcgtggcggatattgtatccagccacagaagaaaccggattccatgaattacaaatgcagttttccaaagcaatggctggggcttgaaaatgaagaactgcaagaggctaccgggcttgccagcgcagggttctgtcacaagggcggatttcttatgacggttggagacgaggcggatgccattagggcatgtgagatcagtctggaagaatatgagcaaaagccggtgattgtgtgtctgtgggatgccggagagacacaggagacaaaaaattgcgagagagaagaaacagagcatttgctcaggcagattccggatatgaccgatgcacagatctgtcacatgacacttccgcttcttccagatctggaagaacagggcgtgtatgcggaagttgcaatggaaaaagaagactggaaaacgtatatcaaagattttgtaaaacaaatactcgagtataaaccggaagcggtttatgttacggcagatctgtttgcagcctatccggtggtgcatgcactccgcaaaaaacacatgccggtactgatgcgcgcaaagaaggaaggaaagacccgcatcgtgcggcttccttcgggatcgtagaccagaaagagaggaagaacaatggacgagtcaggaaaccacaaacaggcagaacagagggagagaatccggtggatcgtatcgattttgattccccttttgtgtgcacttctgtcattttgtgtgattgcaaaatacacctcatctccaactatgaagataaatgcacacgcgattcagtcactggatgacaaaaagacaactgcattggaactgacggcagcggcaacagctgcttctgccgcaattacgcttattccgggagatgccggtactccgattgcggataaactggccgatctgagttcgtattttctgattgtggtctgtgcaatatatcttgaaaaatatctggttaccattacggggctggcagcatttaaactgttgattccgatcggatgtattttgttgtcgctttgttttggattcaaaaaagatctgggcaggaccattgcctgtaagctggttttgtttgggctggctgtttatctggtagttccggtaagtgtcagggttgcggatctgattgatgcgacatatggagcttccatggaaaataccattgcatcggcaaagcaggcgacggatgagatcaaaggcgaggcagatacacagagtcaggagagcagtggttctgatactggtgggaagagtagtttctggtcgggactggtggacaaagttgaggataccgtcaccggagcaaaagtaaatctggaaaatacactgaaccggtttatagaagcgattgcggtaatgcttgtgacttcctgtgtaataccgattcttgttctgttgttttttgtctggcttgtgaaactggtacttggggtaaatattacgttgccacagatcggaaaaaagaagaaagagggaaaaagaatatgaaattactgatgaaacagcgtgttttttcatggacggatacctatgatgtttatgatgaggcgggaaataaaaagtattttgtaaaagcagaattgtttcggctggggcaccagatccatgtatttgatgtttccggaaatgaaatcggtatgatcaagcagcgtctttttacgcttcttccttcgtttgatattgtgatcagtggacgtgaatttggaaatattcaaaaggaatttacgtttttcaaaccgcgttatgaaattgattataacggatggcgttgtgagggagatttcctcgcctgggattatgatgtgtatgcgggctgcagttcagtcgtgcatatttcaaaggaactgttccactggggagatacctatacgattaatattttaaatcccgaagatgagattccggcactgatgcttgtcattgcaattgatgcagcgaattgtacacagggaaagtaaaaaagttggaataacgaatcggtcgttattccaactttttcatttctttcatttatttgcaggctttcggaagtgaaaatttagttgccttgttgaagtttttgtatgtaacagatgtcataatcttggagtaggacatatcggaatccgctacaagagaactaagatactcgttcatgaagtctttcatgtcgatcgtctgttttaccggataataggtcttcttatcaatccagagagagatggtaatcggagaaagagaactgtaatcagaagatgttccctgtgtgttatctccgttaagtccaagttgtgcaagaagaccggcaatatcttcgcccttcagctgtgcctgaatctgtacggttgattttccgttgacggttacgctgtttttgacaatttttaaatccgaatacatatctgtggtctgtacagaactgagcatatcggagtagtcagacaaatccagtgttgatttttcataggttttgttatccgtagaggtgtactgcaacagtttgttgcctttttgttttgtgtaggagattacttttatttttgtgtccttaccgttggaagggattgtcatcgtcataacggttttggttttcagcggactggcaaaagcaatcgttgttgacgtggttttggtggatgtggtttttccctgaaccgacatgtccatatccatgttcattttcatctcataggatttcaatttttctgtggctttcgccattttgttgatgtactgcttggcagaaagggttgctgccgctacaggagtagtgccggcaaaagcgcatactgccataactgcggtaagcacagctgccagaaattgtttctttaactttttcataaaataaaacctccatattttttattgatatggaggtatcgtatcatctaaagatgtttttcgtcaataagacctttttcctacatttgctttatttggaatccattcgtgtcacaatcatgtgaatgatatatggaacaagaatcaccggaatggcaaggtaagccagaaaactgtaagctttctggatcaatgtcagtaagccgaactgtgcgatgccaaaatcaatcagacagcagatcagtgcgatgataatctcacgggaggagatgcgttttctggtgtttatgtccggagtttctgcttttggtgtcccatcggatacattatttttgccggacagggtccgttttttaagtccgtcggatacacgtttcaccatggcggcaaccatatttacggcggtggatacggcaccgaggataatcagaatggaaattaacggtgtcataaatccttttccaataccgttttgcaccataagcagtgtcggtacgctggtacctgccatatccgggcttgtggaaacggtcataattccaagacagaccatcgtcatcatcagcgcgttgatgagaaagccaagccccatgcttttgactgcatcgcccggttttttgaatactttggcgtgctggacaaataccgcaatgtttgccagctggaacgttccgtaaaggaatgcggagtaaagtgccttcccgaatggttgtgtggatgttgtcatctgctgtgcggttgcgcggatggcagaccatccgtggatgatattcggaatgtatacaatcagaagtccggcaatgatgcagatggaaagcacggaggctacccggcgcaccagatcggtgccgaaaatggcaacgataaagatgaaaatgccgatgatcagtgtacacagcagatacggaagtcctgtcagtgtacttaatgttgcaccgccggttgcaaaggcaaccgcgggagcgacacacatgacgcagatatagagcacttcaaacaggttggaaaaaactggggcgaattttccgtaaaaagcattgttgtacgagcggtaatcgtatacttcgtgtttcctggcaaagcgtatgccgtaggcaaaaaagataccgttatagagcatggcaagtgccggcatgatcaggcaccagatgccgaaccgtacatagtaactgtaaatctgggcgccggaagcaaatccgccgccgaaatgcgtggtgaaccagacaaaggcaacaccaaagatgatggaataggtgccggtgccggcagaagattttttatgcatttatctgtctgcctcccgttctttcagctgcttcattgcaagggtcagcatttcttttgttactttatatgggtaatgtctgatatcggacatttccgggatgcggtccatactttcctcccactgttcttccgtaatctcaatctgttccagggaggtcggaagctgcagctgtttgtttaatgtatagattttttcaaattcctcgtactgctggtcgacaagcagtgcaaacagaacaccgaatcccacgacttctccgtgcagatgtttttcttcaatgatcggataactggtcagcgcataaaaaatggcatgtgccagtccgctgttataatccggggtgaaatctttcgtcaggaaaatggaggcaattccggttgtcacgacgatggcaaggacaacctgctccacatcgtaggtacataatccttttttatgatcctcgagtgctttggcaccgtattccagaagcggattgcggcacatgacacttaatgctacaccaagggaggtgaaatgttccagctgttccccacgggaagagatggttgcctcatagtatttggcataggtatcgccaatgcccgcccacatatactgtgcaggagctttggcaatgatttccgtgtcgataaatgcgtgcatggcaggccgtacaaaaaagtttggttttaagaatgtgccgtcctcgttgtacatgatggataccgaagtacatgctgcacagttggaggcgatggtcgggaacgtaaagaccggcttatcgtcagtgatacacagacattttgcggtgtctagtgcttttccaccgcccacaccaaagaccatatcggctttgtgatagacgggaagctgccgcagtttttccacggtttcgtaggtacagtcactgccgtacagttcgacaccgatgatttctaagtttgtttttgctacataagtgcggatcttttcttccgctgctttaagtgcgcgtctgccaccgatcagaagcacggtgtttccgtaggattcacagaccggaccgattttatcgtagatgtgatcgccgatggaatagcttggcagatgcacttcgtaattttctaatttcataggttctcctttattttcaatatatacacagtttataccaattgcctgttactgttcaatagacactttcaaagttttgcttcgttctgaaatgaaaatgtaaaatacacttgacatacaatgtaaagtgcactatacttcgtggtgtaaagcaaacttgacaaaaatttccgtgaggaggggaaacatgaaaacaagaattcaggatctgcgcaaggagctgggagtgacccagagcgagcttgcagatgctgtggatgtgaccagacagacgatcatatccctggagggaggcagatacaaagcttctttagtgctggcacataaacttgcacagttttttcacgtaaccattgaagaattatttatatttgatcaggaggatgaaaacatatgaagggattttgtttattttcaggaagtaaagtgacaaacaatgaggaattccgcaagcagctgcaggcgaaaaataaatgcctgctgggattgattctgcttggcataatcagtgcggcagccgcttattatatggaattttcaggaaagatgaaagtagacgattatatgctgggtgtatattgtgggatcggtgtggggcttatatgttctggaattgtttttttgatccgcaataagcgtctgatgaaagacgaagagaaattaaaggaagcaagactgcaggtaacggacgagagaaatattgagattgggtcgcgtgcgttaaggatggcagcgtttgtgcttctgattgtaatgtattttgcctttctttttggaggattgtatgatccgatgatcagtaagctgatgtcgtgtatgatctgtctgtttcttattgtctatgcaattgcatggagagtactgaacaagcatatgtagaaatgaggatatatgaaaacagaacgaaagaaaatccgtccggattattatgataaattcagctgcattgccggccagtgtccgattacctgctgtcaggagtggaagattgcggtggatgcggatacgaaccgcagatggaagaaagtccttccgccggatacgatgctgggatgcgctaaaagccagtcgttggatcaggtatctggagattcaaaaaattgtgggaaaaatctcggcacttatacttgtatgaaagatggaatccgggttatccggctggacgaggagcatcgatgcccatttcttgccaaagacaaactgtgccgtctggttttggcgtatggggattcgattctctcggaaacctgcacgacatttccgagggaagtgcaccggtttgacgatcatgaagaagatacattgatgccggggtgtccggcggtgattgatctgtggcggcataaagagattacgtttccatcggtcgtgcacagcaatgctgacatttcaagtgaaaacacgtggacaaatgtgtcggaacataccatgtgtgtggaaaaagacgaaaataaaatggcgtttctgatccgggaacatattctggcgttactgggggatcatacggtttctatcgaggaggctctgctggaaagtttttatattctgctggagttgtataaaaatcagcccatcacaccggaactggtggaagaatatttttctccggagacactgctgcaactgcgcactgcaatcacacaggcaaagagcacaatctcttcgctggaaacctgggaagaatgcaatgaacttctgcaggatctggcggtcaattaccggaaagagggactgtatgagaagtttttgacacctgtgattacacaggcagaatattattcccaaattttcggaaggcagggaatccatgtgggagaagatatggatgccactaagggggaaaatgaggcaggacagctttgggatcggtggagacagttccggaatgcatttgcatcgtatgaaccgttgcttcgtaatttcctcagaaacgaagtgttttcggatctgattttgccagagaattttgagacggaaccggaagaggcagataatctggagcacatggtgctgcagatgcagtggattgcgattacgtatacggcaatccggcagagtctgtttttgaaatggagtctgggtgcagatgcagatgggataccggcagatggggcactcggctatgagacggtgcgggattacatggtcgtgatttcacgtatgacggggtatgaggatgacgatatccgcgagtatctggagaatagttttgcagagctgatctgggattggggatatttcgcattgatcatttaaattgctgtttaacagcggggtctggagccttttgtttttcagagggacggattttgtgggggagttggtttgggtataaggtttctcgatatgacggaagaagggggacattctctttctccagaaaaatttacaagttagttctggcgttggtttcaggtacgtggagtagagtttttcagtttacgcaattcactatgggttgtgagtgccagagcaagttgcaaatttgttcttccgaaagaaatgtcccccttcttcctgtggattggaaaactataagaaaaagaatgatgcccgcaaatcctgtctgtggaacaaacataaaggcaccagaacttgcagttaaagggacgcctcaaaaggagctacgaatcccatgaactggaataaacataaaaataccctgttaaatcacttgatgataaggccgggtatctatagatgaaaaattaaagttttaggtgacggtttttcgaaattttaatgcttgaaatcaggaaatgtcacctatatagtaaaaattgcctttccagataccgtttttttagaaaaagtggtatctggagaagcaatttttgatctatagagactttccggtatctgaatgttaaattttcagcgtgtaggtaccataatggtatcttttacatgaattttattggcatagataccacggcagaaactgtacttttgcctgaaatgccttaaaatcaaagatttgtgggaagtggaaagtgatttgtaccccctgttgtatccctattttatacgggttcctagaaaggcaaaattttgttaattgactgccctcgataaaaaaagtctcttgacagcagtaacagaagttatatattagtaataacagagctcaccacgcctctgactttcatgcgcaaccaggtaagacttttttgttttctaatccaatcaaaatctatcaaaaatcaagaaagaggtccctaaaacaaggagtttattttatagattttgaaaaggggacatttggaaataattagaaatacccagtaggggttgattttttcactgaattgagtatactaaaagtaggaacagaaatgttctcgatgtaagagcatcgttaaaagttgggctgcagatggagcaggataactttccatctcattagatgtcttaactgggcatcgagcttggcagcttggataaagttgtagtccacgtgggggacttaatgatttccacgtcgttatgggtattttaattgggtaccgaggctgacaaccagcagaaaactctttttcaaaagaaatttttagaggagtgtggttaagtatcacactcctctttacatatgaggggtaaatggcgacaaaagcagataagaaaaatgcaattagacaggacattatagattcagctgcaatatatagtcagagtttggccggtaaagcatttctatatgtatatggggaagatttttttgaagtttcttttccagtagatcattttcttcacttaacaggagtcgagacaaaactttcggcaaaggacttctataaaaatgcaaagaaggcaaaacttacaaatagccagttctattttgatgcaagacatccttatgcaaatgcaagaaagaagctgccttgcttaaagagaataccagagttgacaaatgatatggtatgtatccttaaagatatgcagacagttacaatcatatacaaggtgagtgtaactaatctggaatttacgttgggacttacagaaaatatagatgttaatgggaataagattaatgacttctttcttcctatgtcacttcgagtggaggattcatccgtcgaaaagagtaaggatggggaaatcgttgattttattttctccaaagatgcaagcattgcaaagtatgatacattattggtagaagataaga

SEQ ID NO: 980 - DNA, 24985 bp, Unknown
  gut microbiota DNA sequence
cggtaagaaatggtcgtaagatgccggtggaggcaagtgatttcacggctaagagagcattgttccttcctgaaatggcgcagtttgattatctggtaaatcttccggaaaatgttgcttctttgggactattgaatgtatcaggacagaccttggggagcctgggtgaagtggtaaataacgccatggagttggtggaacagcagagtgaccagctgacaggtgttcttccgaaaagctacactgatttctcggatgagcttcttggtgagttgctcagaatctttaataacaatgcattggatgaagtgggtggagatgtaatcggacgtatctacgagtactttctgaataaatttgcaaaaaacattgcgtctgacgatggtgtattctttaccccaaaatcactggtaaaaatgattgtaaatatccttgaaccaaagaacggaatacttttggaaataaagaccattggattgatacaaagatacgatacgcacagacaacagaatatgctaaaaatcgcttgatataaggctttttgaaatacttgatttctgaagccttctttttttgccttttttgcagtgcttgatgagcagcagatagcggttgggagaatgagtgggtgcaaacaacgaacgatagcagaaagaggtatcgttcaaagtgagctatcgtgtagagggtgttggttatcgttcggtgtgtgcaatcaagcaagtatcagcaaatataatgaaataacagataaaacgataaaatatcagaaaactacttgagacttgattcagaaagaggtataatataatctgtatttttgcgtttatttcacaaaccgcagaggtgattacatgattgataataatttaatggatgacaattacataagtattgatgatgctgcggcgtatttaggaataaagacagtcactttgcgcaactggataaagaaaaaaccagacattccggcacatcgtgtggggaaactctggaagtttaagcgttctgaacttgatgaatggatagccagtggaaaaagcgcagagtaatcatcaatgcattaggaaggaagaattacgatgcctgagatcagattatataacgaggactgtatagcagctatgaaaaaagtggaggataaatccataagcctgattgttacagatcctccgtacaaccttggaaatttcatgaagaatagagataccaatcttagcaaaatgcgagataacttttttggttctgccggttgggacgatatggaatttgatgagtgggaaaaatcaatggatgactttttcaaggcggcggcaaaggtcatgagaaaaggcggtacaatgattgtatttatggcaattattaaagtggaaacaatcattcggttggctgaaaaacatggcttttactataagacgacgggcatatggcataaaacaaatccaatgccaagaaacatgaatttgcattttgtaaattcaacagaagcttggatatatttcacatacaagactcgaaccggaacctttaataatagtggagctttgattcatgattttatagagacatcggttactccgaatggagaaagaagatatggtaagcatccaacacaaaagccggaaagtttaatacaacattttgtagaaatattatccaatgaaaacgagtgggtttttgatccatttatgggaagtggaacaacaggtgttgttgctaagagaacgggacgaaatttcattggagtcgaattgaataaggactattttgaaattgcaaagtccagaatagagggaaaatcaaatgaaaccaacagtaattgatttatttgccggtgtaggtggcttatcgcttggatttgaaatgcgaggattcaatgtgcttgtggcaaatgaatatgataaatcaattgctgctgcatatacagcaaaccacaaaaacacaaaaatgattgtcggagatataacttcgctggatttagataaaacctttggatcgtataagggaaaggttgatgttgttattgggggtccgccttgccagggattttcacaaaaaggtcagagaaaaaccattcatgatgagagaaattttttgtttaaatactatgttgcagtggtaaaacttgtttctccgaagtattttgtgatggagaatgtaccaaatctgcttaccgccgaaggtggatatttccgcaaagagatagaagaattattcaacggtatggggtattcattacaatatggtgtattgaatgcatctgattatggagtaccacagaaccgccgtagagctgtaattattggaaaattaggaggagatgcaccatgccttccgaagccaaagagcaatacagttacgatttgggatgcaattagtgacttggcatttcttgagtctggagaaggacaagacgagcaagcatacaaaatgccgcccgaaagtgaatatgaaaaacttcttaggaaaaattcagaggtattatacaaccatgttgcgaccaagcattcggcattagccttagagagacttgctctgattccaccgaatgcaggaagagaggtattacccaaagagcatcttaccaagtcgatttatagtggaacatggactcgaatgagaaaagatgaaatatcagtcactattacaacaagatttgatacgccgtcttcaggaaagtttacacatccatttttaaacagagcgattacagttagagaggccgcacgtattcaatcatttccagatacatttcgttttgttggaaacaagggatctcaaatgaaacaggttggaaatgctgtgccacctttattggctgcggctgttgccgaggtaattatgaaggatatgaaggaggaattaaagaatgaacagaccagataatatatcggtatatgatgagcttgacttaaaacttggaatcaaatcatcacttcctcatgttaaaagtacaattgcactggctatcttactgtgggaatgtgccgacagaccttcagagttaatttattctgtacaaaataacgatggaattgtaatgacagatgatttggatcagtgggtcattgattacttggcagatatttgtacagaagaccagattgacaatgaaacgctgatatccgcaattaatgagaatcagttgtttaaatctcaagtggaagcactaattgttgcatttgagcttgtctggaaacttgcaaaagtcagttttgttgatgaaaacaaggcagcaagtgctgaacgcactggaggtaccagataccctaaaaaactgatttacacaataaatgctgatattattcactgcctgattgaaagcaaccgggatgcttatgtcagagtattgctggcgtggatagggttcaatattaatagtgatccagaatgcgaagagcaactgtgccaaatgttgtctgttctatcggagggagctgtatttaaacttaccgatggagagcgagacgttatatttaatcagaatagtttatacagaaaactattagagacacacgactcagttgatatcaatggggataaagaagctaagggctccttacgcattctaaaatcgctactgtcggatggactaaatccgttcttgaaatattcaaatggagttgttagtactaacgaacaaaaagccgccgaattagaagcgtaccaagaaagagtggatacctttttgcgtttgtccgcaacaaaagttattgggttagaagatgttgacgcagcgaatgaaggcattgctccgcaagaatatgaagctaatcgcttgacgacaggatgtaatgtattgctctatggagttccgggttccggaaagagctatactatcgaacatgagtattgtaaaccaggcagtcaggttgagagacttgtttttcatccggattacacatactccgatttcattggccaaatcttaccggcagttgatgataatggtcaggtaagctataaatttacagcgggtccatttaccaatattttgcgagagtcgtataatcatccgactacggaatatatccttatcatcgaagaaatcaatcgtggcaatgcgcctgctatttttggcgaggtatttcaattacttgatcgaaaagtcgaataccgcgaggttgatgacgatggatttcctatcggaacaagtgagtatggtatcacaaatgccaatattgcaaagattgtatatggtgatgaaaagaataaagtgcgaattccatcgaacctctctataattggaacaatgaatacatccgaccagaatgtgtttactttggatacagcattccagcgcagatgggatatgcgtcttattgaaaataattttgaaaatgtagatccatcgttggcagatgcgactattttggatacttctgtgacttggaaagacttctgcacagaaatcaacaagattgtggtaggaaacggtgccagaatgacatcagcagaagataagcgtctgggtgcatattttgtacatctgcgagatctgaagtttgatgaaagaatgggggatcttgcagatggagaatatgacagtctgcgtaaaaaggaaagtcataagcagctcacagatactgagaaagcaagacttgcagaagtacgagatgcgatgaagcagaatcgaaaattcccagaaaaggtaattaagtatttgtgggatgatgcctttaaatttaatcgagagattatatttgaaacaacagagtaccaaagtctggaacaggttattcgagcatttatgtatgctgaaaaacttgataggtttaagatgtttaaggagaatgtgaggagtgcattcacaaatctggaagattaaggcggtgagttgatatggatttagatgaagcctttggaaagctttcagaatttaatataaaagatcactgccatgtgaatacaaatgaagatggagaccgctttgtcggcattaaggccgataccgatgatgcgatggtttatttccctatcggatatcaattaccagacgaagacaaagcaatcaggaatgatatcaggcatcttatacaggttctgtccgaattcacaacgcgagatgacagactgcttgcggttaacaaatttgctgcaccacaatctgttgattttccaatcaatgcatacacaagtgtgatagagtattattttgatattggtggaaaatattatgtagaaacggaacaaacatataaagtggctccgactggaaagcaagactgggcaaggactgcaagaaaacaaatgccgctggtgcagtgcaaaaacggagtcagttcatttatatatacaaattttgaggtgcgttccactacgccaaatgacacaaagctcataacgcagattaacaaatactgtgtgtatgaagcgtttgaacgattgggctggctttatgttccgtataaacctgaaaaaccgagcggatacccggatattaagacatcaattcaaatagtccgttctaaacttgcaagcacctacgatgataagaaaaagcggctctttcagggaatgaaggatatgcttgaatacatggatgagaaaacatcagataagcagttctattttggcacagatgattttgaccatgtgtgggaaaaattgatagatagagcatttggagaacgggataaggaaaaatattttccacgttccagatggctgcttgattatggcaaatataaagaaaagcatccactgatgccggataccattatgatttataatgacaaatattacatcttggatgctaagtgttataaatacggaagaacaggaattccagaccatttgccgaatggatcatctatcaataaacagattacctacggagagtatcttgaaaagtataaaggcgtgaaaacagattcactctttaatgcctttattatgccgtacaatatggaagaaaactattttaagctgaattcttttgtaggaaatattggagaagccattggagactggcgatataataaaaaaccgtatgagcgaattcagggtattgttatggacaccagatatcttatgtatcactattcaggaaaaccgttgaaggaaaaggtggctcttgcagaatgtattgaagttgttttgggaagagatgagatcaaatcaacaggagaaaatccgatagtaccatcatcctcccctgttacatatactactatgcctaccaggcctgcatcaatggtagcagaatcaccagcaccatacggtgtacataatgaataataaaaagcgaaaaatccctttacttggaattgtccgagtaaagggattttttcagttttgttctttttcacgctttctttttctgtatctgtcctgggtgactcgattacagcattctgtgctgcagtatctgacctttgtggaggttgttcgtaccagaaagtattttccacagcgaggattgtcgcaaggacggtataattctaaatcaggccttaaataaaatatggaaaaataagcagcacataacaatgaatcaactttccaggagggagacatagttttagtattatacactgggtgtattcctccgagattggcattgatttcttcaccgactatataatcagctatctcaatcaaaccggctttcaaattgttgctgagattttcaatgtgcggatcagtacaaaaagtcaaattcgaaaggtcaatggctgcaatctcatgaaaaaaatgaaataaaacttctgtgatttttctattcatgccggtatcttcgccgttcacatacattgcagtgatgtttttgaatatatcagatttaaatccgggaacggaggagtagccacctataatatcattatattcagatatattgaaagaataagtgccaaatatagagtcatttattgtaaaaaaatcaccgtcaaattcttcttgcttgcgcatttgcgaaagaataatgggtggattctgcaataaatccacgtatgaatgatggcagctaatatattttatatcagccatgtcagtttcatacgaaaaattctttgcaaataacaacactacagttagctgcaatatttttagataatccttgtgtatttcatttgccgctgtcatcagttcaacagttagtcgtaatctatcgataatattgtaaagtgacagctcatcaatctcttgatagcccattgacgatataggaaagatgaatccgttgtctttcataaagtgcgccatttcctttgaatcttttccaggtaatgctataagttcacccagaatattagattgctctattgatccattatcggaaatgcggactaagccctttttggcggcatatccgaatactcttttttgatctggatgtgcctgtagtttaaatgtacgcttaggctccatgcctggggttatatgctcaatgtcttctacgcaatcacaagagcagctttcaaatttgaacagtatgttttcataaaaattttctttaatttcaggcataatgtagtcctcttcttgaagtgaaagtcatgcaatttggcattatttttttgtctcaaataaataatgccaaattatatgtatatttaggattatactaaaaagccatctataaatcaactcaaataacattactagacaataaaagtaatgtacaatcttgctatcttccattactatttcgttttccctatactttaagtagaacaaaactatgttctggcgtctcagcgttcatcccctgatcaaggatgcccgaagcggtgagacggacaacaattgaataaagtcaacccatcgggacggttggccagttaagaagtgaggattcattcttatggccaattatgggaagtcctgtgtggattctcacttcggtatgagaccgaaggagggtctgcgctatggacaatctacagacaaacaaaaagtactttatcccaatggaggtaacaccagaaatcatcaaggcattcaatatcaatggcgaagaggtacagtggacgaaaatcggaaacaagtcggtgagagtcattatggttccggctacggaggagcagtattacgcatatatgcgtccgctgtggcgtgaggacaagcagaatcagagggcaagcaaacaggaagacgagggcaaaatgaagccagtgtcactggatcagctctacgaagatacagagtttgagacagccgatcaggctacagatattgaagctgattatatgaagaaggttttgcttgaggaactgcataacgcactggacgagctggaagaaatcgaccgtaccatcatggaactgtacagccagaactgcaccgaaacgcagatcggacaggctgtgggtatgagccagcgtggtgtcggcaagcgtaaacagcgtatttttctgaagctccgcaccagactgaaggatttcagataaggaagatgcctgctgtggtacatatcattgcaccacagcaggttttttatattttttcaaaactgcggttcttaaaacagacccggatgtcctttcactctcagaggggcagtaaagccgctcggaaaggacggtgtcaaacatgatgacaaccaaatgcagattaggcacaggatgccgcgagagcagtgacctcgacagagaactgtcggatgttttcattgcaatcagtgtcgtgtcaagaagaagcgcagacaggctttctgccggcgatggaaaactgaatatggaaggaggcagtccacatgggaaaagtaagcgaattgtctatgctcgtggatgaactgaaaaagtgcggtgaaacacttatcggtatctcagaggaactgacagagctgttcagttcgacagaactggaaaagcagcctataaaaaagagtgctgctaagatgaaggagccggagccgcctgcgaaaaaagagctgacgctggaagaagtcagagctgttttggcagataagtcgagagccggatttaccgaacaggtcaaagagcttctgaaaaagcatggtgcggataagctttctgcagttgacccggcagagtataaagcactgcttgcggatgcggaggtgattggaaatgccggataaacacgcagtcctatcagcatcatccagtcacaggtggattgcctgcccgccgtcagcactcctttgtgcaaaagaaaaggatgtgtccagtgaatttgccatgcagggaatggacgcacacagtttgtgcgagttcaaggtaaaaaaattgcttgggcaggcagtaaaagatccaaccgaatccctgacctacttcgatgaggagatggcggactgttccgatatgtatgcacagtatgtgctggaacaggtggaagcatccagaaagaaatgcagggatccaattgttttgatagaacagtgtctggacttttccaagtgggtgcctgagggatttggcaccggggactgcgtgattgtggcagatgaaatgctgacaattattgacatgaaatacggagtcgggattctcgtttctgcagaaaaaaatccgcagatgatgtgttacgcattgggagcattggctctgtttgatggtatttacgatatcaccgaggtggcgatgacgatcttccagccgcgaagagacaatatcagcacatacaccatttcaaaagaagaacttcttaagtgggcggatgaggtattttcccctgccgcacagcttgcggcaaatggcgagggtgaattcaaagccggaagccactgccagttctgcaaagtaaaagccacctgccggaagcgtgcagagtacaacctagaacttgctcgttatgactttgagatgcctgccaacctggaagatgaagagatagaggtcattctttccaaagcagacgagcttgtttcttgggtgggagacatcaaggaatatgcactccagcaggcagtcagcggaaaagagtggacagggtggaaactggtcgaagggcgctcgaaccgcagatatgtaaatgaaacagccgcagcagacaaagtgcagtcggcaggatatgacccatatgaacataaggttctgggcatcaccgctatgacaaaactgctcggcaagacaaaatttgaagaactgctcggcggtctgatcgagaaaccgcagggcaagccaactttagtacctgtgtcggacaagtgtccggcaatgaatacagcagcaaatgattttaaggaggacaactgatatgtcaaagaattttatgaatccgaccaagataatcaccgggcctaagacccgctggagctatgccaatgtgtgggatgccaagagcatcaacggcggcactccgaagttcagcgtatccctcatcattccgaagagtgataccgcaaccgtaaacaaaatcaaggcagcaatccaggcggcttacactgagggtgaatccaagctgaagggcaacggaaagagcgtacctgcactttcggtactgaaaaatccgcttcgtgacggcgatttggagcgtccggatgatgcggcttacgcagacagctactttatcaatgccaacagtgcgacagctcccggcattgtagatgctgaccgtcagccgattcttgaccgcagtgaagtatacagcggtgtgtatggtcgtgcatccatcaacttctacgcttttaactctaatggcaacaagggcattgcctgcggcctgaacaatctccagaagattgcagacggcgaacctcttggcggcaagtcccgcgttgaggatgattttgcagatacagcagatgaggacgatttcctcgcataagaaaggacaggtgaaaatctatgacaatgttgctctgcttcagcatcacattcctggtttcggccatccagagctttatctttgaccgcagacgtgagaagagagagcaggaaaaggaacagcgtgatctggaataccatgaggaacgcatgaaaaatctgaaataagatgagtgcggtgggcggcaggattttcctgccgtctgctttgttgtaaaggatggtgacgatagcactccattgggaaaagtatttccagcacatccttgagaagtacaatggaatttacaaggtacagatgccgaaggtgacacctcatgtatgcagacataccttttgttcaaagatggcaaagagtggaatgaatcctaagagcttgcagtatatcatgggacatgctgatatcagcgtgacattaaacatatatacgcatgtgaaatttgaggatgcagaggcggagatgaagagagttgctgcaatttaaatgttgtaaataatgcaaaggtgtaggggtacgttttggtatttgccccccatttgtacccctgatttctcaaaaatatgagattttatgagaaaatatgagagaatacatgattttgaaaaagttccataaagccagtaaaatcaagccttgagacgatatgagaggatataagagattataataaaaatattattcatctgccacgatgacatctttcctatgaattttaattatatagaacccatcctttatttataagtttataatgcccgatcatataaaggcttcaatagaacgattgtttcacaaaataccggcaatgaaatttccacttattagcaagtcaagcttcccaaacatttatcactttactgtaaacactcattgtatgcatttccttccgggagcgcctttaactgcaagttctggtgcccttatatttgttccacagacaggatttgcgaaaatatgtttctcaattatattatctccagccaacaggaagaagggggacatttctttcggaagaacaaagttgcaactgcgccgtagttccatcacataacgctaatggcataaaagtaaaatatttgtcaaacttacctgaaatcaatatcggcgctaacttgcaaatttttctgtagaaagagaatgtcccacttcttccgtcgcatcgagaaaccttatacccaaaccaacttccccacaaatccgtccctcctgccaaacccaaaaggtcccagaccacgcagttaaacagcaatttaaaagaaaacgaacagatgaaaaaattatgcagatatagtataatagacaataataaaccaaaagagaaacttgccagactgggggaaacatggaaccacaaaagcagaatgacggtgtgcgctacaaactggcaaatgccatgaaagaatgtatgcgcactgcaccggtagaaaaaataaccgtaaaagaaattgtagaaacctgtgggttgacgcgtcagacattttatcggaattttcaggataaatatgatctgatcaactggtattttgataagattttgctggaatcatttgagcacatgggagaaggaagaaccgtctacgagagccttgtcaacaaatttgaatacattcagatggagcagttgttttttcgggcggcattcaaaaatgatcagcagaattgcctgagagatcatgattttgaactgattcaggagttttacacaaagcagatcgaaagccggacaggaagaaagatttccaccgaattgcagtttgaactggaaatgtattgtcttggttcggtttatatgacggtgcagtgggtgctcgggtatcggaaatgtacgccagaagagctggcacatgcgctgaccgaatccatgcctgtgcggctgagggaagtatttcaaaaactgggattaatatagaaagaagctgtaaaatgcttccactttgtctataatttaaaacgccagaaccggtatttgccggaactggcgtttttttcatcagtgactttttacagtctactttatattgaattgcaagaaattacatcagtttacggaacagagctttcagatcttccacactggcatcttttggatttccaggtgcgcaggcatcggcatgtgcggattctgcaaggaactgtaagtcttcttccttcagtgcttccagtttggtcggaattccgacatcgacggaaagctgctgtacggcatcaattgctgccttgcggtattcgtccacagacatttcatcgacacctttgacacccatggcgcgtgcaatatcacggtatttttcaccggtgcagtcggcattgtattccataacgattgggagcatcattgcacaggcaacaccgtgtggagtgtcatagacagcaccgagtgtgtgtgccatggaatgtgcgattccaagtccgacattggaaaatcccatacctgcgatatactcgccgagtgccatgccttcgcgtccctctttttcgtttgcaacggcactgcgcagggatttggagatcagctcaatggctttgaggtggaacatatctgtcatttcccaggctgcttttgtagtgtatccttcgatggcgtgtgtcagggcatccataccggtagaagcagtaagtccctttggcatggaagacatcatctcaggatctacgattgcgataattggcatatcgtgtgggtcaacacatacaaatttacgcttcttttccacatcggtaatgacgtagttgatggtaacttctgccgcagtaccagcggtggtcggaacagcgatgatcggtacgcatggttttttggtcggggctacaccctcaaggctgcgcacatcttcaaattccggattggcaatgatgataccgatggctttggaagtatccatggaagagccgccgccgattgcaatgaggtagtcggcaccggaatccttgaatgcctgtacaccgtgctggacattctggatggttggatttggtttgatatcggaataaatctcatacacaagaccattcttgtccagtacatctgttacctttttggttacaccaaacttgatcaggtcaggatcagagcagacaaaagctttctggaatccgtgtgcttttgcctcggttgcaatctcctgaattgcacctgcgccgtgataagatgtttcatttaacataattctgtttgccatagttgtaatcgtctcctttgcatacattcatgatacccttattgtagcaatgaaaaatccgggatgtaagttacaaaagcagcagattgtaacatgtggtccaaaattttttttcttgattttttatggggaaaggagtaatctgtcaatgggaatgaagttctcccaagggaatttccctgaactgctgaacgataagctgatgacttctacgattgtttgatcgcagagaccatcggctttttttatttgctgtaagattttgaggatgtgcaggggaaggattgatgcaggatggatgtagcagtaaatcaattgttcatatgtcgcatgtaagagacgaaaaagggattatgaaagaagaggaaaaccatgaatccgtcacatgatttacagggattaaagaaaaaagcaaaagaaacatttttgtatgtgctatctgcgctgctccttggcattgcaattggtgccattgacgcggtatttggtcgtgttttactttttattacagattttcgttcggcgcatgtagttgtattgctgccgtttctgccgctggcagggcttgggatcgtctggttataccggcatttcaatgagacggcgtcaaaaggaatgacgcttgtcatggaagccgggcagggaaagcgggagtcgattccactggcactcattccacttgtcatggccggtacatggatcacacatctgtttggcggaagtgcggggcgcgagggcgttgccgtgcagatcggtgctacactttcccatgcgtttgcccgcagattccacttcccggacaacggcaggatagtattgattgcgggaatggcagccggatttggaggcctctttcagactccgtttgcagcagtcttttttgcgatggaagtagtggtgagtggaagtatggcatattccgcattgcttcctgcggcaattgcgtcttttacggcatctgcaacttcgcatgctctggggctggaaaaattttcggttcttctttcgcagaccctgtcattgacggacacaaagacggtgacgtatctgattctttttggaatcttgttcggtctgacgggacggctgtttgcggtgcttttgcaaaaagtaaaacagtttatgggaaacgtattggaaaatccatacaagagaatcggctttgtgtcgatcccactggcggtgttcctttttctggcgtggaacggacggtactgcggacttggaaccaatctgatcgcgcaggcattttccggaggagaactgtatacgtttgactggattttgaagctgctctttacggtactgactttgtcgatcgggtttcagggcggagaggtgacaccgcttttttccatcggtgcatcgcttggttttgtgctgggaaatctggcaggactgccaccgatagtctgcgcggcacttggatacgcggcggtgtttggaagtgcaaccaatactttgctggctccggttctgatcggaatggaagtatttggtgtggaaaatgggcttgcattttttgcggtctgcctggtggcatttctggtcaatggcaaccgctgcatttatacggcacagaaacggtctttttggtaaaaatcccttgactctcatcctggttcatggtttatagttctgccagaatttaaaaatcgaggtggaaatcatgaactgggtgattggaaaaaagcaaaaaagaagaaacagaataaaagcacaattcgggaaaaatccaatggagctggaagcgtgggaatcactggagaagcgcatgcgcgaaatccgtatgtatgaagagctggtggtgcagggcgtaaagaaggaagaatggcaacgtgcaggaagcgtggataccgttacgtggaatgacctggagatggatcgtgtatttgcacggatcaaccatacccggacgtatatgggagagcagattctgtaccatcgcctgcacaatatgcagacacggcagtcctgtgaggatatggaaaagaggatttcgtttttttcgcgccgggaatccatacgcacagagatagaagaaaaactcatgcgtatcggcaagcagaaagaaagctgttatctgccgtttttcctgacggaagaaattaacccactggtcattcccggtgcaatattgtattttttgcagggactgctggctttttgtctgatcggggcaattttgctgcgaagtaatttgtgggcaactggttttcttgttgtggcggtagtcaatctgcttatttatctgcatacaaaatgcaaatatgagggaaatttgtttatggtatccagtttgaaagaactttttgatttttgcaactggattgtaaaaaaactggaaccggacagaccggaaattttgcatgcattggagaaaactcaaaaattatcccaccggatgctgcgctggcagactagaaaataccagagcatatccggggatgtgacggggatcctctgggattatattgcgggaattacgctgcatgatgttgtcgcattttaccgtattcaaaaaactttgcgcgcgtgcaaaaaagagacgatgcaactgtatacatttgcaggagaaatcgatatggagattgcgatcgcatcctttcggaaaagcctgccgcaatggtgctgtccgtcattgcagagtgatggcgcaatcagtgtggagaaaatccgtcatcctcttatggcagatgcaattccgaatgattttgtcctgaaaaaaggtgtggtactgaccggggcaaatgcatctggcaaatcgacatttatgaaagcggttgccatcaatgtgattctggcacagacgatcaatacctgtgttgcaaaaaatatgaaaatgcctgcaatacaggtgatgacctcgatggcacttcgggatgatgtgctgcagggagagagttattacatgcgtgaaattaaatatttaaagcgcatgctcgatgaattggaaacgggtgagcccatgttgtttgtgattgacgggattttaaaagggacgaacacgcgtgagcgtctggtggcatccaatgccattttatcctacatggtgcagaaacagggctttctcctgattgctacacacgatctggagttggtgtatgccttaaaaaaccgatacgacacttattgttttgatagtcaggttcatgaaaaagatatcgtttttccatacaaaatcagacgtgggatcgtcgggaaaacaaatgccatagatttgatggaactgctggattttccagaagaaattacagaccaggcacggcgtgaggtgggaaagagataattgtattttcaaatatatagaaggaaggaatgggacagatgaaaataggacaggcagcgcaactgaccggattaaccatcagcaatatccgcttttatgaaagaaaggggctgctcgaaccggagcggaatgaccaaagcaaataccgcaattacagtgaacaggatatccggcggttaaaacagatcattttatatcggaaaatgaatatgcccatcgaaaaaattgcctcgatgctggatgatccggtggtttctgaggaacttgtccggcagcagttgcaggagttgttaaataagcagcaggaaatacagggttccatcgacctgtgccggaaacttgcagcagatcatgcctacgatggcgaaaatattgatttttacctcaactatgtaaaagaagaagagaaaaagggacgtagctttgcgcaattggaggaacttgtcggtgatttttcggagtacagcgagttttataaagtgagtggcgatccggttttccagtttctgttttgtaaggtcaaaaatcagaagctgtttggatgggtatggtttgcactgtggatcgcactgagtgttttttttattgtggagtttggattcggtgacgggcatatgccgcttgtggtaaaagcgatcgttatcggggctgtgcttgtctttttatggtatgattttatccggtattgcagaaaaaagcgaaaatataccgttaaatacaggaaaacaacagcaccataaaaggcatggtcacaatggcacacagcgtggtcactacgttaatcgcgctggcatagtgtgcatcgtttccgtacacctggcacatctgtgtaacggtagatgcagatggggtgattactgcgagaaatacaatgagcatgatcttttgagcatctgcagacagtgtggcaagatggctgatttttatgagaaacagtgcaatcaaaggaatgacaagcattctgagagccgatatgaaatatacacgtttatttgcaaaaattgctttcaaatccattccggcaaaaagcattccggttacaatcatgctggccggtccgatcatatttccaacactggagatcgtatttgtaatgagttccggcagccggattctggtgaaaaataaaatggcaccaatggcaatggaaatcatattgatgttaagaatgatttttttccagtcataggaagattcacggcttatgattttcttgcagtgtgtccagaggaaaacaagctgcacgctcatgaagacacatccgtaaagcacccatttctgtcccagaacaaatgtcacgataggaacaatcagattgccggagttggagtaatagatagaagctgtttccacttcatttaaagaaaacagttttcccatcacgaaaacgacaagcaggagaaccacctgaagcaatacggatgcagcaagcgcgatcagaagaccatttacggtttttttagtatagtccacctgaaaagcgtttataatcacgcatggaatgatcaggtacagtacgattttggataaaaccttactgtcttcttccttgacaattcccgcctttacaataataaatcccatcagaatcatgagaaaaagttcaaaaatctgttccattaaaagaatactgatctgcataaaatcaccctgtctttctaactgcctatcatagaacttagaaaataaaattgcaagagcataccggttatttgcaaaagcagaaactttgtaagtttatagttcctactttcatgatagaatcatatcctgaaacgtgtgatatgacaacacaaatacgtcctgaaacgtgtaacatcataacacaaatacgtccttgaaaatgttgacggctctgccataaaggaatattatataaagcaataagaaatgctgcatataaattccactgacagggaggacgcacgatgaaacgttttacattggaacaattggtgcctgacacaataaacttgttgataccggaacaagatggcgtatgttttgaagaatttttatatcagcttcgaccaaacgaacgaaaggggaattcgtgatgaaaggaatgatgaaagtcaaactggtgattgctttgttggtggtaatcgctgttgcaattttttattatgtttcacttccggcaattaacattcatgcaacagaaacctggaaatttatttttctgattttggcggtgcttttcgtgctttatattgtaagaaaggcaaagatagcaggacaaagcaagattgaactgtcctttattaaggaatatacaggtttaaagattggagtgattgtctttttactgtttttggcggtttatgtggcaggctccattttgtcctcaccgattgtcaatgcagcaaaatatcagaaacttttaaaagtggaagagggggaatttaccgaggatatcaaacagatttcttatgaccagattccactgttagatcgtgactcagcatccattctgggaaatcgtaagatgggtagtcttgttgatatggcgtcgcagtttgaagtcagtgaactttattcccagattaactacaaaggggaaccggtccgtgtgacaccgctccgttatgcggataccatcaagtggctgacgaaccagaaggaaggaattccagcctatattaagattgatatggcaacgcaggatacggagctggttcgtttgtcagaaggcatgaaatatacgccatatgaccattttcatagaaacttaaagcgtcatttaagatttcgttatccgacctatattttcgatgatatcagttttgagattgatgaggagggtacgccttactggatttgcagtgttgcagattataagattggtctgtttggaggtaagaccatcggcagagttgtgctttgtaatgctgtgacaggtgagtgcactgattatgcggtaaaagatgtgccaagctgggtagaccgtgtttattctgccgatttattggtacagctttatgattattatggatctttaaaacatggatttatcaacagtgtgttaggacagaaggattgtctgaccaccacgaacggttataattaccttgcaatgaatgatgatgtctgggtttataccggagtaacctccatcacaagtgatcagtccaacgttggattcgtcctgatgaatgagagaacgatggagacaaaatattatcaggtagaaggcgcaattgaagattctgcgatgtcctctgcggaaggtaaggtgcaaaaccttggctatacagcaaccttcccactgttattaaacattacaaatgagccgacctatttcattgcattaaaggatgattctggtctggtaaaaatgtatgcgatggtaaatgtgcagaaatatcagattgtagcaaccggtgattctgtcagtgaatgcgaaaagaactatatggaactgatgaagcaaaatggtgtcaatgcggaaacaaaagagagcgacagtgtcaagaaagcaaccggtacgattgcaaaaatcaccgatgcagtggtagaaggaaatacgcaccaatatattttgctcgaaaatgattccgatatttacgatgtatcggtagtagattaccttgatatcgtgcgttatggtgtaggagataccatcacatttgaatatatggagggtgagcaggccaataccgtgcttgggattgaaaaatagaactatgattgtagttacagaataaggatagaggggcaaggtaagcccctcatattaagaattacttaactctatcgtcataccaaagcagatattttgtgagtagtatacctgtgacaaatccgaccatcgcataagtggctgcatcaatagaaatagagaacaattggacaattggtgcctgacacaataaacttgaaggtaagcaatattcaattttgtaaataagcatatcattcagctaacgaacgataaaaactcatttcctcctcggaaactgccttattttattgcagcatttcctgcttaattttttcgtataaaggacgaatggtttccggcacttcctccaattcgtccgcaatctgatccagaggtttgcctttttgaatttttttacgaatctgctctgacaatttttcttctttcccgatctctttcccgatctctttcccgatctcttttccgatcctttcgccatcctcaattgcttcggcgcgctgcatttccagccgtcgttcaaatgtatagtctaatgtcatcacgtgcattacctcctccttgtgtaagccacagaatctgtatgacaacacatcccatatcaatacaaatcctgcttataacaaaattaagttaaaataaagttgaattttaaaagcaagactttccgggataatttgaaatgaaaaaataaaatatatgatatagacggctcgccaagtactgtccgcccaagctatggaaaaatatgtatttgctttgtgacaagtatagcatttaaatgcctgagatgcaacaaaaaccttccacatttatgcaaacagtaacgtcctgaaaagtgtagcactatcacataaatacgtcctgaaaagtgtagcaccataacacaaatacgtccttaaaaatgttgacggctctgccataaagaaatatgatataaagtaataaggaatgctacatataaattccactgacagggaggacgcacaatgaaacgttttataagggaacttcttttccggtagggaaagttgatttcatggatctgtatgcgttcaaaatttatatgcttgatgtcgggcttctgcttgccatgacagatctggatgcaagcgttatcattgatggaaacaggatttttacagagtttaaaggggcgttgacggagcagtatgtgctgcagcagatgatagcggaactgggtgtggaaccatattattacacaacggcaaattctacaggcgaaattgatttcacgctgcaggcacccggatcggtcattccggtagaggtgaaagcagaggaaaatctgcgggcaaaaagtctgcgggctttttgtgagaagtatcatcccaagcatgcggtgcggacttccatgtcggatttccgtgagcaggactggatgacaaacaccccgctttataatattgaccggattggagaatacctcaaatgagcaccataactcggctggaatttaaaaacgggcaaaaaaagaaaataaatatatcaaaaacgggtcaaaatatgaaatgttcgattgaaaaaacgggtcaaattttgttatcatggagcatatggaacaaatatgagaaataacgaggaaaatcccatgaaaatgacaaccctgtgttacatagaaaaagacggaaaatacctgatgctccaccgcaccaaaaagcggcacgacatcaacaaagacaagtggattggtgtaggcggacatgcagaaggcacggaaggaccggaggactgcctgttacgtgaagtaaaagaagaaaccggcctgacactgacttcctaccagttccgcgggctgatcacattcatcagtgatgaagcgccggagccggaagaaatgtgcctgtttactgcggatggttttaccggggagctgatcgagtgcaatgaaggcgatctgcagtggatggacaaaaaagaagtgcttgcgcttccgacctgggaaggagatgccatttttttaaaactgctgatcgaggaagacgagcaccgcttttttacacttcggcttgtttatgaaggaagtaaactggtagaaaaacaattgtaccggtattcatagaaaacagattaaatttgaaatcattagtgctcaaagattactctgcaaataataccttcgcaacctcatataaagttttgccttgcaaatggtaagaggagctgtacctggacaggagaggaaaggaataaaaaatggaaaacgaaaaccagaccccgcacaagcgccgtgtgcattataaaggaaaatacccaaagaaatttgaagaaaaatataaagaactacagccggaaaaatacaaagacaccatcgcgcatgtcatccagaaaggcaacaccccggcaggtatgcatatctccattatggtaaaagaaattcttgatttcctgcagatcaaaccgggacagaccggttttgatgccacactcggctacggaggtcacacgaaagccatgctcgagcagctgcaggggcagggacacatccatgcgaccgatgtcgacccggtagaatcggcaaagacgaaaaaacgtctggcagagcagggatttggcgaggacatgctgaccatccatctgcagaatttctgcacgatcgatgagattgcaaaagaagtgggtggatttgattttattctggcagatcttggcgtttcgtccatgcagatcgacaatccggagcgcggattttcctttaaagtggacggaccgcttgatctgcggctgaatcaggaggcaggaatcagtgcggcggagcgtctggatacgatcagccgtgacgagcttgccggaatgctttatgaaaattcggatgagccgtactgtgaggaacttgcaaaagcgatcaccgatgagatccgcaaaggacaccgcgtggataccactacaaaactgcgcaggattattgaagacactctcgattttctgccggaaaaggataaaaaagaaaccatcaaaaagacctgtcagcggacgtttcaggcacttcgcattgatgtcaaccgagagtttgaggtgctttatgaatttatggaaaagctgccgggtgctttaaaaccgggcggccgcgtggcgattctgacattccattccggggaggacaagctggtaaagcgtgctttaaaagaaggctgtcgcgcaggcatttattcggagtatgcaaaggatgtggtgcgtccgtccgcgcaggagtgtgcgcagaacggacgggcacgatccacgaagatgcgttgggcggtacgcagcctgtgatcctgatacacaatcataattgccattatttgagccgttgataggtgatgggaatttcttttgcacctttacggtaggaatccacccactttttcaggtcagcagcatctatggcggtttcttttcctttggcatttgtcaggagatatacgataccgtcgtgatccttatcagcggaatccgggaatgaggaaaatccgtcaatgctgtctgcccattcttttttattccagtcggtcacaaaacctattcgggtgtaggaggcatcatcggcctgataggaccatacctgataaggccagaaagtggtggggtcggctgcaccagcggtggaataagggccaccgtaaggacttccgtgggaaatatcctcttccacaattccattgtcgtaaaaacgggaaaaagtatagaaccctccaatttcatgaaccagagtaggtgcattgggatcataggtgtacactgtaatgccgccatccggaccactatcataatcaaaatcaagcagaagctcttttatgccgtcctggttgacatcgacaattgcgtagtagatcgacagtgattcttcccaggcaaactcggtgccggtacccggaaaaatatggttttgtctgatttcccgtaatacgttctggtaagcagagaccgcgctgtctgtctctgtctcggaagtttctgtttcctctttggaacgagaagtacatgcggtacaggtgcacaggacaagacaaagcatgacgggaagaaatgtttttttaatatgtttcagcatgatgttacctccaaaattgcagggtttaatgatcctttaaatatttataa

SEQ ID NO: 981 - DNA, 29158 bp, Unknown
  gut microbiota DNA sequence
atgaagtggatttctatgctaaaaagtgcggaacaacaaagatcacctgcagctatactaattccaagggtgaaaaaaaatcggtcgtgtatacggtaaaagtagttgctgatgatgatgattgattccatcgaagcactatggatccatgtttatattaaataatatgtaagccacgcagtcaaaatattttactgcgtggctttttgtgtggaattcttatataaagaatcttgatttcttaggaaatgcattcgatggtgttctgttcaatattctgaaattatttgtgtgaatcccccatgaatcattacctatttcacttttatttttgtaacatccgaacaggtacccacatacgttttcccattataagatttatatgcacggactttatactgactggcagtcccctttttcaatttggaatccttataggaaaatgttttgttatttttaatagtagcaattttatcatactttttcgttttactgttataacggtaaatctgatatccggttacattgctggttttatcccattttaatgtgactgcacaagattttgtctgcagccggagattttttaccttcagcggatttgtgcactcttcatgtgcgtcagaagcttctccccagacggtttccccttctgcttttttataagatttcactttaaatttgtacgttgtagctccgctcaatcctgtaactttataagaaacttctgctccgcctgcaatcgttgccacactttcgtatttcttttctgctgtgttatatttataaacccggtatccgctggaacctgatattttgctccatccaagtgtcacatatgtactgctgcgcttttgtgtttttacatcggacacttttgccggcggaacggtggccgataccaccgaagaataatttccataataatttgtcccaccgatggtccaaaagcagcgcaccctgtactgataagtctttccgcttgtcacatcggtatccgtaaagctttttccactcgtctgcttcatataaacatattttttctgtttttcgtcataccggtacacgcggtatccggttacatcatcggcagctttgccccagcttagtttcacagggtcaaatgcattccccacagttgctttcaatcctccggtttttgcactggtgtccttgtaccagaaatttacgtccagatttcccgtatatccactcacttttgcaacggatgaatactgccagaattcatagtcatatgctgtgtctgcataaggttccccgctttttgcattgctcgttgtcgtattattgtaccgcgcaatccagatgccgcaatcctccagagaatctgtatcaatataggatttgatccatgcataggaagcataaacaaccggctgatatcccgcatcggaaatcgtatctgcaaatgactggcagaccgctgtctcttttgctttggagagtttcccccctgtcaggcggttgtgacttcctttttccctgtctataacaatcggaagggtcacatcccagccgtatttatctgccagatccagcacatattctgcttcctgttttgcctctttttctgtcagtgcctgtgaaaatatgtacagaccgacattgatgtcgttttcaagtgccgcctgaatatgggaatccgcagccgtgtcttcgtaaatgcttccatcggaagtgtcccttgacgctacacggacaaatgcaaaatctattcctgcatcatgtattttttcccagttaagtgctgttgtttttttattttttgcctgccaccaggagacatctattccgttcaaaagctgcgcatcttcatagtccgatttgtgataataggtaacacttgtataatccactttcgaagtaaaagaaccatccagaaaatcctgtgtatatctggaagatgccttagatgcccccagcagccgtggcatggcatatgtggacaacaatccgtccctctgcgtatccacgtctgaaatctgtgtatcatccatctcttctttgatgctttgtcccatcacaccatccatctgtgttttgggtacctctgccctcagctgctgtggtgcaatcatacagattcccgccagtatcattcctgctgctacaatttttgcttttgtaaatctcaatttctatatctcctgtttgtacatttatttcataaaagtcatcaccatacctatattctgcaagcaaagcatcaccatgattttcattaacagaccaccaatgattggtctgatccattttcgaataatacgaaatacctgtaatgtgatcagataatcatacagatgatatgcaagcataaaaatactgcatgacgcggcaatactgcatccaaaacctgctatagaaaataataatccaactcctatgttctgtgtcaggttccatcctgtataatatccggctgccgccagggttttacacaaaatagatccgggcaatacatttaccgccggaacaatatgattgtaatattgctgggaagtgatcattcctcctcccacaaaaattccatccgctatggtcatatatgcatcaccaccgccaaaggacatccatgcagacaaaattcccctgccggaaaaacacatgatctcatggtttacaaaccagacgggaacgacgaaaactgccgcaaatacaacccatgttccaacatcctttgcaattataccccaattcttctctcttttccatccggtatctgctatattacagaaaatgccataacatccaagtattcccatcacaatatcaaccacaggatgccatccggacagatcaaacgaaaacacttgtacatgtgtcaacagataactgccaataatgccggtaagaattatcagattctttttgctgtaattgcctctggtgaaaaaaatgctgaaaaatgccagtatcagtacctgcaccgaagaaataaaaaaagacagtacaaaaaccccaagcattaaaaaaatcgctttcatctttctgtgttttccgtcttccccgcagtcttttaacatttttctgatataagaaaacaacagatacaaaataaaaacagagactcctatggaaatcatatttacaacagaaaggattttttcctgaaatacagacaacaccgctaccagagccaccgtcatcaacgctcccggcaatgccatcatgacagcacctgcgatcattcccctgattccaaatttgcggcgcccgatagacgctgcaatctctaccggaagtgctcccggtgtaatacttgcaaccaccacatctttgtcaatattctgtttttcgtctattccctgtcgatctgcaatctctttttcaataactggaataagtgcgcttcctccgccaaatccaatacatccgatccaaaacattgaccggataaactgtcctgcctgactcacacggattctcgcaacagacttttcagttgctccaatatatgattcacacatgtttccacatccatctccgcggtatctacgacaacatctgcatgttccggaatttcataagggctggtaattcctgtaaactgcgcaatttttccttcccgcgcagccttatacaatccttttacatccctcttttcacactcttcaatggaagtgctgacataaacttcccgaaaaccgtctccgataatctgttttgcattctcgcgatcatgccggtacggagaaataaatgcggtaatcacgatcaggcctgcatcattcatcagctttgcaacctctgcaatccgccggatattttctacccggtcctcctcggaaaaaccaagattgctgtttaagcccatccgcacattatctccatccaaaagcatcgttttttttcccatcgcatacagacgcttctccagtgcatttgctattgtagactttcctgcaccggacaatccgctcatccagatggtaaaagccttctgctgcatctgcttttcgcgcttctgcctgttaatatccatcatatgccatgtaagattgtgtctgctgtctgttttttcatctctttgtgtattgaaaccctctgtcatctgcccagtcccttttatcgaaataattttttccagatcgtccgaaatggatgctttgctttatcccggaacatcacaaattcatttgccctcttttccagctgtctgattcttttttcctgctggtttattttctgacgctgaatttcattcgttcttctgagatccatagtaactgctgcaaagaactgaataatttcttcctgcattttttcattttgcggattccatttcggtaaatctttaacttcattcgaaaacaaaggctgtccatccccgatatactcctcggctacccgttcattttccttcgcatacaattccagaaactgctgcaattcctcttttgcaagcatttctgtattttcttcttttatgtaatcttttgagatttccttcaaaaatctacgaaaataagagatttctttttctgtgagaaattcactcttattgagtattctcttaatttccgtggtatttttatctaaccggagattttcactttcttccaattcctgaaattcctctgtgacgtccaatccgatctcatgcataaaatcatgaatgattgatccgtctttccagctcttcggagaaaatctcctgactattaaattattttttcctatgacagctgcaatctcatccagtttctgtgcatattgataaatctttttttcttttttctctgatgcagcaagatactcttcacatgtcataacagcggcactggtaaatttttgttttacctcctggttccatcgggaaatcagcagtccatcctgtctgcgcagatatacaattaccttaatctgatacttctgtttatccgcctccttttttaattcctgaagaagtgatttttttgaatagcttaacgcatgccagatggattcatctgtcagtatcacatgatcgtatgccccaaatgcggttctgatctgctgtaacccctcttcaaaatattccttttccttcgattggtttctgttgccgtctgcatcccacacttttgcaaccagaaagtgtgcatttctccttttatttgctcttggatacacatgcagtgaatcaggaaagcaatacccatgtttttgcagtacgtctttgttttcttctaaaaatctctgaatagacgttgttgctgtctttgttgttccaatatgcaaatataaggttttcatggctttattcctttccaatgttttacatttgttataatataaaatgttccttgaatgaaccttgaaaacatatcaattttctttttaactttttttattcatccaaaaataaaaattatgattgcaagatttccaagattcgttataataaattccaaatacaacaataattattttgatttagcaaaggggattccaattgaaaattttagtaattgaagactccgtcctgcttgcggataccattgcagaagctctacaaaacgaaaactatgcggtagatattgcaaacgatggacagctcggctatgagcatgcctcaaccggcatttatgatatggttatcttagatctcatgcttccgaaaatgaacggttatgaagttctatctgccctgcgcagggatggagacaatgttccggtactcattctctccgcaaaaacagaaattgatgataagatacagggatttactaccggtgcggacgattatatgaccaaaccatttgaaattcgtgaactgctcatgcgcatacaggcgatcagcagacgcagcaatcatcaggatacttcacaccctgtcgttggaaatctctcctacgatcccgctacctgcgaaatctgcaacacacagaccaaaaaatctgtccaggtatccggaaaagaaatgcaactgctggagttttttatgaataactgtaatcaggttctcgagaaaaaccagattaccacaaaaatctggggattcgattccaatgcagaatacaataatgtggaagtatatgtttctttcttgcggcggaaatttcaccatctgcaggtcaatgtgacaattcgcgccattcgcggagtcggttatattatggaggtttccgatgattaaatctttacaaaagagaatcagtacactttttatgttcctgcttaccatcatctggcttgttattttactgctttttgtcaacaactcctaccggaacaatctgagtgatctccagcaaaccgttcgtgccgctctccactatactacatgggatgcatttgtcatctctaatggacagacgtctccgtccgaacttgatcatatttcctattgtcttttttctattgatgaatccaatgaaatggatatcatgtttgacactttttctgatgtctccgacagttatcttttaaaacagggaaaagctctcatatccaatagtaagaaatatgtatttatcaggcgttatgtctctgtaaatcatcttcgcgccaaaaaaggacaatattatgttttgatgctcagcggaacacctgctttaaaagcaacacttccgacgatctctctctgttttattctggcaattctcggtattattgtatttaccatttcctccaaagcactctcccgctggatggtaaaaccgattgaaaataccattttatccgagaaaaaatttatttccaatgccagtcatgagctgaaaaccccactctccgtcattagtgccaatgccgaacttctatcttctgaagtaggcagggacaataaacatctgctgtatattcaacaggaaacatcacggatgatctcccttgtccagaaaatgctcacgctcacgcggctggatgcaccacagatccagaatacccatgcagttttccctgtagatgacgcactgcttgacattatctatccaatggaaagtgttgcttttgaaaaacacattgcgctttccattgatgttcaggaacaaatgaaaatggatggaaacgagagtcagattcaaaatctcgcttccatcctgttaaataacgcattaagctataccccggaaaacggaagtatagaaattcacgcccatatccacaaccgtaagttttatttatccgtggaaaataccggcaatccgattccggaagaaatccgtgaccgcctgtttgaacgttttttccgtgcagacgaagcacgcgcggataacggtcattttggactcggtctgtccattgcgcactctattgtcacgaaccattccggcaaaattaccgtagaacggcagggggacaaaaatgtattttccgttgtgctgcctgtgactttccacaaataattcagcgcacctgattgcccacaatgcggtaataaatttttgaagtgatccgaaataccacataatagataaccgcaaatgcaagtaccgttgtaacgagacaccagacaaacaactgcccgctgtccataatcaacagggaaagcactctgcggatcagtggaaatgccgccacgacatgcagtgctgccaccacgatcggcagaaagaacaccatgcggatctgcgcctcgatcgctgacttcacctcgacattgctcatgcccacctgttccatgatccggtatcgctccttgtcctcgtacccctccgatacctgtttgtagaaaataatcatcactgtcactgccagaaagacgatgccaaggaaaatcccaaggaagaaaaaccctccgtacagtgccagcagctccttccggtttactgccctgccgcgcacgcgcctccagacaacgccatatttttccccagaggaataattctccacgtttccgctgcacgcgatcttttctgtctccgttccggtaatattgattccaagtacattttcataggcatacgcactgacattctctgtatttgcctcagcgatcgccagtttctgcaacttctgcagcgtctgcatatgatccacaacgatataataaaccccgtccatggacgaaatagaccctccattgcaacgattcttacagtatccatttttctgtacggtaaacgtttctccaagaatctgtatctgatctccacgcaatgttttcgtagactggaaccgtttttcccggtagataagaatttttccggcttctacctttggcacatccgcctctgtcagcgtgtgatccatccgaaggaaattatctcgcgtcagaaaatacaggctcgcatttgtcggtttctgcccaatcgtaagagaatctttctccaacgtcatcgcaaaattcagatacgaataactctcactgtccgtcacgtttgttcccgtatcctctataaactgtataatatccgaactctgctccgatatattttccttcacctcagaatagccggtctgcacgttgatctcatacggatagagtatgttaatctcatcatcaagacccgcaaacatacagaccgtggtagacaccatgaccatcaccatcgtcgataaaatacagatgcttgccagccccgccgcattctgcttcatccggtacatcatcgtcgataccgcgataaaatgctttttttggtaataaaatccatgggttttccgcagcagctttaacaccgcaatactgcccgccgtaaacagcagatatgttccagcgatcaccagaagcactgccacaaaaaacaggctgatcactttcattggctgctctgtcgtaatggcaattgcatatcccgcaccgagacatactactcctaaaattgccataagccacttcgttttcggctccttttcccccacactgctgccccgcaaaagttccaccggatttgccagtttcatctgcatcagattgtaaaaaagcgtcatcatatacaaaataccaaacaccagcacggtatttttcacggcagacggcggaacggaaaattcgatcgtcacctgaatccccagaatccggtaaatcagcataagtgccagtttggaaaacaaaattccagcaacaatgcctccgacgatcgagacaaacgcggtaaacatcgtctcaatggcaagcacttttgcaatatgccgcttttccatcccgagaatattgtaaattcccatctcttttttacgccttttactgataaagctgtttgtatagaaaatatagatatacgagaaaacgcctaccacaatcacaccaaacgacatgattgttgtaatataataggctccgcgcattttttcaagcccggcactgttgttgataaacatcataatgtaaaacataagcaccgtgatcattcccgcaaccatataaggaacatacagtgatttgttatttttcaggttgttttttgccagccgtacatacagattattcatagttctcaccacctgtcgtcagaacggtcaatgtttccgaaatctttgcatacaattgttcattactcatgcttccgcggtacaattggtggaaaacttccccgtccttgataaaaagcacccggtttgcatggctcgccgccttggtactgtgcgttaccataagaaccgtctgcccctccttattgatctgcgaaaacagcgtcaacaggctgtcggttgccttggaatccaaagctcctgtcggttcatccgcaaggatcagctccggctttgtgatgattgcccgcgccaccgccgcacgctgtttttgtccaccggacacctcatacggatacttctccagaatatccacaatgccaagtttttgcgcaattggataaagccactcattcatctgcttataaggcacatttgaaagcaccagcggcaggaaaatattgtccttcagcgaaaaattgtcaagcagatgaaaatcctgaaacacaaagccaagatgctcccgccgaaatgctgcaatttctttttcccgcaccgtcacaaggtttttcccgttcagcagtacttctccctccgtcggacggtcaagtgccgccagaatattcaaaagtgttgtcttgcccgatccggactcgcccatgatcgcgacatactcgccttcctctaccgagaactggatgtttcgcagtgcctgcacctgattgccaccaaatctcgtcgtataaacttttttcagattatgcacttctaaaattgtcatgatttttactccttataaatctgtccttttttctactgtttttcataaaaatatctctgtcccttttttacaatttcagaataacaaaaaaccgaaatgcaagccattgatttgtcttacatttcggctttgtatcttacatttgtgtaagatacctgtttttacgtcccgagtatccatgttacttgtctcccacgtcaaaacacttaatcccggacatccaaattatttctttcaactacaattgtcacatccgtaccttttccaatttcggatgtgatcataatcccatgcccaagctttttggtaatctcccggcacagataaagtccgattcccgtcgaagttttatctgcccgtccgttatacccggtataacctttttcaaaaatccttggcagatcctccttccggatgccgattccctgatcagagatcacaatctcacaggtattgtcggcttcattccggtttatatgtattgtaaccgcgtgattttcgctgctgtacttaatcgcattggacaaaatctgctccacaacaaattccagccacttttcatccgagagcaccatctcccggcattcctcatagtgaatggcaatctttttacgaatcataatcggcgcaaacctccggatcgcagtgcgcaccacctgatccgctgaaaccatctcaagcaccagatcattcataccggaattcatccgctggtattgaagtgccatattgacatactggttaatccagaataattcctgctgcatgtcatacaacacacttttttccattcccactgtttcatcctctgtctgtttttgttcttccctctgcaaaagcagacgcatcgcggagatcggcgttttgatctgatgcacccacagagcataatattcttccatttcccgctgctggttcctgtatgctcccttttcctcctgccgcttattctgcagttgttcaagcgcatccatatacacttcctccagcgcatcctccgtatctgaaagtgcctgcatgccctgcatataatcccggatctgcctttttactgtccgcaggcgataccagtaccgtatcccgcaaaatacagcggacaccacaagaaaaacaatttccaatcccgcaaaataccggatatctgctgcggatacgccacagaggtaaagcgtgaaaatatagaaaatcataattcctgccacaagtgcataacagcctttgtatctgtttaaatactgtttgatgtataccttcaaggtgttccccttttcatgatccatttttaatctgataaccgatcccttttcgtgttaagataaaatccgtcagccctattgtttccagttttcttcgcagccggttcacattgaccgacaatgtgttttcatccacatacacatcactttcccacaatgccatcatcagattctccctcgttacaattgcccccggattttcaagtagcgtctgcaaaatcttccgctcatttttgcttaactccagtatctgctcttcgtaggtcagtgtcccatccgacagattcagccacaccccctgatgctcaagcatatggctttcccctgcaaattcataagtccggcgcagcatcgcctgaattttcaccgtcaacacattcagatcaaaaggttttgtgatgaaatcatcccctcccatattgatcgccatcaccagattcatattgtcattcatcgaagagacaaatatcatcggcagctttgatactttccggatctccgtgcaccagtaaaatccattgtggaacggaagccttatatccatcaacaccagatgcggttttacccgggcaaattcttccatcacactattaaaatccgctactgcaaagacttcataattccagctctgtaaatgctgccggattgtttttgcaatcacttcatcatcttccacaactaatatccgatacatatttttcctttcctgtaaaatattcgttactgctcacacccacatcacaatcatactcccccgggcaggatgatattcagatgctgagtgaacagtaacaaaattccactatgtcctcatatacttgcaccgtctgccctttcatgctaaaatgagcgcgtaaaaaggagtataaatgcaaatgaaggaggaattatccatgaaaccattgaactgggcaacccttggctgtggtgtcattgcaaacgaacttgccaccgcacttgccaggcaaaaccgccatctgtattccgttgcaaaccgcacacacgaaaaagcagtagcatttgcggaaaaataccagattgccaaggtatatgatcaccttgaagatgtctttaccgatccggatgtggacattatctacatctctaccccacataatacgcatattcagtatctgcgtcaagcactggcaaacggaaagcatgtcctctgcgaaaaatccatcaccttaaattcaaacgaactggatgaggccattgcccttgcggaaaaaaatcatgtcattctggcagaagccatgaccattttccacatgccgatctaccgcaaacttgcagagatcataagctctggcactcttggaccacttcgtctgatccaggtaaacttcggtagctataaagaatatgatatgaataatcgcttttttaaccgcaatctggccggaggcgctatgttagatattggcgtttacgccttatccctgatccgctggttctttgccgaaactgccgatcaggtgctttcccaggtaaaatacgcaccaaccggtgtggatgaacaggcaggcatccttcttatgaacccagccggcgagatggcaaccgtcaccttatcgcttcacgcaaagcagccaaagcgcgcaaccatcgcattcgataagggttacatcgagatctttgaatacccaagagctatggaagcaaccattacttacaccggggacggacataaagaaactatttccgcaggagaaactgcagatgccttaagctatgaagttgctgacatggaagccgctgtatgctccggcgatttatccacaattgaatcacttatgcatcttaattattcacaggatgttatgcatatcatgactgaaattcgaaacaactggggtatgaaatacccggaagaagagtaatcttactttaaaccaaaattcgactacacatttagtataaatgtatgatttttcctgtcaatctggtttttaaaaccacatctatccaacatgatagtccttgatcctctcccagatgtgcgtatcgtactgcgcttccgtgctgcgccgatcttcttttaaaagctgggcatagatcagatcaaggatcagcaggatcggaaattgcggggaaatgacatttccgtattcgaggttcttttttaccggtgcgagcacgatctcctcatacgtccgtttttcccgctctgcgttggaggaagtcagatatatgaccgctgccccacgcgctttcgcccggtcaagtgcatcaatgagctcgcgcgtcgcgccgcttaggctgatgccgatcacgaggcacgcgtttgtgatacgcgcttcattcaataccatctggtgcagttccgtgattgcctccgcatccatgccaagccgcagcaaccgaagttgaaactcctgtgccgccagcccagaactgccaaatccatacaaaaaaatgcgcgtatgttccccgattagctgggacacatgtttgatctgtggttcgcggattaagctgtatgttttttgcagcaattcctcatacgaatacaggacgtggatggtctgttcctccacattcggtcgctccgcgatcgagggctggtagttgtaaataaactcccggtatccgctgtaacccattttcttggcaaagcgtgacagagatgcttctgaaacatgtagcatctttgccatgcgtcccgatgaaaaatccatctctttttcattcgaaataaaaaaatcggcgattgttttctccaccaccgtaaacatctcataatttgcctcgatcatcggcacaacactgcttccataagtctgcatacgcgttttctccttttcctgcttcctcagttacttgcggaacatcagagtttatggtgcccacgtccaacgggatatataactctatgtccataacccgatctgtaattttatttcattatatcatatatttttgaaagttctttcaaaagcacacacgatttttctttttttccgtttttggggattgttctttccatttgcccaaaccctatggatttttccaattttgcatcctataatcaacttaacaaatgcaggaaacgcaattttaaggaggagaactactatgcgtatttataaaacaaaaaactatgacgaaatgagccgcaaggcggccaacattatctccgcacagataatcttaaaaccggaatctgtgctcggacttgccaccggttcttcaccgatcggcacctacaagcagctgatcgagtggtacaacaagggcgatcttgatttttcacagatccgcagcatcaaccttgacgaatacaaaggccttcctgccgacaacgatcagagttacgcttactttatgcgccacaacctgtttgaccacgtaaacatcaaatccgtaaacacctttattccaaacggcatggaagctgatgtggaaaaggaatgctcccgctacaatgccatcatccgcagcatgggcggcatcgacttacagctccttggcatcggcaacaacggacatatcggttttaacgagccatcggattcctttgcaaaggaaacccactgcgtcgacctgaccgaaaacaccattcaagccaatgcacgtttcttttccttcattgaggaagtcccgacacaggcatatacgaccggcatcaaaaacattatgcaggcacggcacatcctactgatcgcaagcggtgaagccaaagccgatgcactctatgaggcagtttacggaccgatcaccccgcatgtaccggcatcaatcctgcagttacacgacgaggtttccgtcgttgccgatgaagctgcattatcccgcatcatcaaagaaggactgatctaggaaaaggagtacgccatgatcataaaaaacggactggtctgggaggagtctggctcctttcggaaaaaagaactggttgttgatacaacgacacaccgcatcgcagaaaccgcagaagacgatacggtatttgatgccgaggggctttatgtgatccccggtctggtggatgtccacatccacggggcaagaggtcacgatttcagtgacggaaattccaaaggacttgccgaaatcgcacaatatctgcattcctgcggtgtgacttcattctgcccgacttccatgaccctgccggaagaacagcttacagctgcctttgcgacgattaacgatgtgccggatgctgccggatatgcccacatcgcgggcatccacatggaaggtccatacctctccccggaaaagaaaggggcgcagaaagcaagctatctgcacgcgccggatgccgccatgttccgacggctctctgctgcaagcggaaacaagatccgcatcatcacgatcgccccggaactgccgggttccgatgcgtttatccgggagttcaaagacaccgttgcgatctcactcggacactccacagcatcgtatgaaatcgcagaaaatgcctttgccgccggtgccaaccatgtcacccatctgttcaacgccatgccgccactacaccaccgcgatcctggcattatcggcgcggcagcggactgtccgcatgcgatggcagagatcatctgtgacggcatccacatccacccgtcggtcatccgcaatgccttccgcatgtttggcaacgaccgcatgattttaatcagcgatgcgatgcgtgcaaccggtatggaggacggcgagtacgaactcggcggacagccggtaatcaaaaaaggccgccttgcgaccttaaaagacggaaccatcgcaggttccgccaccaatttgtttgactgtatgaaaaatgcggtgcagtttggcattccgctcggcgtggccgtcaaagccgccacctgcaatcctgcaaagagcatcgaatgttcacaggaaatcggcacccttgccgtcggggcaagagccgacatcctgcttttagatcaggatctgaatattgtaaagatcctgtaattatgcttctgtgctcaccacgcctttccatacaaaggaaaactgcatggttttgtccgtctgcaacagatattccggatgcgtctgcgcgccccagctgtcgtcgccgccgacacccatctgggcttttgccacacggacaaccgtgtagtgtactggtggcagctcatacggatgcatcgcattttctatctcatgcggcgtatacggcagtgcggaaaataccatcggacctgtttcttctgtcatttcaaacaacatgccatctccggcacggttagtcacacgcgcccagcgcacgccacattttgccccacattcctgcggaaccatataccgcgccacattgtcttttaccttattgctgtagatgccaagtttggctcccttacaacggtcagcataggtttcctgttcgcccagtccataccactgcagtcggtcgtaatcggcattaaatttaaacagtacgccaaattccggcatgtcgcccaattctttgaccggatcataacagagcgtggtctttaccctgccatccccaaatacttcataggacaaccgacattccgaaaccggtgtggtcggcataaaatagcggaacgaaacggtaatgctgtgttcgtgttccgtgacttccggcgtactcgtctcctgcgggcttttatggctgacatacagactggccgttttccactgtgcatagcgcgccggcatgagatttccacagtcattgtccgtcggtgcccgccagaagtttggtttcgggatcgcctcgatcatctcttttcccgcatatttgtaggaaaccagcccaccgtttaatacggaaaacaggacggaaaaatgcgcaccctctacaccgatgttgtgtgtgctgtggatcactttgatcttgtctgtgcatgtttctacctcacccgcaaccggatagacatactgcccgaaagccacctcatgccctgcctttgcccagacagtgtccgctttcagatggaaggagacggtcacggtgtattcgcctgcctttgtctcttttgcaaacggcagtggataggtctgttccgagagcggctccacagccgtcggtaagtctgcccggcggatctcctttccgtcttttgcaacggtcacaacacacgcaaagcggtcggtgttgacaaacaggtttttatttttgaccgttacggactccgcagtcacttccgccgtgatgttctggtaattgaatttgacttcctgcatttttggtgacacatcgcggtttccaccgtagacaataccgtttccactaaagttatagtcggttggacgttcgccaaaatccccgccgtatgcttgaaactcctcgccgtagcggtcttttttgtagatcgactgatcgatgtaatcccaaataaagccgccctgatacttcggttccgtgtcggtcagatccgtatatttgtgcatcgcaccacaggaattgcccattgcatgcgtgtactcgcagcagataaacggcttgctcgaatcctttgccaaaaattctttgatgctctccaccgatgggtacatctgactttccatatcactcgtatcgttgtaacttctgtcgtggaacagcccctcgtaatgaacgagacgggtatcatccagacggtggaacagacaggacatttcatagatgtccttgccgccgtaagactcattgccacacgaccagatcaggatcgccggatggtttttgtcacgttggtacatcgaattggcacggtcaagcatcatcgcaagccactccggtttgttgtgcggcacgatataggtatcgtccttcgtaaactctgccacatcccaggaaccgtgcgattccagatttgtctcatcaatcatgtaaatgccatactcatcacagagctcataaatcttagacgcatccgggtaatggcaggtacggatcgcgttgatgttattctgcttcatcgtgcgaagatccttgcgcagctcttcctccgacacatgccgtccgctgacggaactgaactcgtggcggttcacgcccttaaagacgatccgccttccgtttaatgtcataataccgtccttcatctcaaaccggcggaacccgacgcgctgcgggatcacttcctgtaaagttcccgcgccatcgcagacttcaaccgtaaggtcataaagctgcgggtcttccgcgctccacaaaacaggccgctccacgttccaggtcaggatctgttccccttcggtaacagccgattcgtcttccagcacagtctgtccgtcttttttgaggacgactttcaccttgccgcttccccacatctgtaaagtcagtgccagttcggcagcggtaagtgctgcatccggcagtgcccgcacctttacatcataggcatgtacttccggcacagtatacaggtatacatcgcggtagattccggaaaaccggaagaaatcctgatcctcgcaccagctgctcgctgtccacttaaacacctgtaccgccagtttgttttccccgtcttttaccgcatcggtcagttcaaactcagacggagtaaacgaatcctcgctgtaaccgatgaatgtgccgtttaaccagactgcaagtccgctctccgcgccctgaaacgagacaaagagccgcttcccctgcatctgcttcggcacggtaaaatatttgacatagcttgccaccgggttaaactgctccgggatctcgcccggatggatgtcctcatggccttcccacggatactgcacgttagcgtactgcggcacatcgtaaccctccatctggatatgagccggaaccttgatgtcatcccaacctacacagcagtagtcttccttctcaaatccggcaactacgtcggcatagttttttgcatagtggaacttccacagcccgtttaaactgacgcggtaggaactctgtttctcttctgcctcctctttcgtccggtaatatatgtggtcagaatgcgcatccatgcgcgcatcacgaaaatactgaggatcttttactttcttataatcaaatgtattcataggcatatacccctttcctgttatggtaaaaaatgccctccaaaaaggaagacattttttaccatttttatttaaccgctccggtgataccttctgcaaactgcttctgtaatacgaagaatacgatcatcgtcgggattgagcagaacaatacaccacacatgagcataccgtaatccgtcttgtatccggtaatcaggttggcaatgagcattggcatagtcatcgcacggttatcggacatgattacctttggccataagtatgcattccatgcattcatgaatgtgataacagcggctgccgcataggtcgatttcatcgtcgggataaacatccggaagaaaatctgtacctcgcttaatccatcaatacgcgcagcttcgatgatgtcaaccggaaatgcacgggcattctggcggaacatcatgatcataaacggtgtggatatgatcggaagcataaatccaaccgctgtatttaacagctttgccttggaaaacatctgaaacaacggaaccattgttgcaacctgtggtatcatcatggcaagaagcaggatggaaaacaggcggtctttccatttgtcatggtagatctcaaaaccataaccggcgatggagcagaccaagagacacagcaccgtcgtaaggatcgcatacaggaacgaattcccgagggctctccacagtggctgctgggacattaagttcttaaagttctccataaagtgcgtacccggaagcaggcgaccacgggatacgtccgtggatgtattcgtggctgcggaaatcatccaatacagcgggaatacggaaataaaggacacgatccccagaaagatatacgtcgggatcaatcttctctggatcattgatttgcttttctgcttagtcacgcgtatcacctactttcaagttgataaatgcaaggatcgctaccatgataaagatcaaaaatgacatggctgccgcatatccaaagtttggcacattgataaaacatgtgttgtatacatagtgtgacatggtaatagtcgtattggcaggtccaccctttgtcaggttgacggactcatcgaacaactgcaacgtaccattgattgacatgataaaggtcatgatgatcgtcggttttaacagcggtacggtgatcctccagaatgttttccagccgtttgcaccgtcgatcttggcggcttcgtatacggaatactcgatattctgtaaaccagccagataaaaaaccatgttataaccagtccatctccaaatcaaagcaaggataatgaccgctttggcacttccggaatgacccaggaaattatagccggaatgtaagataccaagtttcatgaggatactgttaatcagtccgtctgttgcaaacatcgaacggaagatcaacgaataggaaaccagtgaagtcgcacatgggaggaagacacaggttcggaacaatccccgcaattttaaatgtttgttgtttaataactgtgccagcagaattgcaagtataagcatgattggcacctggataatcaggtagaaaaatgtgttgccgatggactgctggaacaccttatcaacaaggattctctgataattggaaaatccagtaaagcgcatattggcacccgttcccttttgcagggaaatgataaatgcccgcaccatcggataaaaactcatgatcgcaatcagaatcgatgccggtgctagaaatgtccatcctgccgctctttgttttgcaataagtgacatcccttttttcttggaattcacaacaaattccccctttcgcatttctggtcattttcacatatagcggaggtcgccccccgctatacaaacttgtcattcttttttatgtaccggattactccgtcatcttaaactgtaaggtatcttgtgcttcctgtaatgcatcagccttagctgttccatttacgatattgacaactgctgtgttgatgcactctcttgcctcatagtgatacggagtctttgtaaactccggaatatgggaagagtattctacgatcgtggagtaaatcggctgatcgttgaagaactcgtttggctcgttgtatacatccgattctccggctggtaagtagcaggcaatcgcaccggtctgtggaaggattgcatcatagaaatctgtactggaaccaaaagtgctctttaagaaatcttctgcaagatctttgttctggcagtttgcggtaacataccaggaagatccaccgttgtttgcataatgagtagcggaatccacaccatctacacttggcattgtggtgattgcccactggcctttctggtcttcggtagaagcgatcgttgcagtgatccagttaccattgacaacgcctgctgcctcaccatttgtgatggtggatacatactcatcccagttgtttactaattttacaacatcattctgtacgagttcggtgtagatgtcgacacacttctcagcgatgtcatttcctacaatgtaagcatctccgttttcattgacaaagtttgcaccgcaggactggatcatcatcatcatagtgtctccgccagttccctcactagtcagtaagtatttgccggtcttatcatgaacatcttttccgatctttgcaaattcgctccaggtaatatcggtcaggtcgtcgatggtgtatccggcttcttttaagatgtcggtacggtaacatgcgataacagcaccgttatcaaacggaacaccgtagtgcttgtcgtctaccatagagtaagactgttttaattttccgaaatcatcccagttgattcccatatccgtcaggtcggtaaaggcatccggataactttttaagaatttctggtagctgttgtcctgcatgagtacgatatccggcagtgtgctgtaatcaccggcatttgctgcggttgtcagcttggtctggcagtcatcagaagaggtctcaaccacttcgagttcaaaatccggatggtctttcttgtactgctcggctgcggtctctattgccttgatgttaaagttctggtcccatgcccatacggtcagcttattactgtcggatgaggaagaagtaccgcttccgctggaggatgtatccccgccaccgttgctgtctgttccgcctccaccgcaagcaaccagtgacaataccattgcacttgcaagtaatgctgtaatcattttctttttcatataaatttcctccttctccctaagagtatttgttacttttgctgatgaacgtattatagcattgcttgaatatatctagtttgcataattgtccgtataatgtgcaatttcaatcattttgtgtgctttgcactattttttcgcatattttcggttatttccattcatattgccattatgcgtgccatgtgatgcaacaaatccaccattacaaccgcttgcattcctgcaatttttcgttgaaatgatggattctctgattttgcgcacatttgttgttcatgatttgtttgcaactgttcatattttattcaccactttatgcaaaaaccttagaaggatactgttttttgagtgcaaacagcagttcctgattgagatcaagcaacaattttttcttttcccggtcctcaatgacgatcatcgtgtagtatggaatgtcatcctcataggaggtataatcaaacttcggcagtcggaccccgcccccgtctttgcggtactttgccacagcctcgtggcggtttggcgcggtcacttccatctcggtcatgtcaatgatgtgtgccgttttacggtaccgcttcccatagatcacatcaattgtgagtgttttcccgtcgaggatgtactcgtactctttccggcttaacacatcaaatacaaaatacagtgccaccagaagaaagcccgctaacataaatgcctgtgagatcatgatcccaagcagcacaaaaaataccccgaatacgaccatgagcttccgcagaacccccgtcatcttcttttgtttcctctttacctgttgtatcagttttgccccctgcatcggttgttaccatcctttctctgtgtggatctcataattgagcagccgctgttcgtaattttccggacgcttcctccactccacgggtgtgacccccatcatctgcttgaaattgcggttgaacgtggagttggtcgtaaatccgcatttgtgggcgatgtccgccaccggttcctcggtcttttttaagtgctcgcacgccgtgcggatgcgcaccgtgttgatatattcaagcggccccatatgcatatattcggtaaacacacgccggaaatgtgtctcgctcagatggctgtacttcgccagttgttctacccttattggttccatgtagtgatcggagatatagtccatggcgcgggagacgatgcaggtgatcctgccctgctcggcatccgcgcgcgtctctttgttcgtgtagtttaaccgtgtgatctccaaaagaagacagcccagcagtgcctttgcctcctcaagataaaattcatcgccttttcgcatgatatttaagatttctttaatttttgccgcttccttcggatactctgcttcctccaaaaaccacggcttttcatagagccgctgcagtgcgcgctctttgcggagtgcattgtccgggaaaataccgtcaagtaccacctccacatcgacaaacagatattcccagcgactgatgttgcccggatcgctgtttgtcgtgtgcggaaaattcgacgggatgacggtaaactgctgccccgaaaaacggtaggtgtcatcccccagtaccacgtcgcctgccccgtaataacaatagccaagttccatgtaattgtggaaatgaagcctgtctgccgtgcggtcaccataattctgcacccacttttctcccagaagtgcaagaatcggacttccgggcggtaactggtagtacctaaactccatcttcttctttttcttttctgccattaccctgctgcctttcttacaatgtcctgcatctgctgcatcttgcgctccatgtctgccacaagcgtaagctgcgtgcgggcacggtcgagattctgtccgtcccggtggatcttgaaataacgatcgccctgtaaataatccataagaaaccgcatgccgcactcatacgtcatgacctttgcccccatcggaagcagcgcggtctcctccggagtcaggctgccgccgcagccctccagaaatcctttggtaaagagggaaaacagctccatgctgcacgagacttcggagagatcccgctcatcctccgccgcagtgctcgccccgtagcggatcgcatcgccaaaatcattcatggcaagccccggcatgaccgtatcaagatcaatgacacagaccccctttcctgtcttatcgtcgagcatgacattgtttaatttcgtgtcgttgtgcgtcacgcggatcggaagctccccgcggtcaagccgcccggcaaaatagcaggccgtctccttccgctctaagaaaaaagcgatctccttttgaacctccgcggcccgccccacaacatcctcccggacggctttttcaaatgccgcaaaccgcgcccgcgtgtcgtggaaccccggaattgtctcatggagtgtctctgccggataatccgccaaaagccgctggaagctgccgaatgcgaccgcgctctcataaaactgctgcggcgtttccacctgatcaaagctgctcgccccggtgataaaccggtacgaccgccagtagtccccgtttgtgtcacggtagtacggtttgttgtccacggtcgggatgatatttaacgtctccctctccgggtcgccgccccgcgcaataatcttcttttttaagaaccccgtcacacccgcaatgttttccatgagttgttccggatgtggaaaggcatcggcattcatccgctgtaagatcacatccagatcccccatattgccgactgcaaacgtcaggcggaacgtgtcgttgatatgtccgctcccgtacaccgtatctgcaatcagtgttccctcgtatgcaaatgctgcaatggcttcctgtttctgctgttctgtaatcgctctcatattgttttcccccttatgtgttgtgtctgttaccacttcatgataaggcgcgtgctgccgctccgctatcgggatcttgtttacattgttataaatcttgcgctataattactataacagatttcaggtgcaaatgcacatgctattttcaggaggggatgcctatgccataccagcagtacaacttcaaaccacaaacctttgacgcgcaaaagaaacggccggatctgcgcctgctttatatcagccattccagctacgacaagacctggccgagcgtgctgcactcccacccgtttaccgagctgttttatgtcttaaacggaaccggcacattccagaccgagacacaaaccttctgcattgcggcagatgacctgatcctcatcaatccccatgtcatgcacacagaattcagcaacggcgatgcggctttggaatatgttgttctcggatttgagggcatagcgtttgaaaccgacggacacgcgcccataacctgcctctgcaaaaatgtaaagacaatccgccctgcctgtctgttttataccagatcgctcatacaggaactgcatgaccgcaaagaaaattatgtagaaatgtcacagaatctgctcgaaaatctgctctatctgatccggcgggagatccgcgtcacgccggaggccgtctccgtcggcaaaacctcacaggaatgccgcatgatcgagcagtacatcaatgcgcactacgcggaaacaatcacgttagatacactaagtgccttaacattccacagcaaatattacattgcccacgccttcaccaaatacaaaggaatctcgcccatcaattatctgattaccagacgcattgaagaggcgaaatccctgttagaacacaccgactttccggtcgcaaaaattgcccaggcggtcggcttttcttcccagtcgtatttttcgcaggcattccgtcgggaaaccacgctctcccccgatgcctaccgcagacagtttctttcctagatctcgtaccagaggatcgcattggccgcaaggtcgaccgcaaaactgctgccgtccccccggtaaacggtcgtctgctgcggttcatacgtgttgttgacgacacagtatttgccgttttttacataagcatgcacttcgacattgtaatttgtggaaaaccagcggtgaattttcccctccgccgaagccgcccacaggatcgcccggtacagcaggcggctgtttgcaaagctgtacggcaggccactgatatacacacccctgccctgcccgaacgtattcacggcaagctgtacacctttgtcgatctggcgtagcacggtcgcggattcgagcgcgaatatgtttttcttgccctcgccaaaatcaatcgcatcgccgctgtcctccgtgataaaatgcgcatgatcttgccagttatacttgtccacattcaacgtgtagccggtttcttcttccacgccaaggatgtccgcaagctggaagaagtgcccctgccattggcaggatgccggttcgcccacgccgatgaaaccgccaccccggtagacaaaccggcggactgcggtcagaatcgcctcatccttccaattgtccccgccggtataagcggtgtaggcatcgcccacatttaagacaacatcaaaggaatcgagcagatccggatgattccttatatcatcaaagctgataaatttcacgtcaaacggagcaccgctgagtgcctcgatgatgcccgcataagaataattctgcttgtagtaaatggcatggtggaccatatggttgccccacgcgcgcatttttccccagcagtttaatattgccacgcgcttgacgcagtacggggtcgttcccttaatattttcgtacagttcgcggaactttttgcacacgctctccacatagtcgataaaatccggaaactgtgtggcaagttttaagtacccaccatagccgatccgatcgatcggtttgcgcagaatcgcccggcgcgccgtcacccagttgactttcgcctcgcgtgtcggatcgcctccctcgtggaaggtatccgggaaaaagtacggcaggaaccgcccctcagtgtatctgaccccctcaatgtcactaatgagacgcagcgttgcaccgtttccgacgcttccgaccacagcatccagcccgatcgtctggaactcctccataaacggctccataccgatccagtggtcaccgaggaacatcatcgcctcttttccgcacgcatgtgtgatatccaccatctcctttgcaagctttgccacttccctgcgctgaaatgcctgaaaatcctgaaattctttggacggcacgcggtaagtattgttcatatagccctggtcgataataaactccgggcggaaccgatagcccacttccttttcaaactgctctaagatatacgggctgaccgatgcggaatagccataccaatccacatatttttcccgcgccaactcgtcaaagatgagcgtaaattggtgaaaaaaggtcgtgtagcggatgacatccacatacggatgctccgcgataaatctgcgcagccgctccatggagtaggtgtgggtctttggctggcgcacatcaaacgtaatctgcttttccacatctttccagccgttggtcacggcattatacatatgcaccgggtcccacataatgtatgccagaaaactgaccgtgtaactgtggaacgcctccggcttgtggatcgtcacgtcgccagttgtctcatcatacgaccactggctggttgaaacaaccgcccccgtcgtgcggtcgataacttcccaccaacgcgtaatgtcatcacggttgttgacttttaacatatccgggtacagatgcgtcatgagatggatctgtaaatctccgtcgaccgccgtataaaacggcgtcataatatacatctgctgtatctcctccggatgtgcctttgcccatgtattgtcttttcttgtggtgtaataggtcgaatagaccttggcatccacagcgcgcagttcctctgggtaatccgtaccatcgcagtcgcggatggcatcggccccccagcgctccatcagtgtaagtgtctccggcacgacatctacatcagtcggaatagtgactcttcctctttgctgcatattgcttcctcctccgtaattcctgtattctactttcagcatacggagtttggaagcaaatgtctatggatttcttgctgtgaatgttagaaatattgttctctatcttaatttaccagataagccaaaatgtctttatattagacataattttattaaaaaaacacgatgagaagtctcatcgtgtttataaaaggtgactgacggatttgaaccgacgatcagggagttgcagtcccacgccttaccacttggctaagtcaccaaaactccccgagtagggctcgaacctacaacaactcggttaacagccgagtgctctaccattgagctatcgaggattatttataagaaaacaacgtagacaagtacgttgttcactaactatgttattgaaaagtttgtactttcaaaacttcatacagatttaaccgctttcttaatcaagccctcgacctattagtaacagtcagctccatgtgttgccacacttccacctctgccctatctacc

SEQ ID NO: 982 - DNA, 5430 bp, Unknown
  gut microbiota DNA sequence
tagtgaatgatgctttgaaccaagagaatcttgatgaaaaatcaccgatttctatggttaaggaatagaacaaccgacaacagaaaatgcgaaaaagcccgtaatatcaagggaaaccgcaccatagagatgtttaatacggtctcaaagcagctcgtagagcaccaaagtttagcaagcgttaacaaagagataattggaatcatacgattcagcatatttagggacaattatatacgatttacaactcctcaggatctttgttctggggagtttttgtataaaaaaaggaataagtatgatatactgtatttgaacagatcaaaatgagtatttggaggtgaatatatgccggaaatatctttattttatggaattcgggttacaatgtattatgatgaccataatccgccgcattttcatgcggagtataatgagaataaggcaattattgaaattgatacagctagatgcatcaagggagctttgccatcaagacaattaaagttaattctagcgtggtgtgttttacatcaagatgagttgatgcagaattgggaattatcaaaagatggaaagccgttaaatagaattaatccacttgtataggaggtgctgtttatgtttcctgaggtagttcaagtgataccaaggaaagactacacagtgtatgtctactttgaagatggaaaaattgtatgttatgatatgaaaaatatgttggataaagaagttttcaaaccattgagggatatttcggtatttattgatacatgtacgatcatgaatgatacattagcatgggatataggcggaaatagagatgcttgtaaatgcattgatattgatccggatacgctatatgaacttccctattgcaaggaacaaatagtttagtgacaaatcggtatatcattggtatgttttatgacgcagcatatttaagcagacaattgattgcaagaataatagaaccattagctgttttggaactctgtggacagttctacgcatacaacaagtatgcaacattatctctgcaaacccttgtcctgtgggatttctcagttcagcaagcgttaatcgactgttcaggctatatcaaaaggtttacaaaccccggaaaatcaaggttttccggggttttcttatacataaacgggatgatgtggtttgaccagatttggctaaatgagagtcgttttcccccaatttttagtggttaaatataggacaaccagagagcagtttcgagggtatttttgtgggagattttagtcctccggaacctctgattttttgatggagcgtgtgtatcagtgttatcgtgctttctaagccaacaggctgttttctattttggcgggcatagttaagtgccgctgtaatcggactacttggatttatcctgtatgccagtcggtaggaggtgcagttatgttgaattgcaaaagtaattatcgaagcacatgacggaaccatcgaagtggacagtgaatttgggatggggacaaggtttaccatagatttatttacaattctttaaaatatcttccagatccagcctataccgtctggcaatatccttcgcatagcttaagccatccggggttgttcggatcaccttgtagcttcgggtgccttcttccttactttccatcatggcaacaaggttgtcaatttttccgcggttttcaggatgggaattgtagacatcgagttgttgtgtcagatcgtggatgtgtgtgacataaagcccacagcagccgataatgccgatgccggtgagcacttcggttgcaatatatccggcttccatcgggcagagatttccgtctaaattgatgccaagcgttacgctttttaagtatccgaaatttgtttccatcttggaaagctcagagcttagcgtttgaaactcgctgctctgtgcaattccattgatttctttctggaaatttttcatgccttcggattgcagcgcagcctgtgataaattatcggcaaacagtgtgacgatttccacatataattccaggtaccgcacagagcggagcgaagaatcaatggtaaattcggaactcatcgcgcggcgcatatcgttgatgttgtagatcatggatacagccttaccgaatgtttcgtacagattgggattgttaacaagatcttcgacaaccccgaggcggtaatcaagaacctgttcatctgtggaaaaatagttttccagtgacagatcagcgaatccgcgatagctttctttgatcagaacaaccatggagtcgatttttaacgattcgatgaacccgaaatccttcattggctgttttgttgtacgatcgtattccggtggatataaatgaaaatttgtctgcataatcagtttctcttttggggcgataaaaatctatctcccttttcggaaaagtgttccttctgcctattagattaaactaacatgaatatttattcgtttctacatgttttattcatttttacactaatgggtattcattttttcactaagttgtcgtgcaatttattagatttgaattttgaaagagccagcaccttgaatggactggctctttcaatgtctcttgtaattgacaaggatttgtctatacaattataggtttcagtccattttttcttatgttttctaattcttctgcagttaagcactgagactcataaagccgtagatattctttggatacatctgaatcaaatattaatacatcatcagaatttatagtaacatcaacaccactacgatacagttttccaatcggatgcatagacatatctgcaacccttccaagtaaaatattacttgttggcgtaatatttaatctgattttattatctgccaaaaagcggattactgattcatcgctgactgctgctatcccatgttgaacctcatcaagttctaattcctctactgctgttcttacgtctttggcagtcccccattctccaacatgcgcttttagccttaatccttctttttttgcacgccgataaattcctttaaaattttcgataggttgtgctaattcatcaccgtacaaatcaatagaataaaaattcttatttccccaaaaaagcgataaacaatcttctaaataactgataggacaatgtcttgataatccaatttggagccttaattctatatcgggagcgacttctttttgagcacttgtaaaagcattaaccaactcatcaatatcattattaaaaaattcatttaagccccacacatcttcaccaatttcaagcacagttactccatcttccttggcttgttcaaaggttgctctgattaaaaattttctcatcgcagtgctattaaaatcttgatcaatatatttttgactccattgattcatctcatccattgatgacaaaggattaactaatggctcaatttttttacgagttttctgatatataaacattctatttccaccaagcacaaaatgattgtgcaagtctgccttaggatactttcttaattcttccaaatttctttgttccaatgcatatgtaaaactattcataaataaatgctctcctagctgtttgattttttctataaataccaattgtataacagtagtctaacatatgctgtttaaaaagactacagccaagctaatgtctgtaatttattttctataaaaattttcctttctaaaaaatattttatattttctatatcttggtgtttgaaaaatagcctcatagacgttggttaatgcttgtactcattaccttaaaaccacaatttaatgaagctgacccagaaagatataaggcaggctttgatggtggcgttgatttcattgcaacatttgatgttgttaaacccatccatagaaatgtatgtttctatattcaatgtaaatgtcataaagaaccattgactaaaacagctatcagacacacaaatgtaaatagggacaaatctattaataagcatatgaaaccagagggcgtttgtcaaataaaactgatatagtttgaaactatggtaaaccggtagaaaatcgtattatgcaataaatttgacttgtgctatactaaagcgcaacaaaagaagtggccgcttctctggatgaactttataacattgtacatcaggagagcataatgaaaacatcaattatcggatacccgagagtggggtccttacgggaactgaagtttacaacagaaaaatatttccgcggtgagatttctgtggaagaattacagaatatcgcaaaagaaatccgcaaaacccagtggacattacaaaaaaataccggactggatttcattccgtcaaatgatttttctttctatgatatgacattggatacggcagtattattcaatattattccagagcgctacacaaagcttggactttctgcactggatacctattttgccatggcaagggggtatcagggagcagccggagatgtcaaggcacttgccatgaaaaaatggttcaacaccaactatcattacatggtaccggaaatcgatgataatacagagatcaaacttgccggaaccaagccctttgacgagtttgcagaggcaaaagcccttggcattaccacaaaaccggtgatcatcggtgcatttaccctgttaaaactcctgcgttatgtgggaaagaaacaggccacagattatgcacatgccgtgatcgctgcatacgcagggttgcttgagaagtttgttgcagccggtgcagaatgggtacagtttgacgaaccatatctggtgcatgatctgaccagtgaagacattgcattattcgaaaccttatatcagggaatccttgcaaaaaagggatcaggcaaagtactgttacagacctatttcggggatgtgcgtgactgttatggcaatatcacagcgcttgcttttgacggaatcggtctggatttcctagagggcagaaaaacaaaagaactggtagaagcaaatggttttccacaggataaggtattgtttgcaggacttgtcaatggaaaaaatatctggaagaaccactacggaaagactttgaaagtgatcaatgcgcttaaggcgaagaacatcaatgtggtgttaaatacttcctgctccctgcttcatgtgccatatacattgaaaaatgagacaaagcttccggaaaaatataccgagcactttgcatttgcagaggagaagctgcaggaactggcagagttaaagaaactggcagacgttgattacaaactggatgcggcatttctggaaaatacctttttgtttgctacccgtccggattgcagaaaccttgcggtacagaagcgtgtagcagcgatcagggaggaagattttaccagacttccagcgtttaaagagcgcgaagcaattcaaaagaaagcgtttgctttg

SEQ ID NO: 983 - DNA, 67275 bp, Unknown
  gut microbiota DNA sequence
aaaattcttaacttaatgacattggcggtgacgctccctttttccgatatggaagaatagttatttgatgcagttcatggtggcattttctgcgtttagctgttttttgacacgatgtttccaaatcatataagtaacaatcagcaaaataccggttgtcagccaggcagcagcatcagcactgcatacacccacgtatccaaaaggctttgtggcgatcaggataaccgcataacggctgaacagttcaagaacaccgctgagcatgggaaccagaccacggtctaagccctgcagaccattacggtatacaaagatccatgccagaggcagcataaaaatacttgcaatgtgcagatactgcattgctgcgtgcagtgtctgttcagatgggttgtggatgaaccatccgaccatcgtaggtccggcaaggcagcagagcagtgcggcggctccggctgcaaagaaacataaataaaatgcatctttcataccgcggaaaatgcggtcatgttttccagcaccgagattctgtccgcagtaggtggccatggctgtaccgagtgtcggcatggtctgggtggcgatgttgctgactttggaagcagcagtaaaagcagctaccacgctggaaccaaacacgttgacggcactttgcaggatcatggttccgattgctgtgatggaatagtttaaagccatcggaattcccacagacagcatccggcggatctcatgaaaatcacagtaataatcttcgcgtgtggtccgcaggatgtcatatttgcggaacatgacaatgaaacataaaactgcggaaaccgcctgcgagataacggtggcataagcggcaccggcagtgccgagttttaccacaacaataaggaagatgtccagaaaaatattgagaccgctggacaggatcaaaaaataaagtggtgtccggctgtcaccgatcccacgtaaaataccggatgctacgttatatgccatggtagcaaagataccggcaaagatgacccggatgtaccggtttgccagtgtgatgatattttccggagtattcagccacagaagcagctggcgggaaaacgcaaccgtaggaacggtcagaatcatggaaattacaaccgttaaaagcagtgaaagtgctacgtaatgacggagaagcttcatgtctttggcaccgaatgcatgggataccatgacaccgaatccctgggcaattccgttggcgaaaccgagaaccagaaacatcaggcagcccgtagaaccgacggcggccagtgcatcctccccaagatactggcctacgatcacggtgtctaccatgttgtagaactgctggaacagatttccaagcagaaccggaagggaaaaaagaagaatgatcttcattggatttccgatcgtcatgtcttttctcatagtaaaatctcctttacctcttattcatttgtaattgtagtcaaagaaagagactaacagtaaggatagtctcttttcgtgcgggcaacaggacttgaacctgcacggtctcccactagaacctaaatctagcgcgtctgccaattccgccatgcccgcaagtttatgtagtttttgtatcttttattatagaagatactttactaactataacgacattgtgtgcagatgtcaattactttttgcttaaaaaaatgacaaaattatgggaaaactacttgacgaatagaaaaaaatattgtatcgtatattacgtgttttgcacaagggcttatagctcagccggttagagcgcacgcctgataagcgtgaggtcggtggttcgagtccacttaagcccatatcctacaggatgtctgggatgaccggacatcttttttgttttattgacaagaagaaaatattataaataggggttacagttcacagattaccctgcaaaccgtaacaaataaggtacaaagcatacaatacccattttttgtatattgacaaaatattttatgaaggtataatacaaattatcatttgtatgatccattgaggtaaattggtacgcaaataatgtcaaagggggcatgtttacgtgctttttttttgaaaacactttaacgtgctacagagctaatgaagcaatgagataatacgatgaaattactaaatactcaataagaggtaggagagaagaacatgagtaaatatctagtaaaacgtgtattgttagcgatattatcaatactcattgtaagtgccattacgtttttcgtaatgaacctgattcctggtggaccgtttaataaggagaaagcgaccagcaaggaagcacagcaggtattggaggaaaggtacaatctggacaagccggttccggaacagtatgtattgtatatgaacaatctgctgcatggcgactggggagtttcacttcacagtggaagaaatatcggaacagagatttccagaaagtttgcagtatctgcaaaattaggtggaattgcggcaattgttgccattatcatcggtgtgatattgggcagtatcgcagcacttacaagaaataaactgccggatcgtctgatcgtatttttcacgacactgggtacggcaatgccgtcttttgtactggcaacgctgcttttacttgtattttgtttaaaactcggatggattccggtatggtcttcgagcaatccgaattatttgctcccgatcattgcactggcggcatatccgatggcatatattacgcgtctgacaaagacaagtatgctggatgcgctaaatcaggattatatccgtactgcaagggcaaagggcgtgcaccggctcaaagttatttttaagcatgcgctgaaaaatgccctgattccggttgtaacatatgttggtcctatggttgcctatattctgacaggttccatggttgtggagaacatatttaccattggtggtcttggaaccgaattcgtaacaagcattgtcaaccgtgattacacgatgattatggcaatcacgattttccttgcggttctgatggtagttgcaaatcttcttacagatattgcatataaactgattgatccaagaatcacatttgaataatgatggaggaaggaacttagaataatgcaggaaaatgaagaattaaaaaagcggcagatgctgtccgcacagattgatttaagtaaatttaataagggcgattttataaaggcaacggaagaagagaagaagcagcaggatgtcatgggcgagtcaacgacattttttaaagatggcatgaaacgtctgaaaaagaatccgctggcaatgggaagtattgtgattctggttctgattctggcactgatcattattgcaccgttttttgtaccatacagctattcggatatcattacagtggacggcaagcgtgacaagaccgcagccaatatggcaccgtttgagtactcgaaattagagcagcagtacatggatcgtaccggtgagaaactgtttccgcatatttttggaaccgataacttaagccgtgattactttatccgtgttatttacggtacgagagtcagcctttcggttggtgtgatcgctgcaatcatggtacttatcattggactggtttatggttcggttgcgggatattttggtggaaaagtggatctgatcatgatgcgtatcgtggatattgtgtattccttgccggatatgctcattatcattctgctttcggttgtgtttcaggaacggttaaagccactgattgagggaaccatgtttgaaaaactcggaaccaatatgatctccatgtttattgtgtttggattgctttactgggtaagtatggcgcgtctgatccgtggacagattcttacaattaaaaacaatgaatatgtactggcagcacgctgtatcggtaccagaaacagccgcatcctgacccgtcatattctgccaaactgtttatctgttatcattatcacgaccgcattgcaggtgccgagtgccatctttaccgagagctacttaagtttccttggcctcggggtaagtgcaccgctgacttccctgggaagtctggcaaacgatgcgcgttcagcaatgcagtcgtatccgtaccgtctggtaattccggcagtgctgatctgtctgatcgtacttgcgctgaaccttctgggcgatggattgagagatgcatttgattcaaaactgaattaaggagataagcaaatgagtgaagaaaataaatatatattacaggtaaaagatcttcataccagctttgctacggatgctggggaagttcgtgcggtaaatggtgtctcctttaatctggaaccgggaaagacactgggaattgtaggagagtccggttccggtaaatccgttacttcttattcgatcatgcagattcttgcggaaaccggaaaaattaccggaggagaggtactttatcacggcgaggatatttccaagtggaacgaaaagcagatgcagaagttccgaggggaaaagtgctcgatcattttccaggatccgatgacaagcctgaatccggtatttacgattggaaatcagttgatggaggcaattctgctccacacagacaaggataaaaaacaggcgcgtgagcgcgccattgaaatgttaacactggttggtgtcaatgagccggaaagtcgtctgaaacagtatccgcatgagttatccggtggtatgcgccagcgtgtgatgattgccatggcactggtctgtgaaccggatattctgatcgcagatgagccgactacggcacttgatgtgaccattcaggcacagatccttgaactgatgcaggatctgcagaagaagctcggtatggcgatcatcatggtaacccatgatctgggtgtcattgcaagtatgtgtgatgagattattgtcatgtatggtggccgtgtctgtgagcggggcacagcggatgccattttctatcatccggcacatgagtacaccaaaggactgctccgctccatcccaaaggcagacaatatgaacgaaaaactcatcccaatcggcggaactccgatcaacctgctccagatgccggagggctgtgcgttttgtccgcgttgtgagtcggcaatgaaaatctgtttaaaacagcagccggcggagtttcgtgtgggcgaagaccatctggcgagctgctggatgaatgtaaaagaaatctatgaagcacaggagggcggcagcaatgagcagtgaaaagaaaaacaatgattatctgctggaagtagaacatttgaagcagtattttccggtgcatcagggttttagtaccattccgctgaaagcggtggacgatatttcctttgccatccgcccgggagaaacacttggtctggttggtgagtccggctgtggaaagacaacagtaggccgtacactgcttcgcctgtatcagccgacggcaggtaagattacgtttgacggaaaagttctctttgacagtggagaacagtatgatgaaaacggaaaaatgatcgttgatgcaaacggaaagccggttatgggcaaaaaagtagatgtcaatatgatgccgtaccgcaaggaaatgcagatggtattccaagacccgtattcctcattaaatccacgtatgacggtggaagatattatcggggaacctttggatgtgcataaactctacagaaatagaaaagagcgtcgtgaaaagattctcgatctgatggagctggtcggtctgaatgcagagcatgccatgcgttatgcgcatgagttttccggtggacagcgccagcgtatcggaattgcccgtgcacttgcggtaaatccgaaatttattgtctgtgatgaggcggtatctgcactggatgtttccattcaggcacaggttgtcaatatgtttgaggaattacaggaaaaacttggagttgcctatctgtttatcgcacatgacctgctggttgtgcatcatatttccgaccggattgcagttatgtatctgggaaagatgatggaaattgcggatgcagatgagttaaatgcaaatccgatacatccatatacactgagtctgctgtccgcagttccgattccggatccggagacagcaagaaaaagtcatagaatcgtgctggagggggatgttccgagtccgctgaaaatgccaaccggatgtccattccgtacaagatgtaagtatgcaacggaaaaatgcggtcaggagatgccgcagctgaccgacagggggaatggtcatatggttgcatgctggaataaataaggttttttcccgcaagggtgaaacatataaataattttcaggaggaacaattatgaagaagaaacttgtatcaatcatgctggttgctgcaatggctcttagcgtagctgcatgtggttcatcaaaaggaaactctgcaaagacggacggaaccgaagcaatggcttccagtgtaagtaaaacaccggacaaccagataagcattaaccttgcttccgagccacaatccatcgatccggcactgaactctgccgtagatggtggatgtatgatcgtgaattctttcgcgggtctttatacctacgacaaggacggcaagctgattccgcagctggcatctgatatgccggaagtatccgatgatgaaactgtttatacggtaaagatgataaaatcccagtggagcaacggggaagaggtaacagcaaacgacttcgtatacagctggaaccgtgctgcggatgaaaaaacagcagctgattatgcgtatctgtttgatattattgcaagaaatgatgacggctcacttgctgtagaggcaactgatgattatacgttaaaaattacactgaccaatccatgcccgtatttcaatgacctgatggcatttcctacttatttcccggtataccagaaggatgtggaaaaagcggatcctgatggaaagaatccgggtaagtggtgtcaggaggcaggctttgtatcaaacggtgcttatacattaaaatcatggaagcacaacgagagcatggtttatgtaaagaacccgaagtattacgatgcagacaatgtaactatggatgagatccacatcatgctgagtgcagatgatactgcaacctatgcagcatacaatagtggagaccttgactttgtagataccgttccaaacgatgagatttcaacattaaatggaaagaactctgatttccatatcattccaaaccttggaacttattatgttggttttaacgtaaacgacccgatttttgacggaaagaccgtagagcaggcagcatctatgcgtaaagcaatgaacctgctgattgatcgtgagtttatcgtggagaatgtaggacagaccggacagattgccgcagattctttcgtaccggcaggtatgtcagacggtaacggcggagtattcaagaccgatgatacaagctactatgatgcagacaagacaggtgcagaccaggtagaggaagcaaagaagctgctggaaagtgccggttatacatttacggataacggagatggttcatacaagtgtgatccggcaatttccatgacgttcctgaccaacgatgacagtacgcatattgcagttggggagtccctgcagcaggatttcgcactgctggggatcaatatggagattaagtcggaagactggaatgtatttattgaagaccgtaagtccggcaactttaccatcgcccgcgagggatggctggcagattacaacgacccgatcaatatgttagaactctttacaacggattccggtaacaacgatatgcagcttggaaagggagacaagccttccgattctgcaccggactggacagattataataagctgatcaaagagatccgtacaactgctgatttctccaaacgtgtggatctgatgcatcaggcagaggatatgctgatggataccggtgcagtaatgccgatttactactacaatgatatttatatgttaaagtcaaatatcaagggcatttactctaccatctatggtatgaagtactttatgtatgcaacaaaagacaaataaaatcatccggatacaaccgcgatgagaaacatgaaaactccgggaaaggctcccggagtttttgtgttttgttaatacagattttttttctcatgtgaccatttttccggatgatcctcatactgtgcgttaatccagtcaacgacctgctgcttgccttcgtttgtaaagggcgcagtaaaatccgttttgagggaatcatccgtcagggaaaagataagaggaccgggccagacccatgcatgaaaaaaggcgtccccttcctcgggggcttcccgtctgatcagaaaacgcatgccgttgatccagccggtatagctcgtttttttgtaataatttaagtttaatacttcgtcagaggttaacatagtatctcccagtttcattattttgtaataattgtaacacatttccattaattttggtataatgtctgttagagtgtttgaacgaaggtgaaaaaatatgtttgggagaaatgattttgttgaaaatgtaaaatctgcactggcagcagtggattgtgatatgggggcatttcgcagctggcagaaaatgtatgacaagctgaaaaagaagaaaagtgagcaggaggatcgctaccggcgatgcagagagcagacaaagcgtgtgcaggaagatgcacagctgatggaacatatgcttaccactgcgcaatcggtagacggaaaggaattcggcagacttttaaaagatcttcgtcagatgcagaacagttttgatcatgaatttctggtcagcaaagaagatcaggagtttcattccacgtacgatacgattctgcggctgggaacgaaagcgttgaatgccccggatcagaaacttctgctgcagagtgaaattgaaaatctgctcgcgcttcttaaggaaaatctggaaaaagaggaaccggagattgcggcacttacattttattatcagtttggatcggatcaggaactcgcgcagctgccgccggcagagaagctgtcgaagattacatatttatatgaatgtgagttccggcgaccgattctgcaacttttggaatcaggtatttccggtgccggagagcagaaacatacatatgaaactgcaacagaccgtggcagcagaaaaaaatatgaaacgctgcagatcttttttggtgcacatccggaacatattttagaacagatgatggaagaataaaaaaacaggaggattcctatggaacgcagaccattgccgggagaaaaataccggcactttaaaaataaactatatcaggtgattaccattgcaaaacattccgaaacgggagaggaactggtgatttatcaggcgttatatggaagttttggcgtgtatgcaagaccgctttccatgtttgtgagtgaagtggatcatgtcaggtatccggatgtacatcagaaataccggtttgagcgtgtggatgagtcgatggaagaaaccgggaaaaacgcagaaccaaaggcagagacggcgcagcctgttatgcagaaagcaacagcggaaaatgccgtgacgccggaccagacacaaccggaggtggaaccgaaactcatagagtttctggaggcagacagttttgatgaaaaatataatattctgacgtccatgagggatgttattacagacagtatgatcgatacgatggcggttgtgatggatacggtgattccggagggagatctggataagagatatgatgatttaaggtatgtgatccggaccagacaacagtatgaatttgccaacaggctgcgttgattaacgcagtccgtgccggcttaaatagctgttgtgatattttccggaatttgtcacgtcttctccaaaccagtccggggcggtgaacttatcagcttcttcgaccgaatcaaattccacttccaccagagtcagcggagcgaggtctttttcaaagatatcgagttctgcggtcagatgctcgtttaaaggaatcagatagcgggttttggcaattaaaagcccgtcaattttcggaagcagatgcccgtaggactctttggtgagaggaagattgtattcttcccgcaccataagcccatcgcccttgtaggtgagataataatcgtcgttggagcggcggatgcgtacgaccggttcagtgcacaggtaaccctgtgctatttttttactttcatactgatccagatgatccggtaatgtttttacaagatattttcgttcgatttccatatgattttcctttatttaaaataagtcagcagtttctgtacggcaatgctctgcggttttccgctgtcttccacaatggtgatctggcgctccggaatttcttcttcgagttcgatctcgaaaacctctttgtgctcaatggccggtcttgcaatgccttccggacagaatccgatgccaagattacagcggaccatcggaagaatctggtctgtggtagcaacttccatatccggagaaaaccgaaggtggtttttgtagaaaaaccggacatacagatcattggttccggtgccggcagaaagggaaacaaaggaaaaatccgcaagttcctttaaactgcgtttgcggcttgcagttgttttataggcacttcctccgatcagaatgtcgtgatagctgcgaagtgcggtttttcgcagaggctttcggatttccaaaggagaggtgaccatggcgatatcaacaagtcctttttctaaggcatcaatggcctgcggggtggaatgattggaaattttcagacggacatgtggataatctttatgaaattcctgcagtttgtctaaaaggtacagacgcatggcggtttcgctgatgccgatattgatctgcccgctttcgaggctcttgtttttgataatttctttttctccataggtgagctgttcaattgcaatggcaacgtggcggaacaggtgctcgccctcggttgtcagctgaatccctttgtgggaacggatcagcagtttgcagtcaagctcattttccagaatattcatacagcgggtgatgttgggctggttacttccgagcatttctgccgcgttggaaaagcttttataacgggcaacataatagaaaatgcggtaataatctaaagtcatgatattccctcctcataaactatcgaaagtataatacaaaaatggcaggtgagtcaaatggaaatcctccgattgtgtgcttgtcgtttttgtaagaaattgctacaatagatcatagcaattaccgaaaaggagaatgataaatatgagcagacttggaatttttattgcagacggatgtgaagaagtagaagcactgacggttgtggatattgtgcgccgtgcaaaacttgaaattgacatgatttccatcaacggaacaaagcaggtgaccagttcccgcaatgtgacatttatgacagacacgacaaaagaggaggctgacttttccgcttatgacgggatcattctgccgggcggtatgccgggaacggttcatctgggagaagatgatacggtcagtcaggtgatctgtgagtttgcaaaagaaggaaaacttgttgcggcaatctgcgcagcaccgagtgtgctgggacaggccggaattttaaatgggaagaaagctgcgtgtcatccgggatttgaagaaaaactgaccggagcagaagtattcttttccccggtagtatgtgatggaaatgtgattacaagccgcggcatgggaactgccgtaccgtttggtcttgcagttgcccgttattttaccgatgatgcaactatagaacatgtaaaagccggacttgtatacgcataaacaggttccagaaattgtcagctttttgttctcataattcctctggttctggtcacactatactcaggcacatgagaacagcaagttgaccccaaaagccgacctgccttcttgtgtgcaggccggcttttttatgcaggcatataaaatacaggaggtgaagaactatggcaggtaacaacaattcatcaagcggtacaaaccgtatggcagtaccggaggcaaaggacgcaatgaagcgttttaaggaagaggttgcaagcgagcttggagtacctttaaaagatggatacaatggggatctgacttccaaacaggcaggttctattggtggagaaatggtcaagaagatgatcatgaagcaggaagaacagatgaaataaggactttctgccggaaaacaaaacagcgtatggcttttgacaggccatacgctgtttttattataggaaataaaaaaacacttggcaaatatgtatttcgtatgctataatgcttaaatgactgtggtggtcgtagtatgcctgtttgtaccatcacggaaaaatagatcgtacatggaattgatatatataaggaggaaacaattaagatgagtgtacaggttgaaaatttagagaagaatatggcgaaacttaccatcgaggtttcagcagaggatctggagaaagcacttgagtcagcttaccagaagcagaagaagcagatcagtgttccgggattccgtaaaggaaaagttccgagagccatgatcgagaagatgtatggagttgacgtattctatgaggatgcagcaaacgctctgatgcagcagaattatgcagcagctgttgacgaaagcggaattgatattgtgtcacgtccgaccgttgacgttgtacagattgaaaagggcaagccttttattttcacagctgaagttgctgtaaagcctgaagttacacttggcaaatacatgggagtgaccgttacaaagatcgatacttctgtatccgatgaagaagtagacgaagctctggaaaaagaacgcaataacaatgcaagaaccatcaatgtaacagacagaccggttgcacagggagataccgctgtgatcgattttgaaggatttgtagacggtgttgcatttgagggcggtaagggagaaaaccattcattagagatcggttcccacacctttattgatacatttgaggatcagctggttggaaagaatgttggcgatgaagtagatgtaaatgttactttccctgagcagtatcaggctgctgatctggcaggaaagccggctacattcaaggttaagatcaacgagatcaaagcaaaggaacttccggagcttgatgatgagttcgcaaaggatgtatctgagtttgatacattagctgagtacaaggaaagcttaaagaaagacttagagaagaagaaacaggatgaagcaaagcgtacaaaagaagacgaagccatccagaagatcattgacaagtcaaagatggagattccggaggcaatgatcgatacacagtgtgagacaatgatcgaggaattcgctcagagaatcgcacagagcggtctttccatggatcagtacttacagttctccggtcttaccgtagacggattaaaggagcaggttcgtccggaagctcttacccgtatccagagcagtctcgtattagagcagatcgctaaggaagaaaatatcgaagtatctgatgcagatgtagatgcagagatcgagaagatggcaaagaattacggtatggaagctgataagctcaaagagtacatgggcgaaggcgagaaagaatccatgaagagagaacttgccatcacaaaggcagttgaactgatcatggacaacatcaaagaaagagcaaaggctaagacaaagaaagaaaaagaagctgaggcagaagcagaggcttaatattgaaaactacgacagagaaggactggtctgggagaataccagaccggtcttttgttcattgaggtgcatcgcaggatgcatgtaataaatataggaggcgatttttctatgagtttagtaccttatgtcattgaacagaccagcaggggcgagagaaattatgatatttattcccgtctgttaaaagacagaattatctttttaggggaagaagtaaatgagacaaccgcaagtcttgttgttgcacagcttctgtttctggaatcggaagatccgaacaaggatattcagttatatatcaattctccgggtggaatggttactgccggtatggcaatttatgacaccatgcagtatatcaaatgtgatgtatcaaccatctgtatcggactggcagccagcatgggtgcgtttcttctggctggtggtacaaagggaaaacgttttgcactccctaattcagaaatcatgattcatcagccttccggtggtgcaaaaggacaggcaacagagattcagattgcggcagagaatattttaaagacaaagaaacgtttgaatgaaattcttgctgcaaacaccggtaagccatatgagacaattgcagcagatacggaacgtgacaattatatgtccgcgcaggaagctgcagattacggcttgatcgatggagtgatcacgaatagatagttatgtggaaacctccggtcattgccggaggtatttttcatttataggagtaaataaattatggcaggaaagaatgatggcaaaatccgctgctctttttgcggaaaaacacaggatcaggtcggaagaatgatttcaggtccaaatggtgcatttatctgtgatgagtgtgtagatatctgcgcagagatcattgaggaagagaatctggaagaaaaagctccggcttctgcaaaggaagaaatcaatctgattaaaccggaagaaatgaaggcgtttctggacgattatgtaatcgggcaggatcaggcaaaaaaggtactttcggttgcggtatacaatcattataagagagtgcttgcagatcaggaaaatgatgtggaacttcagaaaagcaatattctgatgctgggaccgaccggttccggaaagacgcttctggcgcagacacttgcccgtgtacttaatgtaccgtttgcaattgcagatgccacgacactgacagaggccggttatgtgggagaggatgtagagaacattcttttgaagctgattcaggctgcagattatgatgtggagcgtgcacagcacggcattatctatattgacgagatcgataagatcacaaagaaatcggagaatgtatccatcacgagagacgtatccggagagggtgttcagcaggcattacttaagattctggaaggaacggttgcatcggttccgccacagggaggacgtaaacatccgcagcaggaactgattccgattgatacaacaaatattctgtttatttgcggcggagcatttgatggtctggagaaaattgtagaggcacgtatggacgcttctgcgatcggatttaatgcagaggtgaagtcaaagtctgacatcaatgtgggggatgcatttaagcgtgcactgccacaggattttgtgaagtttggactgattccggagtttatcggacgtgtgccgattaccgtatctttagattcgctggatcgcgacgcattgatccgtattttaaaagagccaaagaattctctgatcaaacagtataccagacttctggaactggatggggtaggactggaatttgaggacagcgcaattgaagcaattgcagataaggcattagagcgcaaaaccggagcacgtggactgcgtgccatcatggaagcggtaatgctggatttgatgtatcgtgtcccatcggatgattccatcagcaagtgtgtggtagataaaaagatggtggaaaacaatcttgctttagatggagaagagattcttggaattgagcaggacccgaagaaagaagtaaaagaagaacttgcttcataaaaagaccggatgcgtctggaaatataggagcagatacaagtggaagataaaatattgacaattccggcagtggcactgcggggaatgacgattttgccgggcatggtggctcattttgatatcagcagggacaaatccctgcgtgctgtcgaggaagccatgaaaggagaccagaagctttttatcgtcacacaaaaagatacagagaaagaagatcctcagggagaagatctgtatgaagtggggcttctggctgtggttcgtcaggtcgtaaaattacagaaaaatattatgcgtgtactgatcgaaggaatcgggcgcgcagagatatatgaatatacacagacagccgattatatgcaagcgcgtgtgatcgtgtatgatcaggaagacgatgaacagcttccggagcaggcaaagtctgcaatgcttttgagtgtgcaggaaacgtttgcaaaatatgcaagagtacatggcaaaatcgggcaggatgtgatgcgccaggttcaggaagagacggatcttttaaaacttcttgattatgtgggaaacagccttgtaatcagttataaaaagaaacagaaactgttagaggctgtcacgctgacagcacgttatgaggcggtgctttcttctttgctgcaggagacagagattctggctttaaagcgtgatttccagaaaaaagtgcaggaacatgtggataaaaaccagaaagattacctgcttcgggagcagatgcaggtaatccgggaagagctgggagaatccaatacagaaaccgatgcacaggagtatgaaaagaaactgcaggaacttcaggcttccggggaagtgaaagcaagaattcataaggagattgagcgttttcagggaatttcaggaaattcatccgagagtacggtaagccgtggttatatcgaaaccttactggaacttccgtgggatgcagtatcggaggataacaaagacttaaagcatgcgcagaagattctggatgaggatcattacggtctcgaaaaggtaaaggaacgtattctggaatttcttgcagtccgtaatctgaccggaaagggagagagcccgattatttgtctggtggggcctccgggaaccggaaaaaccagcattgcgcgttcgattgcccgtgcgctggataaaaaatatgttcgtatttcactcggaggtgtgcgggatgaagcggagatccgcggacaccgcagaacctatgtgggagcaatgccgggaagaatcgtcaatggactgcggatggcgggagtcaaaaatccactgatgctgctggatgaaattgacaagatgagcagcgattataagggagatacagcttctgccatgctggaagtgcttgactcggaacagaatcataaattccgggatcactatgtagagcttccggtggatctgtccgaggtactgtttattgcaagtgccaattccatgcaggatattccgggaccgcttctggatcgtatggaaattatagaagtcagcagttatacggaaaacgaaaagttccatattgcaaaggatcatctgctggcgaaacagtttgaaaaaaacggagttgcagatggcaaactaaagattacggacaaagcgctgcgaatggtgatttcttcttataccagagaagcaggtgtacgttctctcgaacggcagatcggagaaatctgccgcaaagcagcccgcagaatctacgagggcgatgagaaaatgattcgtgtaaccggcacaaatctggaagattttctcggaaaactgaaatatcgtccggagaagaaaaacaaaaagaatgaagtaggcattgtgcgcggtctggcatggaccagtgtgggtggtgtaactttagagattgaggtgaatctgatgccgggcaagggcagtgtggtgttgacgggaaaactcggagacgtcatgaaagagtctgcacagaccggaatcagttatattcggtccatcagtgaagattaccatattgatccggaatttttccagaaacatgacatccatatccatgttccggaaggtgcggttccaaaagacggaccgtctgccggaattaccatggcaaccgcaattctttctgcggtcaccgggaagccggtacgggcagatgttgccatgacaggggaaattacactgcgcggacgtgtacttccgattggcggattaaaagagaaattgcttgcggcaaagaatgccggaatgaagacggtctgtattccaaaagagaatgaacaggatcttgccgaaatttcggaagagatcgttggagatatggagatcataccggtagaacatatggatcaggtaattaaggctgcatttgtataatgcagcccaaattctttttgcaggagaataaatatgattatcaaaaatgtgaatttggagacagtttgtggaattacaagtgcgattccggacaacctattggatgaagtggcttttgccggaaaatccaatgtgggaaagtcatcgctgatcaatgcgctgatgaacaggaaatcgcttgcgcgtacttcttcccagccgggaaaaacgcagaccataaatttttacaatgtcaatgaggcaatgtatctggtggacttgccgggatacggatacgcaaatgcaaatattgagattaaggcgaaatggggacagatgatcgaaaattatctgcatacatccaaacggctgaaagcagtttttcttctgattgatattcgtcatgaaccgtcggaaaatgatcagatgatgtatgagtggatggttcatcagggatttgcgccaatcatcattgcaacaaaatcggacaaattaaaaaagatgcaaatcctgcaacatgtgcaaatgataaaggatatcctgcaagtagagccgggaacgatcgttattccgttttctgcggagtcaaaacagggccgggaagaaatctggcagattgtagaatccgttattgaacttccgcaagggtacatcgaggcggaaaatgccaaaagagaggcaaaacaaaagcagccggcaccgcaggaaccgaagaaaaaagaacgctggaaaaagacagaccgcccggtagccaaaaagacacttcgaaaagaacagaaaaagaaagtgaaaaaaaagtagaatgaagaaaaagtatttgtatactgcaatcatgctttttgccattctggtggcaggaatgggactgaccggatggtacgtcagccagacacaggaacagacggatggacaggaactgacggttgtgacttccttttatccaatgtatattgcggctgagaatgtaatcggggatgcagacggagtgcgtctggaaaatttaagtgagccgcagaccggctgcctgcatgatttccagctgacaccggaagatatgaagttactcagtacggcggatgtgtttatcatcaatggtggtggaattgaaagctttatgaaggaagttgcagaggcttacccgaatctgaaaattatagaagcctgtgagaatatttctttgctctccggggaggaggacgatacacatcatcatgagggggaaacagaagaagaacatgcccatggggatgtcaatgcccacgcatggatgagcgtttctgcttatgagacacaggtacagacgattgccgatggattatctggagcagatccggaaagaagcagtgcctatcagaatggggcaaaggcatatctggaaaaactggacggactgaaaaaacgtcaggagaaattaaaacaggaaatttccggtcagtcggtgattctgtttcatgaagcatatgcctatgtcgctgtggactatggactgcaggtaaactatctgctggatctcgatgaggaacggcaggtcagcgcaggagaagtatcggatgtgctttctgctgtccgcaaggggcatgtaaaatacattcttgcagaagaactgtatggaaagagtatgggagatacgatccggaaagagtccgatgcaaaggtattatatctggacccgctgaatcgcggaacttacgaaaaagacagttatattaacggtatgaaaaaaaacatggagatacttgaggaggcattttatgcgaaagatcattagtccgtgtggatttcactgcatcaaggtgaatcatctgggggtgtggttcagtgagcaggaaatcttaaaagatgtgaatcttcatatgcactgtggatcgctgaatgcgattatcggaaaaaacggtgccggaaaatcgacattgatccgtgccatgctgggggacatcccgcatacgggagatattgagtttcgggataccaaagacggacggatgcagaatttaaaaatcggatatgtcccgcaatcgattaacatcgaaaaaaatacaccggtcagtgtctatgacctgctggcaagctatgagtcgagatatccggtgtttctgccgaaaaaacggaaattatatgaaaagatcaaaaaacatctgcgcatttttgaggcagaagaactgatcgacaaacaggtttgtaatctgtccggaggacagctgcagagagtgcttcttgcactggcggtgatggatgagccgaatctgctgcttttggatgagccggtatccggaattgaccagaatggcatggaacttttttttaaaacgatggattatctgaaaaaacattatgaccttgcgattattctgatctcacatgatctggattacgtggcaagatatgcggatcatgtagtgcttctggacaagacggtcctcaggcagggaacggtaaaagaagtatacgaaagttccgaatttgaacggattttttctgcgggaaaagaagagacatggataaaggaggatgagacaaatgattgattggacctcctggatggattatggttttatgaagatggcattggccgcaatactgatcattacaccactgtttgggctgatgggaaccatgattgtcaataaaaaaatggcatatttttcggatgccctggggcattccgcactgacgggaattgctgtaggagtggtatgcggaattccggatacgaatatttccatggtgatttttgcagttgtattcgcgctgctgttaaacaaaatcggaagcagaagtaccgtatcaaccgatacgattatttcggttttttcctcctgttcggttgcgattggtctggcaattctgtcaaaaggcggaaatttcagtaaatattcgagtcttttagtcggggatgttctgagcattaccaaaaaggaaatcgggtatcttgttattatttttatcgttacgattttgttctggatcacctgttttaactggctgaatgccatctgtattcaccgggcactggcaaagagcaagcggattccggtacaactgatggattatgtttttgcggtacttgtagcactgattgtcatgctttccatcaagtgggtaggtattctgatcatcaatgcattgctgatccttccggcggcatcgagcagaaatctgtcggtaaatatgcgggaataccatgtcttttcgataattttttccgttttctccggtgtaatgggactgattttgtcttattatacgaacgttgcaaccggcccaatgattgtaattatcgcatctgtgatctattttgtgacttattttttcggaagaaagtggaaagaataacagggagaatagaatttgaccgattgtattttttgtagtacaatcggtgtatacaaaatactgaggaaatacaaatggatgaaataacactcaaagcacttgcaaaaataaatctgggactggatgtggtccggcgcagggaagatggatatcatgaagtgcgcatgatcatgcagaccattcatctgtacgatcttctggagattcaaaagatccgggagccggagatacagattgtttccaacctctcttttttgccggtaaatgaaaataatctggtctataaagcggcacggctgttacaggaagagtttgcgcttacagatggaatttccgtaaaactgacaaagagaattccggtagcggcggggatggcaggaggaagcacggatgctgccgccatgctgtatgcgatgaatcagttgtatgatctgggattgtcccgcagggaactgatgaagagaggggtacagatcggggcagatgttccttactgtcttatgcgtggaacggcactggcagaaggaatcggggaaaaactgacacagcttccgccgatgatcaaatgtccggtgctgattgcaaaaccatccatttctgtatcgaccaaatttgtatatcagaacctgaagctggatgaacagacgaaccatccggatattgatgcactgatgaaagatatccgggagaaagattttgacggtgtctgtgcacatatgggaaatgtactggaatcggttacgataccaaactatccggtaattgcagagatcaaacagcagatgatgcgttcgggtgcaaaagcttccatgatgagcggaagcggtcctaccgtattcggtctttttgaagatggagaaacggcaaagcgtgcgctgcgggaaatgaaacgctccggtcttgcaaaacaggtatatctgaccacgatctacaacaacaggagaaagtaataattcacacaaacagaaatggagacgataacatgacagatgatctgacgctcaatatggacgcatatctgccactgagagatgttgtatttaatacgttaagagaggcaattttaaaaggagatctcaaaccgggagagcggcttatggagttacagctggcagcaaagcttggggtgagccgtacaccgatccgtgaagccatccgtatgctcgagcaggagggacttgctgtaaccatgccacgcaaaggggcagaggttgcaaagatgacgctcaaagatatggaagacgttctggaaatccgggaggcactggatgaacttgccgtaaagattgcatgtgataagatttcggagaaagagctgcaaaaacttttagaagtcaaagatcagtttgaaaacagtacaaagaccggagatgtgaaaatgattgccgagatggatgtaaaattccacgatgttatttttgaatcaacgggaaatccgaaactcgtgacgttattgaacaatctgcgggagcagatctaccgataccgtgtggaatatatcaaaaatccagacaattatccgatcctgattgcggaacataatgcgattgcggagggactgaaaaacagggataaagaagccgcaacgcttgccatgcacaaacatgtaaaaaaccaggcagtggcagtaaaaagtgtaatccagtgtcaggatgaaacagaaagtgaatagtttatgtaacagatggaaatagtaaggacagataccttttggtgtctgttcttttttcatataaagagagacaggaatgtaaaaatggggcatacaaaaatttcaacagatattgaacaaaacatcagacagttccagcagctgttcgcagacagtgcagatattaaaatgaaggaaatgcgtctgggaaaaggaaaaagaagacgatgttttctggcatatattgaggtggcagtcagcaatatgctgctggaaacgacggctttggggagactgctggcggcattatcggagctgccagacagagacttaaatcgggtactcaatgagaatgcgatggggatttcagatgtgacaccgtacgataccatagaggatgcagcacaggggatgctcacgggggatgccatcctttttgtggatggatacggacatgcattaaagattgccgacaaaggatatcccggcatgggggtgcaggaaccggattcggaaaaggtgatccgtggttcgaaggaggggtttaccgattccatcaaaacgaatacggcacttatccgtaagcgtgtgcgatcaacacgggttaaagtagaagaagtacaggagggggtgcgttcgcacacggcaattgacctggtgtatatggcagatctgaaatatgaatccgtgctgcggcagatccgggaaataattacagaatatgagattgacggggtcatggacagcggaatcttagagcagctggcggaaaagaaatggtattcaccgtttccacagtttcagacgacacagcgaccggaccgggcagcacttgcggtgctggagggaaggatcgtattgttatgcgacaattctccggtcgctctcattttgccgacagacctgaactcctttctgaagacgagtgatgactattataatcgctttggtgtggcaacgtttgcacggatcttgcgttacatggcagctttttttgctatgacactccccggactgtatctggcggtgacaaattttcacacacagattctgccgacaccgcttttgttatccttctgggaggcacggatcggtgtgccttttccggcggcactggaggtcattctcatggagatttcttttgaactgttgcgggaggcgggagtccggttgccgggggcaatgggaaatacgatcggaattgtcggaggtctgattatcgggcaggcagctgtggatgccaaccttgtcagtccgattgtggtgattgtggttgcgtttaccgcgctttgttccttttccattccgaatgaagaatttgctttttcattccggatattgaaattttatgtgattgtcctgtccgcatggcttggatttttcggatttttgattgcactgcttacggtgttcatccatctgtcgcggctggaaagctttgggattccgtatctcatgccgtttgtgggggcagatgtcaatgattatcatgatgaacgcgacagtatctggcgtgcaccactgaaaaaaatggtgcgaagacccatttatgcaaaacgcggggagcggatacgtctgcggaaaaaataggctgagtaaacagtaacggaggaacgatatgttttcaaataataaccggatatcaacgcggcaggtgttccggctgtttgtgttcgattttgtaggggaaagtacgctgattctgccctcacagctggcggcatttgcgggaaatgacggtctggcatccattgtgctgggcggcattatgggaagcctgtatctgtggtatcttgcatatgttttaaaaaagatggaaacggatctggtcacttatatggaacggattctgccggcatggatgaaaaaaatttttctggtgttactgctggtctattttaccgggatggcaggatacggggcatatatcttttcggacgtgatacaaaaggggctgattgcaggggagtcgtttcccctgattctgattctggtattgctgacggcagggtatgctgtgtgtggcgggattgaaagccgtgcacgggtgtatgagattttgtttgtcgttttgtttgtacttcttgcagtaatgcttttgattgcggcgggggatctggagatggaatatctgtatggcttttttcaggcagataccgggtcggtgatgaaaggaagtctggcagtctttttttgtctgatgccattgtttctgcttgcattttttccctcctatgtgcagaaagcaaaatgggggaagctggtgcatgccgtgcatgcggcaatgtggtttgccataggtgttcttgcagttttgtatgtgatcctgctgggcagttttggaagccgttccctgacgaccatgaaatatccggcaattacgctgatgagcagtatccatctgaggggaagttttttgaagcggctggatgcctttatgatcgccatctggttttttacgctgtttgcacttgtgactgtgtttttgttttatgcacaggaactggtacagaaactgcggaaaaaagatacgcataaaaaatggtatctctgtggggtgatggctgccgttttcggggtggcagaaatgctccaccaaagcagccatggggaatggttccgggattatctgttgtatatcggaatcccgttgtttttgttcctgccattgtttgtacttttgtggggaaaggggaaaaaacggcatgaagggtaaaataaaaaaatatgttgcactggtattgtctgtgcagcagctgctttgcggatgcagtgccacagaactcgaagaccgctgttttccaatgatggcggttgtggacgaaaaggatggacagatttcttttggttatggatttcccaagctgagccagaaggataatacggatctggaagaggcgcgtgtgaatatcgcgcctgtcacgggaaagacgatggaaagctgtgtgcagacctatgatagccggctggaaaaactggcagactgcaatcatatgaaagtgcttgtcttcggggaaaatctgatggaggataccggacggtatgcggatgttctttcttatctgaaacaaaccggacttttcccaagaaacatctatgtatgtgtggcggaagatccattggcattgtttgagacagaagaagatctgccacaggatctgggaagttatctggaacagtatctgcagaatcaggaatccgcgggatcaggaaaactgtttaagcttggcaggctgctggacgagaaggaaaaccatatcctgcagattatgctgccatatttggaaacagaagaccatatcattttctggaaaaccatgtaccgcgtaccggatgacaggtttttgtataaacaggaaaaataatggaaatgctcttactatcagaggaaagagagtgtgggaaaatgaaaaagaaaaaaatcatgtttatcattttatgtatgttaacggttcttgctgcgggaactgcgcacgcaacagaaaaggaaagggtggacccactgcagccggcaattgcagaaaaaatactgcggtttcatgtactggcaaacagtgatgccaaggacgaccagaatgtgaaactaaaggtccgggatgcggtggggcatatgcttgggcaaaaactaaaaaaggtaacagaccgggcgcaaaccgaaaaaattgtgcaggaccacatggacgaaattatagaaacagcggaaaaaacgctgcacaaaaacggctatacatacggtgccagcgcaaggcttgccaatgtggatttccctgtgaaaacgtatggggattatacgtttcctgcaggcaaataccgtgcattgcagattacactgggaaaaggagaaggacataactggtggtgtgtgctgtatccgaatatgtgttttcagggatcagtatatgaggttgtggatgaatcttccggtgaggagctgcgtgaagttttgacacaggaagaatatgcagatgtgtttgattctggaaaaatgcagatccggtggaaattccttgattatttccgttaaactcgttatgataatggggcacgccaatgtgcgttaagatatcaaggaaaagaaggaaatgactatgacaaaagacgtattattgtccattaagggattgcagatcggggaaaatgaacagaatgacacgatagaagtgatttctccgggagattattattttcggaatggcaagcatttttttatgtatgaggaagtcatggaaggtcagaaagaatctacccgaaacatgattaaggtcagggacaattatatggaactgacgaaaaagggtgccgtcaacgttcatatgatttttgaaaaaaataaaaagaatattacatactacaatacaccgtacggcagtctgctggtgggaattgatgcctaccgtgtggatgtgcaggagaaagaggaagagattacggttgaggtggaatatgcgctggagataaacaatgagcatctggcggactgccatatccggattctggcaaatccgaaacaggacccggcattcaaacttgtcagataaacagacgtaagtaatgaatatgcacgaaaacaaacgaaaatgaacgaaaaaattgttaaatattgtgaaaaaatgctgagttgtggtataatgtaaaaaatgataacagagggggaaatcattatgaatacggaacacaggcagcagaaaatttctttctggcattccatgaaaacgcagtttattgcggtagtgattcttgtggcggcagtgattgtaatattgtatacactcatgattatgcctggggtaaagagcaatatccgcagtatctattccaactatctgctggatctttccatttcgtatggacgggagatggaaagtgccatgcaggtaaatattgatcttttagataacccggaagctgcacaggacattttacagcagatagatgtcgcaggagccaagacagcttatgcctatctggttggatttgacggaacgatgctgtatcatcctaccgctgagaaaatcgggcagccggtagaaaacgaggctgtcaaaaagatgctcaaagagatacaggggggaagtatcccaaaaccggagactgtgcagtatgtatttcagggggagaaaaaattttccgcatgttataccagcaaaaaacagtttatccttgtagtcacggcggatgatgcagagcttcttgcaccggcattaatgctggagcaaaggggaatcctgatttccggtgtgctgctgttgctcggggctttggcagcgtttgtttttgcaacacggattacacgtccgttatcaaagattacagattccgtgaaccggattgcacagctggatctgcgaaacgatcaggtactggaacaatgtgccgcacatcgtggggaagtcggaagcattgcaaatgccgtgcttcggatgaaagaggctctgacggaaattgtacagaagatacggcagcagagtggacagttgtttgatgcgtcggaaacgttaaacaataacgcggtaaagacagcaggaaacgtaaataatgtggagaccgcagtaaatgagatcgcaaccagtgcaaccagtcaggcacaggagacacagggggcaaccgagtccattatttccatgggtacgatgattgaggattctacaagccaggtaaaatccatgaacgagacggcagatgtgatgaatgagtccggacagatagccaaaaaggcactggaagaactgggagaaatcaatgagagggcaaccgagtccatcaatgtgatttatgaacagaccaatacaacgaatgattctgccttgaagatcaaggatgcaacatcgctgattgcttccattgcagatgaaaccaatctgctgtcactcaatgcttccattgaggctgccagggcaggagaggcaggaaaaggttttgcggtggtggcagcacagatccagaagctggcagaacagtccaacgaatctgccaagcggattgaggatattatccgtgaactgctgaaagattccgaaactgcagtacatacgatggaagatgtgaagaaaatcatgcaggagcagaacgaaaaagtgaaaaagacggcagaagtttttgaacaaatgcatgaaggtgtcaatttgtccatccatggaatggtatccatagaagaacagacacaaaagattgaggatgcaagaaataagatcgtagatacggtacagagtctgtcggcaatcgcagaggaaaatgcggcaagcacacaggagacttcggcttccatgatggaaattggttcggttatcaatgatatcagccagaatgcagagaaccttaaaaatattgcagaggttctggaaaggaatatgcagctgtttcagatggaagaatcatgatttgtggaacaacggtatagaatctgcatgaaaagaaaaggcttatcttcccggtggggaagataagccttttcctgttttttcctgtaaacacattatttctttttgctgctggaaccggatttggattctttcagccgggcattggcttcattgtacttttcctgaagctttgcacggaatccttttttctttttgaccggtttttccagcggtccacggagtccgcgtacacctgtgatataaagaccactgacggttgccttgacttctttcttgaccggaatgtcatcgtagatctgctcgtctgcaatcagtgtcatgactcttggtccgactttggcttttacgattggaagtttggcgcgctgcatgagtttgtttgcctgctccattacctgggaaggaaggccggcatctttcattttcattcgttttttgtcgatgatcagcatcgtcactgtctgcgcagcggctttcatctgctcatcctgttcttcttttttcttctgtgctttctttccgagaaagtacaggacaatcatagcggctaccagaataatggcaatcactaataatacgattcctattggtttcatcgtggatttcctcctctatatactaaaatttattgtagcaaagatttctgtaaaaatcaacgtttactgtttgtattttctatggatttatggtatgtttaattagttgtaaaaggaaagaaagaaggatttgggacattatgaagaaaagagtggttatactttttttgtgcatgacgatggtattatccatgggagcatgtggtacagacagtgataaaaaggcaagtacccagcagggaacacaggagacggcaagtgaagtgtttgacggaccgcacagcgcacagatgaagctggatctgtcaaaacttgtgacgaaacttgcagattataaagggattgatgttacaatctccggaaattatgatgtgacagatgatcaggtggagcagaatctgatatcactgctttcatattacggaatcaccggagttgaggtaaaagaccgtgatacggttcaaaagaatgattatgtcaaggtggattataccggatatctcgacggggatgcatttgatggcggttctgcgacagacacaatgattgatgtggcgaacaactgtgatgccacacagaagacaaattatattgatggattcagtgatgggcttgtcggcgcaaaagtcggggatgaagtaagttcggatgtgacattcccggagaattaccagtcttcggatctggcgggaaagaaaacaacgtttaaattcaaaatcaagggaatttataagccggttaccatggacacgctgaccgatgacatggtagcagatgcatttaccgagcagaagatcaccacgaaaaaggatctggttgcatatgtacggcaggtactcgaaaagcaggccgcaaattccaagtctcaggcaagtatcagcgcagttgaagatgatctgctggataaatgtaaagtgaaaattccggatgagtatctggatgcgcgtctgcaggaatatcagcatgaatttgaagcagacaactgcaatgatacacagactctggaacagtatgcaaagaataacaataccaccgtggatgatatgaaaaaacagtggaaagaactgatgatcaagcagatcaaaattgaatttatctttggacggattgcggaaaaagaaaatattacaatcagtgatgatgattttaagtcatttgtagattatctggtaagttcaggcaacagccagatggcagatgaaaatgcggtatataaatattatggtggtggaaataaagaggatggaaagaaaacacttcgtcagctgtatgtggtcaatcaggcgatttcgtatgttgtggagaaagccaatattaccgtagaaccggatacacagacgacagagtcatcggaaaacgaaagggttcaataaaaacaactaagggatagattagatttttaacggagggacagtatggaattagtaaatgtcagagagattttcaaaaatacgatcagatatgaaaatcagcaggtaacgatcggcggatgggtaagaagtaaccgtaattccaaaaattttggattcattgtagtgaatgacggtaccttttttgagccgattcaggttgtatatggagatggtctggagaattatgaggaagtctgcaagattaatgtcggagcagcagtcattgtaaaaggacagctggtgcctacgccggaagcaaaacagccgtttgagatccaggcagcagaggtaaccgtggaaggtgcttccacaccggattatccgctgcagaagaagcgtcacacgtttgaatatctgcgtaccatttcacatctgcgtccgagaaccaatacgtttgaggcggtgttccgtgtacgttccctgtgtgcatatgcgattcacaaatttttccaggagcgcgatttcgtttatgtgcatactccgctcatcacaggaagtgactgcgagggtgccggggaaatgttccaggtaacaacgcttgatttaaaagatgtgccgaaaaaacaggataaaaccgtggattatactaaggatttctttggaaaacctaccaatcttaccgtatccggtcagttaaacggagaaacctatgcgatggcatttaaaaatatttatacgtttggaccgactttccgtgcggaaaattcaaacacaaccagacatgcggctgagttctggatgattgagccggagatcgcattcgcagatctcgaagatgatatgatgcttgcggaaagcatgttaaagtatgtgatcaattatgtgattgaacatgcaccggaagaaatggcatttttcaataattttgtggacaaaggactgctggatcgtctggagaacgtagtaaacaatgattttgcacgggtgacctacacagaagcaattaagatattgtcaaaacacaatgacaagtttgattataaggtatcctggggctgtgatctgcagaccgagcatgagcgttacctgaccgaacagatttataagagaccggtatttgtaaccgattatccgaaggaaatcaaggcattttacatgaaactcaatgaagacggaaagacagttgcagcagtagactgccttgttccgggaatcggagagatcatcggcggaagccagagagaggacgattatgataaacttctggcacgtattcaggacatggggctgaaagaggaagattacaagttttatctggatctgcgcaaatacggatcagccagacatgccggattcggtcttggatttgagcgctgcgtgatgtatctgacgggtatggcaaatatccgcgatgtcattccgttccctagaaccgtaaataactgcgaactgtaaaatggaataaaagagccgtatttcccataaactctaaggaggacaatttccggagaagtatgtgtggagaatgggcaggaacaaataaataataaaacaggaagaaacgtcgcaaagtttgcaggctgctttataggcacatgtctgctctccgcggcgctttttctgttatggtgcgggatttcctattccatgagattgtcggtggaactgatccgggtgggaattacggcatggtatgcgctttccggtctcatcggtggaaaaatcctgcgcgcatgtaaatgtggtgccatacctttttgcgcagttatgctgggaggcttttttttcgggattctgtatgtctgttcctgcatacgggaacagcactggattgcgctggagggagaaaacctgacgattctgattttgtgtacggcagcggcactgctgggaagcgtgcggtggaaaaagaagtaagggctgtgtgactgtaaaaaaagactttccttatggtgaccactgtgctataataatacagatagacgggaaatccaaaaaaacagacaaaggagagattctcatgaagcatgtaaagacattaaatacaagaaagttacagaacacaatcaagacaggtggatgtggcgagtgccagacatcatgccagtctgcatgtaagacatcctgtacagtaggaaaccagacctgcgagaagtgtaagtaatcacggagtgattacttacacagcccgaacgctaaggtaagaaaaataaggcataataaagccgcgtgcgtagcgcgcggttttattatgtttaggaaagagaggaaatattatagtggttcatcagtttaagaacaatggctatgatattgtattagacgtaaactccggtgccattcatgtggtggatgatgtgacttatgatgtgatcgcattatttgaagatcactccagggaagagatcattgcccagttacaatcccggtatccggaacaggagattgcagaagcaatcgaagaaacagagcagttaaaggagcagggagacctgtttacggaagatgcttacgaacagaagatttttgattttaagaagcgcccgacggtagtaaaggcattgtgtttacatattgcacatgactgcaatctggcatgccgctattgctttgcggaagagggcgaatatcatggaagaagagccctgatgtcttatgagacaggaaaacaggcacttgatttcctgattgcaaactccggaaaccggaaaaatcttgaagtggatttcttcggaggagagccactcatgaattttgatgtggtaaaacagttggttgcctatggacgggaacaggaaaagctgcatgacaaacatttccgttttacgctgacaacgaacggggtgttgttaaacgacgatatcatggaatttgcaaataaggaaatggacaatgtcgttttaagtatcgatggaagaaaagaagtgaatgaccgtatgcgtccgttccggaagggggcgggaagctatgacctgatcgttccgaagttccagaaacttgcagaaagccggaatcaggagcgttattatgtccgcggtacctatacccattttaacaccgatttttccaaggatgtactgcatctggccgatctgggattcaagcagatttctgtggagccggttgtcgcacagccgaccgatgaatatgcactgcaggaagaggatcttccggttctctttgaagaatatgataaactggcagcggagatggtccgccgtaacagagaaggaaattctttcaacttcttccatttcatgattgatctggaaggtggaccttgtgtgtacaagcgtctgtccggatgtggttccggaacggaataccttgcagtcacaccgtggggagatctgtatccgtgccaccagttcgtcggaaatgaagattttctgatgggaaatgtctgggatggcgtgaaaaacacgaatctgcaggacgagtttaaatgctgcaatgtctatgcaaaagaaaagtgccgtaaatgctttgccagattttactgtagtgggggatgtgctgcaaattcgtacaatttccacggaaccatcacagatgcttatgatctgggatgtgaactccagaagaaacgtattgaatgcgcaatcatgataaaagctgcggaagcggaaaattaaaggaataggaaggaagcaaacatgaaaaaaagcaagggcgtcgctataatcgcgattatcctggcctgtctgatcggactgggatattacacgagcacgattatgtctgcgacaagcacaagtcagaaaaaaactgacaacaagacggaagccgaaggtattaaacttggtcttgatctttccggtggtgtgtccattacttaccggatcaaggataagaatccatccaagaaagatatcaatgatacggtagcaaagcttgaagagcgtgccgagagttacagtaccgaatatgcggtatatccggtcggcgatgaccgtattacggtagaaattcctggtgtctatgatgcaaatgccgtacttgaggatctgggaagcccgggatcgctgtattttatcgtacagaaagattcggacggtaatgaaaactacagttatgacagttccacaggggaatacaaactgaattatgacattcagaatttggttgacaatggttctgtaatcatggacggtaatgatgtaaagtctgccaatgcagcgtataaccagtcttcctctaccagtaccaaggagccggttgttcagctgacattaaagaaaaaagcagcagatgtgtttggagaggcaaccacaaaggcagcttcttccggagaatctatcggtatttactatgatgatcatttcatcagtgtaccgaaagtagagagcgcaatcaaagacggaagctgtgtcatcaacggtatgtctgattatgatgaagcggaacagcttgcaacatttattcgtgtaggtgcgatcaacttaaagctcgaagagatggaatcttccgtagcaggggcacaactgggtggaaaagcactttcttccagtgtcaaggcagccatcatcggtctgatccttgtgatgcttttcatgatcttaaattacagcttatctggtgtggttgcatccattggtcttgccatttatacaaccgtaacggtagctctgatttatctgtttgaaattacgctgacacttccgggtatcgcgggtgttatccttggtatcggtatggcggtggatgcgaacgttattattatctcacgtatccgtgaagagattgcagccggcaagtctgtactgacttccatcaaaacaggttacaaaaaggcaatgtcagccatcattgacggtaacgtgaccacctttattgcagcgctggtactgatgtggcttggttccggaactgttaagggatttgcatatacactgattatctccctgattgtttccatgttcactgcacttgtcatttcgagactgttaaatctggcattttatgcggttggatgcagaaacgagaaattatacggacgtgcaaaagaacataagaccatcgatttcatgaagcatcgctgggtatgttttattctttccctcgttgtgatcgtagccggatttgttggaatgatcggttacggagcagccggaaagggcgctttgaatttcagtctggagtttaagggtggtacatccatctccgcagattttggtaaggattataccgttgaacaggtagaggacaagattgtaccggaagtcgcaaaggttattaatgataatgcgatccaggcaagtaccgtatccggcagcaatgttgtgacaatcaagacaaagacactgagcctgagcgaacgtgaagaagtaaatcagatgcttgtggacaagtttggtgtggatgaatccacaatcgagagccagagtattggttctaccatcagtaatgagatgcgttccaatgcggtcaaggcactgatcgttgcatgtattttcatgctgttttatatctggttccgtttcaaggacatccgtttcgccggaagtgcgattattgcactggtacacgatgtacttgttatgctgacaggttatgcattgatccgtatttctgtaggtaatacatttattgcctgcatacttacaattgtcggatattccatcaatgataccattgttatctttgaccgtatccgtgagaacatgcagggaatgaagaaacagacaccggaaacactggcagaggtggcaaaccggtctctgacacagacactttcccgttcactgaatacctccattacaaccatcatcatggtattgctgctgtttatcctcggagtatcttccatccgtgagtttgcattaccgcttatgattggactgatcagtggtacgtattcttccatctttattgcagctgcattatggtatgtcatgaaactgcatcttggcaaagacaaattgttaaaaccagcagtagcaaagacaaaaaagaaataaatattaaaaaacaggggagctgcacggcagctcccgtttgttttctaaggagtggaatggttgcattgcaccgaagaattcggtataatgggaaaaaagagttgaaaaggagaatattatgtatacactggaagatatacaggcagtagatcctgaaattgcagcagcgatcactgcagagtttgacagacaaaacagccacattgagctgatcgcatcggaaaactgggtgagcccggcggttatgtctgcaatgggaagtattctgaccaacaaatatgcagaagggtatccgggaaagcgttattacggcggatgtgagtgcgtggatgtagttgaggaactggcaagagagcgcgcaaagaaactgtttggctgtgagtacgtcaatgtacagccgcattccggtgcacaggcaaacatggcagtacagtttgccattttaaagccgggtgataccattatgggaatgaatctcgatcacggcggacatctgacacacggttcaccggtgaatttttccggtacgtatttccatgtggtaccttatggagtcaacgatgagggatttattgactatgataaagtaagagagattgcactggaatgcaagccaaagatgattattgcaggtgcatctgcatatgcacgtaccattgactttaagaaattccgtgagatcgcagatgaagtgaatgcggtgcttatggtagatatggcgcacatcgcaggactggtagccgcagggctgcatccaagtccggttccatacgcagatgtggtaaccactacaacacacaagacactgcgcggacctcgtggaggaatgatcctctgcagtgatgaggtaaacaaaaagtataatttcaataaagctatcttcccgggaacacagggaggaccgctgatgcatgtgattgctgcaaaagcagtctgctttgaggaggcattaaagccggaatttaagacgtatcaggaacagattgtaaagaatgcacaggcactttgcaaaggattacagaagcgtgatgtcaagattgtatccggaggaacagataaccatctgatgctggtggatctgacaccatatgaccggacaggaaaagttgttgagaaacttcttgacagtgcgcacatcactgccaataagaatacgattccaaacgatccgcagaaaccatttgttacaagcggaatccgtcttggaacaccggcggctacatccagaggattaaaagaggacgattttgatcaggtagctgaggcaattgccatgatcatcaaagagggtgagccggctgttgagaaggcaaaagccatcattaaaacactgaccgataaatatccgctgcagccgatgcattaattaggaggaaccatgatagatttaaaatttttaagagaaaatccggatgttgtaaaagaaaacatcaaaaagaaatttcaggatcataagcttccacttgtggatgaggtaatagaactggatgcaaaggcccgggctgcgcagtccgaggcagatgagctgcgtgccagccgtaataaactttccaagcagattggtgccttaatgggacagggaaagaaagatgaagcagaagaagtcaaagcacaggtagctgcaaatgctgcccgtttgtctgagttagaggcacaggagaaggaactttccgagaaagtgacaaagatcatgatgacgattccaaatatcattgatccatccgtaccgattggaaaggatgacagctgcaacgtggagatcgaaaaattcggtgatccatatgttccggatttcgaaatcccatatcatacggatattatggagcgttttgacggaattgatctcgatgctgccggaaaggttgccggaaacggattttattacctgatgggggatatcgcaagaattcattcttcggtaatcgcttatgcaagggatttcatgatcaaccgcggatttacttactgtgttccgccatttatgatccgttccaacgttgtgaccggtgttatgagttttgacgagatggatgccatgatgtacaagatcgagggggaggatctctatctgatcggcacatccgaacattccatgatcggtaaattcattgataccatcaacgatgaggagaagcttccatatacactgaccagttattccccatgtttccgtaaggaaaagggagcacatggtattgaggagcgtggtgtttaccgtatccaccagttcgaaaagcaggagatgattgtggtatgtaagccggaagaatccaaagcatggtatgacaagctctggaagaatacggtagatctgttccgcagtctggatattccagttcgtaccctggagtgctgttccggtgatctggcagatctgaaagtgaaatcctgtgatgtcgaggcatggtctccgcgtcagaagaaatactttgaggtaggaagctgctccaatctgggagatgctcaggcaagacgtctgaagatccgcataaagggaaaagatggcaggaagtattttgcacataccttaaacaataccgttgttgctccgccacgtatgctgatcgcatttctggagaataatctgaacgaagacggaagcgtaaacattccgaaagcattacagccatatatgggaggaattgagaaaatcgttccaaaacatgaataggaggcagtcctatgggagatataaataagatggaagaagaatgtacccataattgcatgacctgtgggcatggctgtgcagaaggcagtgatggtgtgggaaaattcgaaaaagccctgaataaacttagtgatattgatgccggggagctgttgaaaggattacagtcgctgggagaatcagacaatcaataattgaaaacgataaaaaaagcaccgtatgaaattacctaaaaagtctttttgtacggtgcttttttgttgaaattgtacattttcgttgcttttcgtcagaaagagagcgataataaaagaaaaaaacaagaagaatcaatttgggtaggagagggtatgaaagaagtattaaaaagaggaatgctgaaatttgagaacagctttttttcccatgtcgtccgatgtgcattgggaatgataatcccacttgttttgacaggggggatttcctgtgctgtccgtgattttccggtcgccccgtaccagatgtttctgacgcaggggggtgggagatggttttatgatttccttacaatggtttatgagggaacatacggtattttttctgtagcattggtgattaccattgcgtacagttatgcaatggagaaaaatgaatcgctggaaaatgtcgttatgtatgtggttgtggcacttgccgcattcagcgcacagctgaatctgggaacagaagattttgatgtggcaggactgggaacgaccggatgttttgcggcaatgtttatcggttatttgtcctgcatggcattttcaaagctgcgcagatgccataaactgatgctggaacagtataccgcggggatggggggaggctgtgtcttggcaatccgtacactgattccactcggtattgttgcagccggttctggaggggtgaatctgcttattggcagaattaccggaatctatggatgttatcagtggtttaaccatattttctatgcagcatgtcagaatattgcagattacagtaatttcctttccggactgctctatacgttcgcggtaaatctgatgtggtttttcggtttgcatggaagccatattctggaggcagtggcagtccataattttggtgtcacaggaaatgttgttttttcaaaggcattttacgatgtgtatgtggcaatgggaggctgtggcacaacggtcagtgtcctgatcgcattgcttttgttcttccgcaaagaacgtaccggaaagctggcagggctggcatcatttacggtagtctttaatttaaatgaaatgcttacatttggtattccgatcatattaaatccgattctgctggttccgtttgtcctgacaccggtggtgtgctattgcctggcatatgcagcaacggtatgcggtttcctgccggttcttacccatgaagtagtatggtcgacaccggttggtatcggtggctatcttgccagcggttcctggaagggaattgccgtgcaggcagtgggaattctggcagggatattgttttaccttccgttcctgaaaataaatcagaggatggaggtatataaagccaagcgtcatgttcaggttctgatacacgaattacaggaaaaggaagaacagattgaccagccggtgtttttgacgcgcggagaccatatcggaatgatttcccgtatgctcctgcttgatttaaagcatgcgatcaagaataaagaactgtatatgctttatcagccacaggtatacagcgatggtatctgtattggtgctgaggcactgctgcgttggaaccatccagtatatggtatgatatatccaccacttattatttatcttgcagaggcgggaaaggtattgccggaactggaacggtttatcattgatgaggttacggatgggattgtgcagacgcgtgcacaatatgattcggattttaaaatttccgtaaacattaccgcgcactccctgttgtgggacattgagggatatatccggcagacaatggaacaaaaagagatagatgcccatatgctctggattgaaattacagaacaggatatccttctgcagacggatgtggttgtccggaaacttgaagaactcaaaaagcaggggcataagcttttgattgatgatttcggcatgggacatacttccctgctgtacctgcagtcagagtattttgatgtggtcaagctggacggttcactgacccgcccacttttaaaaagccatacgaatcagaaaattgtgcgttcgattattgaactgggacaggaacttggggtaaatgtaattgcagagtttgtggaaaacagggagcagagagatctactggatacgctgggctgtcattgctatcagggatacctgtatgcaaaaccactggaactggaggagtttattacttatatgaaacagatgaacgagaagtagcgggctgttttttcaaaaatctcctatgatatttacaaaaatttctcttgtttttttgaagctctggatatatgatgatgacagggaaattgttacagcacaaaagccatttcagaaaggatggacggaaaacatgagaaagaagtcacatatttcactggcacgttatattgtagcaaatacagaggacgaagggctgaaaaaacactggctgtcgttttatattggaagcgtcctgccggattgtaagccatcttttatctataaacggcatgagattaccggtacatttccaaaactcaggaaggatatagatgcattgatccatggaaaagagaaccgttttcccaaacggaaacggatgtattacatgaatctgggggagatcacgcattacgtagcagattattttacctttccgcacaataagatttatccgggaggatttaaagaacactgtgcttatgaagaacagctcaaacatgaactccgcgcctttttaaagacggaggcaccgaaggtgttgaatgaatgcgggcatcggcagtttgccagccaggaggcactgtttgattatattcagaaaatgcatgataagtatttaagcagtaagattgatactgcaaaagacattgagaatattgtgctggtcaacaaacaggtggtggatggcatcgattatctgtttttaaagaatcatatgcagcacagggttgcatagagggaaagcagccggaaatccggctgtttttctacgtttacggacacttataggattgacaaatttttgacaaagtgttacgattattccatatgaaactgtcgatgattcgtgacaatcaggtacatatactgttacgaaagacatttaggattaggaggatttatacaatgagtgagttcaagaatttaactctggaagtagctgacggaatcgctgtattagcaatctccagaccagcagcattaaatgcattaaacagtgagactctggatgagttaaacgtatgcttaagcgagattgaagcaaacgatgatatcaaagcagtcatcttaaccggcggtccggataagaagggcaacgagttcaagtcattcgtagctggtgcagatattgctgagatggtaaacttcacagctccggaagcacgtgcattcggaatcaaggcttctgagccattcttcaaactgatgaatatgcgtcaggttactatcgctgcagtaaatggatttgcattaggcggaggatgtgagatctctatggcatgtgatatccgtatcgcaagtgagaatgcaatcttcggacagccagagtgtggtcttggaatcattcctggattcggtggtacacaaagacttgcccgtctggtaggcatgggacgtgcaaaagaaatgatcttcacctgcgacaacgtagatgcaaacgaagcataccgcatcggtcttgtaaataaggtagttgcaaaagaagagcttatgccaacagcaaaagctatggctgcaaagatcatctccaagggaagctatgccgtatctgttgcaaaggctgcaatcaataatggctatgacatggacatcaagaatgccgttgagatggaagcaaacctgtttggtgttgtcaatgatacacacgacaagaaagagggaatgggtgctttcttagagaagagagctgctacattaacagatttctaaaatcatacagagggcgataaggggcgatatgagaaatcatatcgtccttttttgccatatttcaggatagggaaaatggaattatattagacaatctggtgaaattaggttattataaataataagggagttaccctaaaacaggagtgttatagaaattattattaaatggaggtttaacgtcttcatggataaactatatatgatcttattatgcctgatgatagtaccaattcttatttgtatcaaatattccagaaaaataaaaagtgatgtggcatcttccattgtgaaatgcctcatttttgcaattgttactatccttagcaatggtttgtctgctttttcaggaaatgaaacattttcttatataatggaagcactttatcggttttcctttgatctgatgctgatatatgtattgcagtattcccagcagtatacgcgtgtttttcacgaggtttcaccgtttaaaaaggggtgtttcataattgcatatctggatggaattttactgtttttaaatataatttttcataacgtatttacgatagaaaccgtgcgattcccgaattttgatatgtatcatgtagccgacaaatccattattttttactttcactatgtgtttgcatatggtctggtattttgtattattgcatcgtttataatcaaaattatacagataccggatttttaccgtaagaaatatttgccgatacttgtgttaatgtgtgtgatcacggtttcaaaatttatatgtggaattttagaatttccgattgatgtgtcacttcctttttttgtatgcgcagcaatactgatctgttacctgacactgtaccgttctccgcgtgaacttgtagataaaacactgtccatcgttgtaaatgaaatgaataacgctgtgatatgttttgatataaataacgaatgtgtgtatgccaatgagcgtgcattgaaaatatttaacagttcactggattccctttccgggatctcggaggatgtacagggctggataaaagaacatgacaccaacaattcggcctcccttgaatggagtggtcaaaccattattgacaacaaaacgtattatttcgatatcgaatacagaaaactgtttgataaaaagaatgaatatataggttttttcctgaatctgattgataatacggagaaacatattgcgtttgagaaagaaaaataccttgcaacacatgatacgcttaccggattgtataataagaattattttgccaaaaaaacatcggaaattttaaatgagaatccggataaagagtggctgctgatctgttccaatatcaaggattttaaactggtcaatgatctctttggtcttgaaaaaggaaacgaagtccttaaaatggaggcagatcttcttaaagcacaatgtggggaagggagtgtctatggacgcaccggtggtgacaaatttgcaatatgcatcccaaaagaagaatttaaagagcaggattttatggatgcgatacagaccatggggcatgcatttaacaatgacctgtatcatcttcatatttatgtcggtgtttatgaaatcacagaccggaatgaagaagtatccattatgtgtgataaagccaatcttgcaataaagacactgggggaaaactatgataaatcaattgcatactatagcgacacgatatttcatgataccgttgccgaaaagcagctggtgggtgattttgataaagcacttgccgaaaaacagttctgcatgtatttacagccacaggtgacatcggaaggaaaattactgggggcagaggctcttgtacgatggcagcatccgaaacgtggtctgatttttccgggggattttatagaagtttttgaaaaaactggactgatttaccagcttgaccggtttgtgtgggaacttgccgtacaaaaacttgcacaatggcagaaagccgggcgggacgatctgtatatatccgtaaatatttcgaccaaggatttttactatatggatgtatatgaaacaattaccagtcttgttgaaacctataaaatcattccttctacactgaaactggaaattacggaaactgcaattatgaccggaaccgcaggagaacttgaaatgattgaacggttcaggaaatccggctttcaggtggaaatagatgatttcggaagcggctattcttcgtttaatacgctaaaggatatggacgtggatgtgctgaaaatagatatgggctttttaaggacaacccggccggaacgcttagagagaagtatgtccattataaatacgatcatttcactcaccaaaacacttggtctttccgttatcacggagggagtcgaaacaaaggaacaaattgatgagcttacccggatgggatgcggaatttatcaggggtattatttttcaaagccgattccggtaggtcagtttgaagatacctatctgtaaatttatccggaataaaggtattgccaacatattcagtcaaatgggacttgtggaggcatggggaagcggagctatctggatgtgtccggggattaccggtaatagttgtcattgcctcaaaagtttatttcaatcctgatttataatatgcagcttgtggcaaaagagcacggctgtctggattcttccggtgggaatacaaccggaaggtttgagaatccgtttgttacaataccgtctgcataccagacacttgattcttttatgagagtgaatgggctggttcacaccgaaagtggagtgattccatgctatgagacgaatggggaaagcatggacatctatattgtgtgtgagtaaaacggtatggggtatcgggactcggcaatataattgtttttttaagcgtaatccgttatactagatgcatagtatagcggattattttttggaggtacttatgggaagatttttgaatccagataatggggctttttcagaggcagtcaattcagaaatttatattgataaaacccgtttgctggaatacaccaaccgggtgataaataccacatcaaaatttatctgtaacagccgtccgagacgttttggaaagtccatgactgcagacatgctttccgcttattacagcaggggctgtgattccaaagagctctttaaaaattatgagataagtacagtttcatcatatgaaaagaatcttaataagtatgatgtgattcattttgatgtacagtggtgcatgatggatgccaaagatacagatcatgttgtagattatatcaatgagggaattttacaggaactgagggaagcatacggacagatcattccggattcggtcaggactgcttatggggcaatgtcatatatcaaagcggctaccggcaataaatttgttgtcatcattgatgagtgggatgttttgattcgtgatgaggcacaaaatcatacattgcaggaggcatatattgattttctcagaggaatgttcaaaggcacagaaccttccagatacattgcgttagcatatttgacgggaattttaccgattaagaaattaaaaacccagtcagcacttaataattttgaagaatttaccatgctcgatgcaggacggatggctccttacgtcgggtttacagaagaagaagtccacggactgtgtgaacaatatggatgcagttatgaacaggtgaaatcctggtatgatggttatttattagaggattatcaggtatataatccgaaggctgttgtcagtgtcatgttaaatggaaagtataaaagttattggtcaaataccggaagttatgaggcgattgtgccactgatcaacatggattttgatggcttgaaatctgcaattatcgagatgctgtcaggtgcatccgtagaagtggatgtgacatcctttcagaatgacacggtaagttttgcaaatcgggatgatgtgcttacgtatctgattcatttgggatatctggcttatgatcaggacagccggcatgtttttattccgaatgaagaaatccggcacgagttaaatcatgcagtgaaacgtaccaggtggaatgagatgatgacatttcaaaaagaatcgttagcgttattagatgcaacgctggaaaaagatggaatggaggttgcaaaggggattgagaaaattcataccgggtattcttcaacgattatgtaccatgatgaaaattcgctcagcagtgtacttacgatcgcatacttaagttccatgcagtattattttaaacccgcccgggaattgccgaccgaccgtggttttgcggattttgtttatattccaaaaccggaatataaagctgattatccggcactggttgtggaactgaaatggaataaaactgcggataccgccttacaacagataaaagacagaaagtatccgcaatcgttagagccatatacaggaaatattctgctcgtaggaatcaattatgataagaagacgaaagaacattcctgtgtgattgaaaatgataaaaagcaataagcgttaagctccgtctttttgcagaattgaaacaaatcccgcaacaaaactaaacagaacaggaagaaaccaatggaagaaaaaatcatgcatcttctgatcacggaagacgatatggcactcgcacagggactgcagcgcgcattacaggagaaaaaccgacaggtgctatgctgtaaaaacatacaggagaccagacagcatctgcaccagaaccagacagatctgctgattctcgatgtgaatctgccggacggaagcggttttgatctgctgcaggagattcgcagaacctcggatcttccggtgatcttacttacggcaaacgatctggaaatggatattgtaagcggactggagcagggagcaaatgattacatcacaaagccgttcagtctggcggtactccgggcgcgggtaaacacccagcttcggaaccggacggtgcagatgcagaaagaaagcacacaaaacacacagatctgggagggcagtatctggaagtttgattttacaaatatgcgttttaccgtaagcggacaggaagtggagttaagtaaaaccgagcagaaacttctggcgcttcttgtgcagcatgtggggatgaccgtgccgcgggaaactttgatggatcgcatctggaccgatggcgcggtgtacgtggatgaaaacgcgctttcggttgccatcaagcggctgcgggataaattacaggcaaaggagcagatccggaccgtgtatgggatcggatatgtatgggaagtatgatcggatattttgtaattatattgcttgcggcagggagtgtgcttgcagcagcacttttcttcagacaccggcagaaacaggtaatggatggactttccgatatgcttgaggcggcgataaacggcaccttttccgagaccacatttgatgagtcgcggcagtcatcgctggaaaaccgtctggcgcagtatctggcggcatcggaactttcggtgcgaagcatagacgtggagaggaaaaaaatcaaggaactgattgcagatatttcccatcagacgcgaacgccgctttcaaatattttattgtatacggaactgctggaggaagaaccgctgggggaagcagcacaggattccgtaaaaaagctgcggcagcagagtgaaaaattacagtttttaatggatgcgcttgtcaaactttcaaggcttgagacaggcgtttttgtgttgcatccaaaccgacagccgctgacagaactggtcgtagacggtatggaaagttaccgggaaaaagcagccgccaaaggacttgcgattgcgttttccgggacgaaaaaagcagaggaagacgcaccggtttatgcgtactttgataagaaatggtccatggaagcactgggaaatattctcgataatgcgatcaaatatacgaacacaggagggattaccataaaactctgttcctatgaactgtttgcctgcgtggaagtgacggatacgggaatcggcatcggtgaggaggagcatgcggcggtatttgggcgtttttacaggggaaacgcggttgccgaaaagagcggtgtggggatcggactgtatctggcacgttctatcatgcagcagcagggcggatatatccggctttcgtccacgccgggggaaggctcaacgtttgggctgtattttccaacggcaattgtgtcaaaactgtaagaatcttttgtctccgggacagattctcgaaagaattctgtgcgacaatcttaaaagaaggcaggaaatgccaaatcaggagcaaaaggagattacaggatggtcattttggaaaccagagatttgaaaaaacagtatggcacgggggaaacagccgtgcacgcgctggcgggggtaaacctgtcggtggaaaacggagaatttgtcgcggtggtaggaacctccggatcgggaaaatcgacgcttttacatatgcttggaggactcgaccgggcaacatccggcaaagtctatgtggacggcaaggacatctttgcattaaaggatgaagaactgacgattttccgcagaagaaaaatcggatttgtctttcagtcctttaatttagttccggtgctgtctgtctatgaaaacattgtgctgccattgcagcttgacggaaaaaccgtggacaatgcatttatcggggagatcgcagaggcactcggattaaaagaaaaattaaacgtgctgccaaaccagctttcgggaggacagcagcagcgtgtggcgatcgcgcgggcactcgcagccaaaccggcgattctattagcagatgaaccgaccggaaatctcgacagctgtacctcacaggatgtgatggggctgctcaaaacgaccagcaccaaattttcgcagaccattgtgatgatcacacacaacgaggagattgcacagcttgcagaccggatcatccgtatcgaggatggacggattgtgacagggaaagcaggtgaggcattatgatacaggtaaaaaaccgtgcctgtgtgcgcaccattgccgtgcgcagtctgcgggcttccaaaatgagaaacctgattgccgtgattgcaattatgctgaccacgatgctgtttaccgcgctgtttacgattgcaatttccatcaacgattcgttccagcagtccaactttcttatggccggaggcgatgcgcacgggtcttttaagaaactgacggaagaacagatggaaaccttaaaaaaagatccgctcattcgggagacaggtgcgcggttgtttttaggaatgggaaccggggatgcatttcgcaagacacaggtggaagttagctatatggatgcgcatgaagtaaaacattatttttgcacaccaacgcacggacatcgtccaaaagagggaagcaatgaagcgatgacagatacccgggtgttaaaactgttaggagtacagccaaaaatcggcaccaaatttaccgtgacgtatcagatcggaggaggtcagtcagaaccgaaaacggtgacgcaggagtttgttctctccggctggtgggattacaacggagtttcccaggcaagcaatgtgatcgtgccagaaagttatgtgaaaaagacattgcagcatgtgaatatcggggaggatgaagagagtggaaaatggtcacttgacgttatgtttgggaatgcacttcatatcgaaaaagatatgcggcaggtgatcagagactgtggatttcagtcagaagatgcttccaaaccgggctatattgcatttggtgtaaactggggctataccggtgcgcagtcgagcagcaatctgaatccggaaagcattgcagccattgtggcattgcttgtgcttattgtatttaccggatacctggtcatttacaatgtgtttcagatttccgttgccaacgatatccgtttctacggactgttaaaaacgatcggcatgaccgggcggcagctcaagcggatcatccggctgcaggcagtccttttatcaggcattggaatcccggcgggacttcttctgggatttggaatcggcgtgggactgacaccggctgtcatggcacagacgagttacacgacagcggttataaaattgcatgcgtgggtatttgtgggagcagcacttttttcactggtcaccgtatttttatcctgcaataagccggggcggatcgctgcaaaggtatccccggtcgaagcggtgcgctatacggaggcagactgtggccgaaaaaaagcaaaagcggcaaaaaagccggcgtctttggggcgtatggcatgggcaaatgtgggacgaaaccggaagaaaacggttcttgttgtcatttccctctcccttgcggttgttcttttaaatctgaccgttatgtttgcaaacggatttgatatggatctgtatttgaaacacttctgtgtgagcgattttgtgtttgccaatgcggattattttaacgtgcagaaaggcttccattcttccgatgaagcggtggaagattctgcaatgcagaccgtgctcgcgcaaaatggggttaaagagagtggatgtgtctacggacagacaacccgggttttggaaaaaataaagaaaaaagatatgctggcgtattttacatccatgggacataccatgacaaaagagcaggaaaagggttatttcaattggaaggaacaggcagatgatggcagttattatgacgatattcagttgtatggaatggatgcattcccgcttcagaaagtaaaggtgctcaaaggcgatgtcacagctctggatcaggagaatgccattgcggcagtctataagcaggatgattatgacaaaaaagttgatcacagtaactgggtcggggtgggcgatcaggtgacactcaggtatgtaaacagttggaaatattttaatgcagagactggaaaagagatcccggaggaagagattgacagctacgaaggtgcatgtgacgtggaagcagatgattatacacaaaaaacctatacggtggtggcggagattctggtgccttccgcgatgagctgccggtattatggatcgccgcagtttgtgcttggaagcgatacgtttatcaaagataccgggacaaaagatgtcatgcatatgatgtttgatatgaaaaacaatcagagtgcaagagcaatggaaagttttttgaaaaattatacggaacaggtcgagccgctgtacagctatgaatcgaaattttcctacgaaaaagagtttgattcgttccgtgggatgtttctgctgcttggaggtgttctctccggtgtgatcgccgtggtcggaacattaaatttcctgaatgccatcctcacggggatgattgcaagacgcagggagtttgctgtgctgcagtcggttggcatgaccagacgccagttgaagcggctgcttgtgtatgagggactgttgtatacgtttgcggcgattgtcatttcgcttattcttgttgtggcatctgagccgtttatgggaaagatgattgaaaaaatgttctggtttttccggtttcagtataccatcggtccggtcgtgcttgcggcactgatctttaccgtgatcggcgcgggggttccgcttgtggtctatcgtgtggttggaaagcagacgatcgtggagcggctgagggagacggagtaaaaaagaataacaaaacatttccgaataaagcctgaatccatgtggcataagaagcaattcattcggttactttgcttttcaggacagatgtgatatctgccgaaagcgttgctgaatgttccacaaacagagcaataaaaataaatatttctttaattttgaaaccatactatttacataaatgaaaccgtaaggtaatcttaaaaaatatgtaaaatatgcggatcataagaaagaggtttatggatgaggaagaaacggatcacagttataattggcaggatgttttgtggcggagcgtttaatctatggaacaggcagaataaaaccaaaacggcaatgaaattatcagctgttgttatgctcctgtgcctgatgctgggggcatgtgcacagaaacagaagataccggctgcaacttatatgggaggaaaccataccattacagaaatttgcaaagaactggataccgcaggagcttcccatgtagatacattccgggaatgggtaactgattttgcggattcggccgggaagaatgcaaagcttgaggatgtctggtctgatccggaaaacatgaaagcagatatcggcaaatgtatggatggctgggaacagaatcatgattactccgacacggactgtagaatgacagcctttctcttactggatggcctgcttcacgcagaatcaacggaagacaattatgaaggtacttatctaatgtttgatacagaagcaatagataatgtggaaaggtatgaaaccataaaagagaaccgggatatgtttaccacactctatggagaaaagagtgttgcggataaaaaacatccggaaacagcattttcggatagttggaaacattatggatttcaaatagacagtgacaggatatcgctccttagtatcgtgatatatgacccgtattcggatgttactttcgtgggtcatacaggtatcctgataaaggacagggacgattacttatttgtagaaaagattgcatttgaacaaccatatcaggcaacaaaggtgaagacggtggatgaattgctcaatattctgtcattgagaccggaatatttcggagaagagggagaagccggaccgtttgtttataataatggggaatatattggaacattaaaggcgaaggcatattagaaaaaacaattgacataccggaaatatttctttataatcgttctaaaaagaacgataaggaggaaagagaagatgtacttctgggataagcataaaacaattacaagttattatgaattgctttccggagaggtatgtgaccggtatggattgacacagatggaatacgatatactaatgttccttcataataatccgcaccacaataccgcagcagaaatagtaaaggttagaaaatcaacgaaatcccatgtttccacttcgttgaaaaaattggaaaataaaggactggttgaaagaatacaaagtaaggataataaaaagcatatagagattattctgctggatcgggcagaacttatagtggcggcaggaattaacgcacagaaacagtttgcaggaaatgttttaagcggattgacagaagaagaaaagcacatgtgtatccagatatttgaccggatctgcaataatgcggaagaacatttaagggaatacaaggagaaaacgaatgaaaacgaatccttggaaatgaagagtaccgggaatcatttgttttacagtcaattgatggaaaaggagcaggattaaaaggatggaagagaacaattacaaaccacagattccggatgtgatggaagcaatctttgatgctgcgtatctgattttcgatttagttgccgcaattttattttttacattttcaaagggaaatatcttatttgtactttatggaatattaacattgacactttgcggaggggatgcttttcatctggtgccaagaattataagggcagtgcgtggaagcgatgagaagataaagaggcagctgggaattggattgcaggtatcgtctgttacaatgacggtgttttatattattttaatgtatgtctggaaatttacatttccggaaatgataataccgacaatagtggaagcggtcgtgtggatatcagcggttgtcagaattgtgatatgcatgtttccacagaacaattggtgtacagatgaaggaaatatgaaattatcaattgccagaaatggtgtctttgcggtgacggggatcggagtgattattctgtatatcatttccgggaatgcaaatgggtatggtatgacaagaatggttgcggcgatcattctttcttttggctgttatctgccggttactttattcagtaaaacgaaaccaaaggtgggattattaatgattccaaaaacctgtgcatatatgtggatgattgcaatgggactacaactgttattttaaaaacaaaaaaattatagaggcagggtattataatgaaaatggaaaaatttgtaaagcttatgacgggacattttgataacagagaacaatttacagaaatgaaatctgcaggaaaattatttccgtatgcccgacatgtgaatacagtctgtaatgataagataaataatattccggaaaattttaccggaatatttattgtagaagaaagttattatgagacggatggaaaatgccatgcatcaccgcatttatttcttgttacggattgtgacggtggaattatgctttcttcctacgaaattccggcaggagaagacaaaaatacgttttcttatgcttccatgaagaacgtagaatatagtgacctgaaaagatctgagaagtttaccccggcattgtatcaggaaaaggatggtgtctgggaagggggaagtgtgagtcagtttacccctgtgatgacattccggttatgggagagattctcggagacatgtctggaggtgtcggaaagtatggaagtgaatggaaagaaaactttcggatatgatgtgccggttatttataaaagggaacgaggtgcctgacaccagttccgtgggaagcatagatgctgaaacggtagcgcttgcacgatcaattaaataagcactagataaaagagtcatccatctggatggctcttttattgatcctgatatctgcgcggatttcgacaaacagctcttatggtaaatttaaagaaattaaaaatttttatatcgcatggttttctttttctgcttgacaaataccatttgattgttcctatacttttttgaaaattctggtatttctttaggtatgaaaaagttcatagaaaattcagttgattccgtaaagttcctcgcttataatgatattgaggcagagagccttttgcggaatcttagaagtgttatgcacaatacaaaaggagggatgccgacttgaatacagaaatagcaaatgctgtgaatgcagcaggagataaggcacaatatgatactcgtgttaaaaggttactggcacagaagattatattagcacatattctggtgaaaacagtcgatgaatttaaaggaatgaagccggaagatgttgtgaaatacatcgaaggcgaaccgagtattagcgttgttccggttgagccgggattagcaaatatggaaaaaacagatgctgcaggacagcgtatcgtaggtcttaatacggaaaatgctgaaattaatgaaggattagtcagatttgatattattttttatgtccgcatgccatccgtagatgacacaaaaaatggactttcgcagattattgtgaatattgaggctcagaaggatgagccgacggaatataaaattttaaatcgggcaatcttttatgtgagtaggctgatttcgtcacaaaaggaaagagattttgtaaatactaactacgacgacattaagcaggtattcagcatatggatatgtatgaacatggatgataacagcttaagccacatccatttgacaaaagatgagatgttaaaaccatgtaactggaaaggtaatctcgatctgttaaatattgtgttaataggaatcacaaatgagattccggaacatgatgaaaaatatgaaatgcaccgcctgattgggactttgctttcaggcgaattgaaagaacaggaaaaattggatattatagaacatgaatataatattccaatcagtcaagaatttagagaggatgtgagaattatgtgtaatctgagtacaggaattgaagaaagagctactgaaagagctactgaaaaaacaagcgaaaagtttattctgaatatgtataaaaagggttatacattggatcagatcgcagatgtagctgaaataggtgttgatgaagttgaagcgattattaagaagaaagagcctgcaatggcgtaagctttattaaccaaaaagatctaaaaataagacggcaagtcgtcaacaagttgttgatgatttgccgtctttgttttgtatattggagctattcttcttttttcttagcccttgtcttatagacattatactgattcttgcatttcggagagcagaactcatttcccttacggcttgcgataaatgccctgccacagtgcttacacagcttcatatcgcagtcagaatccgtaagcataaaagaaaagcacatctggatcatgacgagcagggaatggaagttccatacgataacaggggcattttccgctaatgcgatatggtaagtcggggatatgccgccaaatgcagacataccctgacgatacaggttttttgtctgttcatccagactgtcatagtccatatagtataagaaacttgtggtaaaggtaaatgcccagtcggaaaattctttcaccagccagtcatagcgttctgcatattccttctgaaaactcatcgtaacagcctgtggattctttcccgttgcaagtgcgattgcaatgccattccgcattggtggtgatgaatttgttgtatttgccggcatgacacaaaaacaggttgagtcaaccctgctcgaattaaagcatacaacagagaagtagtctgggacaaaggttgacagagtgagtatctctgttggatatgctcttacggaagaccataaagaattttctattgaggagcttgtgtatcattaagacaacagggaaacaaattccacacgctgatccatccagttcccgataattgcaattccttttcccatggtaaaagctgcaacaatggttccgatgccaagtcccatgatatgtccgagacagaagaacgtcatacatgcggtaataaccagacaggttacatcaaaaccgattttgatgcgggcatagggaacctttgtgatgtctgcggcttcccgcggaaacagatcggttgggatgatcggcagtttgcagcggtttgacagcgcaattccaaaacagatgataagataactcaatacaaagtagaggatgcgaagtggtatattcagcggcagccgcgtaatccacagttcatgcagatccatcatctctccaaacgcaaaccctacaacaaaactaaataaataggatgggacaaatttttttcgcataatcattagaatgcagatcaaaagtccctgaaacaggtaagtccaggtgccgagtgtcagtttcgggaaaacctgttgaaacgcatacggcacgcttgaaatggcggagattccggagccggactgaagcatcagaaggacaccgaggctgttaatgataacggcaaggacaagtgctgcctcaccacgtaagatttttttctgttgtttcatgataatagtgctcttttccgatagattttgtgtgcattgcacacggttgcgattatagtccttttttcacagattttcaagtgtgggttatgtaatggatgcatttccagtgcagaaggtaaccgattgtggagagattgtgtgaaacagaataaattctgataaaatttcttgcaaagtaggtttccttgtggtatatggtattaaaacggttaaactatggaaacagaaacgaagaaaagagggcaatcacaatgtgtacagcagcaacatacaagacaacagatttttatttcggacgtacattagattatgaattttcttatggagatgaagtggcagtcctgccacggaattatgcgcttaccttccggcatatgggtgtattaaaagcgcattatgcgatcatcggtatggcatatgtagtgggcgattatccactgtattatgatggaatcaatgaaaaaggactgggtatggcagggcttaattttgtcggcaatgccgtgtatcagaaaattgaagaagggcgggaaaacatcgcacagtttgaatttatcccatggattttagcacagtgcgcttcggtttgtgaagcaagagaaaagctggagaagatgaatctggtaggaacacagttcagtgagcagcttccggcggcacaattacactggatgattgcggatgaaaaggaatgtattgtagtagaatgtatggcggatggattgcatatatatgacaatccggcgggagttttgacgaacaatccgccatttccgcaacagatgtttttgttgaatcagtatatgcatctgtcaccgaagcaaccggtcaatgcgttttccaagcagcttcctctggagcagtacagccgcggcatgggagcactgggcttgccgggagatttgtcttctgcttcacggtttgcccgtgtggcattcacccggctgcatgcgatgtcgggtgaatccgaaaaagagagtatcagtcagttttttcgtattttaggttcggtggatcagcagcgtggctgctgtgaggtggcagatggcaaatatgagattacgttgtatacttcctgctgtaatgcaacaaagggtatttattactatacgacatatgaaaatcatcagattactgctgtggatatgcatcgggagaatctcgacggggaaacgctggtgcattacccaattgtgacaggagaacatattttgtggcagaattaaaagggtgacatacacgaggagatggaaagggaagtttgaaatgaaatatattccgttaatcataatattacttctgattctggcaattttggttttgattttttacggagtgtaccgtgtgaaacgtttatccagacaattgtttggcacagatgatattttgcagggcgtaaaaaaagcgcaggaagatctgtcaacaacaccgcgttcggtatcggcaatgacaagaattgccctgccgcagatcgtttccgattttccggattttgagtacaatgaaatgaagcagcgtgcagaaaatgccctgatgcagtatttcgaggcagtaacggcacaggatgtaacaattttacaggaaggaaatgaagatttgaaagaacagcttcgttcgcagattcgcgcattggtctcacagggaaaatgggaacattttacgcaggtaaagattcatcagacggagatcgcccggtatcggaaagaagctggccgttgcatcgtgacattccagtcggcggtggaaagttttcattatgtgacagatgcagcacatgccgtggtgcggggatcggatcatatcttagagcagagccgctataatgttgatctggtttatattcaaaatcgtgaccttgccaaaggaaataccgatggagcgcttggagtcacatgtccgaattgtggagcaccgatcacgaatctcggagctaaattctgtgagtattgtggcgccggtgttatggagttaaatgtacacgcatggtcttttgaaaatattgaggaagcataactgttttgtatttatttgcaagcataggtgaaattgtttttagtctgcttgcgtttgctgtgatattgtgttaaagtacatattgttctgaatatgagaaccagagagtgatgacagaagtcacacgaaggggtacaccaccgcgggtgtagctttctttgtgtggctttttttgttgcaataataagtgattgcgaaactttttccagatccttccgtaatcgcctaaataatttcaaaataaaaaggaggtcttacatggtacatatcaatggaaaagacatagatgtggcagggcagtccctgatggattttttaaatgcaaatgattatgagatgggtacgtttgttgtggaatgcaatgaagagattattcataaagaggattataaaacatatatcctcagggatggtgatgttatagaagttgtccagtttatggggggtggctgcggtacatctctgatgtatcgctccataatgtagcgttggttcatttgcgaagcaaatttttcaaatcataggaaattccttcctatgattcaaaaacgctccgcggggatgcgcagctcgcggagttgaaggttatgttgaacataccgctcgcgcgcgaaagtgtgcggtcaagcgcacactttatttaaagaaaaataccagagagaatacaagaaagaaggaagaaaaaatgaagaatgacacatttacattaggagggaaagaattctcctcgcgttttattttaggatcaggaaaatattccatggagctgatcaaggctgccgttgaaaacgccggagcacagattattacattagcagtgcgccgcaccaacacaaagaaaaaagaaaacattctggactttatcccggataacgtaacattgcttccaaacacttcaggtgcaagagatgcaaaagaagcagtccgcattgcgcgcatggcaagagaacttggatgcggagatttcgtaaaggttgagattatgaaagacagtaaatatctgctgccggataatgtggagaccgtaaaggcaaccgaaatgctggcaaaagaaggatttgtggtgcttccatacatgtatccggatctgtataccgcacgtgatctggtcaatgccggagccgcagctgttatgccattggcgtctccgatcggttctaataaaggtctggcaacgaaagaatttatccagattctgattgatgagattgatctgccggtaattgtggatgccggaatcggaagaccttcccaggcatgcgaggcaatggagatgggagctgccgcagttatggcaaataccgcaattgcaacagccggggatgtcccggccatggcgggtgcattcaaggcagccattgaagctggaagaagtgcatatctgtcgggactgggtcgtgtacttgagcgtggcgcttccgcaagtgatccactgaccggatttttaagagactagggggcgaaatcatggctgaaaatcaattttttatcgactccgataagttaagcgaagctgcattggagcgcaaacataaactggaaaccgatccgtcgagcagaacgaaccatatggaatatatgccggggatggaacagatcgatccaaccataagaaataaagtcctttccgagatggacagttacgattacaacaaatatacggcaagagatgtgcagaatgcattagagcatgaaaactgtagcgttgaggattttaaagcattgctttcgccagccgcagagccgtttttggagcgcatggcacagcgtgcaaagatcgagacaggcaagcatttcggaaatacggtgtatctgttcacaccgctttacattgcaaactactgcgagaattactgtgtgtactgcggatttaactgctacaacgacattcatcgtaagaaactgacttttgaggaaatcgagcatgagatgaaagtcattgcagactccggcattgaggaaatcctgatgctgactggcgagagccgtgcgcagagtgatgtcgagtatatcggggaagcctgcaggctggcaaagaaatatttccgcaatatcggtctggaaatttatccggtcaacagtgatgaataccggtatctgcacgaatgcggcgctgattacgtgacggtattccaggaaacctatgacaatgtcaaatacgaaaccctgcatctgatggggcataagcgtgtattcccataccgttttgaggcacaggagcgtgcgctgatgggaggcatgcgcggtgttggattttccgcattgcttggactttctgatttccacaaagatgcgctggcttcggcactgcacatttattatctgcagcgtaagtatccgtatgcggagtattccctgtcctgtccgcgtctgcgcccgatcatcaacaacgacaagatcaatccgcttgacgtgcacgaaaagcagttgtgccagattctgtgtgcgtaccgtattttcctgccgtatgtcggtatcaccgtttcttcccgcgagcagaaacatttccgtgacggcatcgtaaagattgcagcgacaaaggtatctgcgggagtgtctaccggaatcggagatcatgagagcaagtataccggaaaggataccggagaatccggagatgagcagtttgaaatctccgatggaagaagctttgaccagatgtataacgatatggaaagcgaaggtctgcagccggtattaaatgactatgtctatgtatagaaaaatctgcgtgaccaaccgtgcgctggcagaacgtccttttttagaacagttagcgtgtgtgcttgccacaaaaccgtatgcgatgatcctgcgggaaaaagacctcacggaagagggatacgaagaacttgcgggaaaagtaaaaaaattgtgtgaaaacacggacaccaggctgattctgcacagtttcccggatgctgcaatgcatctggggtgtacggccattcatatgccgctgcatcggtttacaaagatgccggaagaacaaaagcaaaaatttctggtgcgcggtgtctccgtacattcggtggaggatgcgcgcctggcagaacaatgcggggcaacctatctgacagcagggcatgtgtttgtgactgattgtaaaaaaggactggcaccgagaggacttgattttttgcatgaggtgtgcagctctgtgaaaattccggtatacgcaattggaggaatcaacgacaaaaatgcagcatcctgtatccgggagggagcagcaggtgtgtgtgtcatgtccgggtatatgaggatgcgttaaaagaatacaggttctctgtttcggacaagtggaattcggaatacggtagtgtcaaaccagacctgttccccaattacatctacaggcatataatcctgtccggttacaattttaaacatgtcttccgatgataatctgcacagtgagcgaaaaggtgcggttatgtcgatctaacaaatttacatccagttttttaatctgctgtgaaacagcagattgtgaaacatggaattgttccgctgcttcgtagaaattcccatttgcaatcatattttcaaagattgaatctgttctatactttcttattgtaaaaatatatattattttatgttgaattttagaaaagaaaagacaataataaaaaagagattgtgtgtaagtggttaattcgatatatgaggtgtagaaccgtgatttataatgattttgtcaaataaatatagtaatgataggaaagacaactttctgaacaaaatgatggaggtatggattgtgaataagaaaaaaataaccatattggcatgtactctttttatggtgatgagtctgggagcttgtggaaaagcaaaagaagatgagttcaccgtaacacagcaggaaagcgagtctgtagattcagaaataaacaatgatgaaaacacagagagtgaggattcacaaataaacaatgatgaaaatacagagagtaaggattctgggataaaaaaagaggaagacacagatacagagaattcatccataaaacagccgcaaagcagtatgcagaaggttgaaggtacagaagagaaattgacatcagaccaactgttggatttatttgtcaatggatcaatagatgcagttgattccaaagatatgacgtcaaagtatagtatcgctgattttcatattggttctggagaaaagaattcatattcgattggagagaaaatggatcttgacaatgatggagaaaatgagctgataattagaggtacttatggtggggtatactttgatgctcgtgacaataaggtgtatgcctttgccaggggagatggtgatgcaaatatactttcatatacttattacaatggagaaatttggattttgtacagtaatagtgtgaatgagggggctgaaagttatcatatggaaaaatacgagggagctgacaagttagttgcgaaaatgaattttagtgaaaaatttgctgatgcaaataatccgaaggctggaaagaaatatgtattgaatggaaaagaaatttccagtgatgaatatgccgcatttgccagtaaaatctttgcggctgaagaaagtacagactgaaaatctgattttgggtattcattttttattactaaaaaagtgtaaaattttcgatgaaaaaaccatcgtaacgtgttatactggcagaagcatgaggatatatgtcagaaaacatgaaagaagaggttaccagtcaataaaaatgagtaacatactggaaaaacagtttttaaaacaaagaaatgattttgaaaaatcctgtgtggagagagataaaaaataccactttccgcaaggcgtgatttttgaaacagatatcgcatatgcaaaggataaaaacaaagcgcaccgtctggacagatatcgtccaaaagggaaagaagcgcagatacttccggtgattatcaatgtccatgggggagggctgcttctcggaaataaggaatttaacaagtatttttgtgcgctgctcagtaagaagggatttctggtgtacagcatggagtaccggctcatcccggactgtacattttttgatcagctgcgtgacatctttcttgcaatggattttgtaagggaacatgctgcagcagacggaggagatctgtcgcatgtctatcttgtcggggacagtggcggggcctgtctggccacttatgcaaatgcaatacagaacagcaaaaaaattgcaaaggcagcgggcataaaaccgtctgagcttaaggtgcatgcacttggtctcatcagcgggatgttttatacgacaaagtttgataagatcggtctgtttcttccgaaatatctgtatggaaaacagtacaaaaaagcaccatttgcggcttatgtaaatccggaaaatccggagctgctttatgcgcttgcaccggcatggctggtgacaagccacaacgattacctgagaaattacacgatccgttttgaaaaggctctgacggcagcaaagatggaacatgaaattgtggattttccgcgaaataaaaaactgacacacgcattttctgtgtttgagccatat

SEQ ID NO: 984 - DNA, 58879 bp, Unknown
  gut microbiota DNA sequence
ggtcagatggattccatcggaacgatattaaaactgattgaaagtgtttctaaataattcacacgccaaaacaaaaaaacatgcatatctgctgtacgtttttccagcgatatgcatgtttttgtatatagagatacagattttttacatcttcatcttatcacagatttctttcatctcatcatcggaaagagataaatgctcccactcaggaactgcctgatctcctgctttacgcggaatcagatgcatatggaaatgaaatacggtctgtcctgctgcttctccgttattctgaagcacattgtaaccgtcacatcccaacacttctttttcgtgtgtaataactttctttgcaagctttgcagcctttgcgagtacttcatcatcaatctcaaacatatttgcatagtgctgtttcggcagaatcagcacatgtccctttgttgcaggacttgcatccagaatcacacggaaatccgcatcttcatagatcgtattggtcggaatatctccgtttgccagtttacaaaaaatacaattgtcgtctttcatttttttgcctcctaaaatacaaatatctgatcgagcatacgaagcgttttaaaatttcctttcgctgtcatctcacccgtcataaacgctctctggaatgtcatccgtccgtcaatgattgactgcagaacatctctgcttaattttgcaaccacgtcaatcttttcttcctgaccgtaatgaatctccaattctccgttttcaattgctacatacaatggctttttgattccttcgataataaaggaatagctggcagcaaaatcctcagtagatacaaaatgactttccagttccttcacaaacggtgtatccatatcatcatccggttttccaagcatatctttgaacatcgatgccaattcctcaatatcctctttctgctgcttcacataagtatcatccgatacatacttcgagagctgctcgctctcctgtggtgtcagattcagctgctgcgtccgcagaacactctgctttactgcctgattactggtcggaagatttttgatcttctgggaaatggtccggtacaggttttccgctttcttttcaatgatcagcgtataatctttattctgcttgaattccaccagatcctctacatatccgcataaccctgcacatggtaatccacccagaatctcccatgcattcatcagagtcagttctccctcacgctccccataggttgtagacataacaatcggctgcatataggtatggctgattttttccttatcaccatataaccagcaggcatccagaaactgctgcatataaccaccgattcccagccactcaatcgttgtggcaagaataattccgtctgcctctttgaacgtcagcggaagggttgcaatttcattcttatgctcatatatattgaatcgttcgatgtttacccgaagttcccgtaaaacatcttccatcttttttaatacatacagtgtcgggtcatccaaaagtccccggcctccataatacacgttgattttcatcggtatactctccttgctttgatactaattagtatagggattttcccccgataaatcaactgctttacgaggtttccggtataaaataattgcaagaacaaatcccattgcaaggccaccgatgtgtgcccagttgtccacatccacactggtaattccataatacaggctgatcacaatcataaaaagcagccctttgcccgtaagagattcatatcttcctttgtgtatcatcacaatccacagcaatgccccgataataccgaaaatagcaccggatgcccctgccgatacatcatactttccccgtgcgatcatttgcacataggacagtgtacttcctcccacaccggcgatcagatacagacacaggtatttgatatgccccatcgccttctccagaatcggaccggcacagatcagtaccagcatattattcaaaatatgttcaaatccaaaatgcataaaagtagctgtaaacagtctccagtattctccctgcttcacatatggcggccaaaccgcccccattcttaccataaactccgaattttccgtatttccaaggatttccagaatcatataaacaagaacattcacagcgacaaatcccacggttacaaatggaagtttctttttttgtggcatgcttttccctcctgattttttcacatgctatcagtatactcacttccatttggaaagacaaggcagttagcaaaaacgatatcggacatccgcgaaacggatcatgtcattactgtttaattttcttctctctttgtaagccagcggctcatcattcacaaacgtaccatttgtcgaatttaaatcttcaatataataggtctctccatcacgatcaatccgcgcatgcagctgactaatcgtatctgcctgtatttgtatgtccgcatcgggaccgtacccgattcttgtcattttctttgtaacacagatatcctcgtaagattcagctccctgatacaacaacattcccctgactttccctgtcatgctgttcaggcataccgttggccgatattctggccgtaccgccgtttttattttttcctccggatatacaaccgcagacttcgaaagttttctggtatcctgcaggcattccctacttccatgataagattcatatatctgtttttcggtttcttcctcttccagaagacctatttctatcagtagcttttttaattttctgatccactccttctgctcctttttcttttccccctttttctttctgttggctctttttacagtttcatcttttctttttttgtctggatgatcttcatattttctttcaggaactacgggttgattgttttcctctctccaaactttttccattccatttcccccggattcctccacagccgcctttttcccctcattttgtctggttcttacaatttcatcccggatatctgtaatagaataaccatccagaagcgtcttctcataaattccatatgctgcttttaccgcccgtgtgtctttatgatccacttttgtaagcagaaattccattaactgctgaaattctgtctcaatggttccactcccacccggatatacggtaaaaataatttcctggttgctgttggtaataaatattaactcgggatccagcatcaggcaattggtctgaatcagattccattccagaatctccatctcactgcaaatgctcataatcagtttttcaatgaaagaaatatctacttcttttaccctgcaatacatatcaagcgactgtttaccggatatgttataccagtactgtccctccccatccatatatgccttttccaccgcaagaagtcccggcaattttctcctcagcatcagcttttcatccagccccgcatggattcccgctgcaattttcataaaacttcccgtaagatttctttcatatactatttcccgattgatcattttttcacctcttttaacgtctgatactgataaaaggaatctactgcccacatatcttctatctgtttttcttcatgctcctcacgtacttcatgcaacaaatcaattcctgtacacatagctgctgccatcgtccatatcagaaccggtataatcacagccgcctctactgtataacttcctctccatttcatattttctccttttatccctgtaatccccacatgaccagatgtgcccctagcagaaatggtacaaacggaaactcggattttctgtttttatgtccgaataccagcaaaccaagagccgtaattcccgcaatggtaatggcaatcatgacaattcccattatttcacccagtgcataaaaacatcccatacctaaaattaccagaccgtctccatacccaatactttcccttgtactccaggccagtataagcataaatatccccggcaataatcccaaaaaccataccggatttttccaacagccccccagcagtgatatggtcatgcctgatattcccagaagcaaaattgcccagccatgaagttgctgttttctcatatcttcccaggagagtcctgccaatccaaacgtcaatatgcacattctgatcatttcatagttattctgcatgattttacctcacctccgtattcgcaccacatttaccacaggctctttttcctcccgtctcttccaaaaggatcagataaatagttctttttagcccactgcaggcaagatcactatgataacaggttccataatccgtcacatacacctttccggcaacatgattttttgccacgcacccggaacatgcgctgtacttatgttcatttttgtttctcatactgctgatctgtgcataatccgtacttttaatactcaaatccagataatggcactttctgctcctgtgataaacagttccatgttttgtaacatacacataatcactctgctttccatctgtacggtcgccaatccacttatggctcttacttttctgacagataccaacaccctttacctcaaaaaagctaattggaattttaatgtaataattaacctgcaaattaatataatttcctgacagatcggattttgccatcgtaatcgcatgttttccaccgcgaatatatttttccggcaggctgtacgttcccagctcctttctaaaatacgcttccgcagataccagaagccccgtttgcgatgaaaccgcagatgcttcacatgctgtttttctgcttgcataattcaacgcctcctgaacttctgtctgaatctgcaatacccgaaagaaaaataagagcgtaaggaaaaacacggctgctacaggaataatcacggctgcttccagcgtatacgatcccttaaaaaaggaacataaggatgccttttggcaaggatgttctcccaggttatagatatcgtcttgcggattcgaatctattggttcgtttattatcttatgaatacatgcctgcttcggaaaaggttgatatttgagggtaattgttggtttccactgtccaaaagacatccttacatcccctccttcccatgaaaataactatatccggaatgattttgaatccggaatccatttgagaaattttcaaggatggatacaaagccaagaaataccggttggaattcataggtggcagtaagctcagtttcacacaaaacgtggtccatctgaaaattttcgtacccttcctgtgtctgtacatacgcttcctccacatccatggtgcgcattgcaagggtatttcccttatgaaacaaaagcaaaatggcagcatattgtccataatccaatccctgagaacaatctttcgccacagaccagcccgacaaaagttccggaatcatatgtacatttgaagtccagtccgcatcactttttatcattgtaattttcccaccggacaatagtgtccttacatctaacacactttctgcaaatgcccacgctactaagattccgtattttacagcttcgattacggccggatttgcggatactcccgccaacgtgaccgcaagtgccattgcctctgattgtcgctgggaagatgcggttaatgaggccatatttaacggttctctcattgccagcagctccgaaaccacaatttttaaattatccgcgtcatttctttttccgcccaaaacatactccagctcatattccaatacgcgatcctgctttttttccacatagtttccaagataattcaccagatactgataaaacaatactttttgataccagtctgttcccacataagaatccatcgtacctttttccagacttctgtgtgaaacggtttcttctatactaatagattttccggatacctttgtattttccggcaaaacaagggatagtaccccttctttttttacttctgtcaccgtttctaaaggattctctgttggcgttgccttttctccagaatcctctttctttgttttatccccctgacgcgcttccccttttaactgccgggatgatgaattacctgccccctccgtttcatatttttccggatgcttcagtgcatccattgcatctgcaataccctcatccggatttttatagtccttttttacttcttttactgcttcataatgattgtagacggactttgccatctcatatgcaatattctttttcatataagtacacacagccttctgaaatacgacaccattctgatctgtcagcaatcgataggggtcataccttgcatctgtcatctccgcggtcaacagactcatcccggaaagcaaagttttttgttctttgcttccaagatgatccaatgtaaggccacgcaactgtgcttcccggttattaaaacataatttaccttctgtatcatccacccgtactccaagaattttgtatgtttcccacaaaggactgcaataatcggcaaaaacggattccaaaaccgtatccgtattcatatacaatactttctgaagttcataatgtctcgctgcttctaaaagtgtgaaaagaagctgcgccaccagcatcagtgaaagggctgcaaacacagtaatactcgcctttctcctcactatacctcccctgtgcgttctttaattgtgttgaaaatatcagaaaccagcgttgtcagttttttcttgaacaacacaacaattcctatcaacaccacaacgatcaacaccatttctacaactcctaccccatcttcttccatcaaaaagtttttaaatcctaacataatttttcctccttatacttgaaatgacagcattgccggaatcataatgatggcaatcacgatgccaagcatcatcatgagtggcaacagcattttcgttcctgcctcttctcccaatttacaggccagtgccttcctttcttccagtgcattctccgattcctgttccaaaagtttacataatcccctgcttcctgtctgtaaattctgtaaaagaatccgaatgagtctctgatactctcccaaatccactctttctccaaatttctggtatgcaagacgttcactttccccgtccaggatttcgtgattcgttattatcatttcttcatagatataccgttcttttatttgttttttctgccttttatcagaatattgagcggaaattctattccatgcctgttttaatgacatgcctgctcccagtaaaatcagaagtttactcacaacttccgcataatccagtttcatctgctctttttttatatgatctgcagtacgttttctctccagaacaattcccgccatcaggaaacagacaagcacctcaaaaaacaaaattttccataccagatgctgttttttttctttccattgcagcttcacccctgccgcctgatccggcagcgtcagatacctttccccttcctgcgtactctgctgctccacttcagctgcaatttcatgaatgaccttttcctgctgcgacatcactttcgggtatacttgaaaagaaaacgtatattcctcccggtacttttcacaggtaagtgccacactcgcctgtacaagttctccctggggatctaattgatcctcccggatcgttccatccacgtccactgcattgtattgatccaatgtccagtcggcttttaccaatcctttcacatagcttggcttcatatgcacctgctctgttacatgtgcagcctcttctccctctgggaaaaaggtttcgtctatttccttttctgcccgggaaaaataggattgtgctgtcttttcatcaatacattgtgcaggaacgcttacctgatagtcataatttttcagtttctcccctgcattcagcgtaagttccacttcctgccgcccactgcccggactgccccggataattctgtttttatcgtccatactgcgatcggaaaattccatatatgccccaagcagcaataacagaatacaaacaaccgctgcttctattatttttttccttctcacacttccccctctacatatgtattgtcattattttctctgccagtacaatcgccccaccataagctgcaaggcatactgtcataaacaatgcccctgccacatttccatataaaacattcaggaaatccatggatgtcaccttcagatataacaaaatgaacaacggtatcacattcattactttctgttccatctttctagaagcaatctgtacctgaatctccctctctgtttcatggcgcacccgcatgtgccgggatgttgcatcaataattgtcacaaaatttccaccgctgcgttttgcaaatgaaaaaacttcggaaaaacttgcaatatccatatttccacttcgggttgagaaatctcccagcagcagctccaatggttgattgaggctgatggaacaattcatctcctttacctcctgatacatataggaccttttcccatataatgcgagtatttctttttctgcctctttccacgcattttctatagagaaaccagcaagtaaagccgcactgatactccggagagtatccacaaattccttcgcaagctgtaattgcatctgctcttcccctgcttttttctgacgcttcatgaaaaaccagataaaaacaggaaaaaatactatccccagccagctggcataaaataaatacgcaattgccactgtcagcagccccgccaaagcaatgcttctacagacctccttccggctcagatgatacacgcgataatccatcttctatctctcccttctcccgggtcagccctgccatctccagttttttacgattctttaatatgccacagtgcttccacttccagctgccctcggttccttccagctgataaatcggagaaatctgaatctcgccattttccactccgcatacctctgtaatttccaatactctgcggcttttatccggtaatcttcccagatgaacgatcaggtctatccccgatgcaatctgttgtctgattgcagcaatcggcagatccatccccatcagtaccatcatttccagacgggagagaatatctctgcttgaatttccatgggcggtggataatccgccgtcatgtccggtgttcaatgcctgaagcatatcaaatgcctccgctccacggcactccccaacgagtattctgtccggacgcatacgcaatgccgtgcggatcagatcccggattgttaccggctggacgccctccatatttgcattccgtgtttctaaacgtaccagatttttgattccctgtatttgaagttccgcggaatcctcaatcgttatgactctctcatcctccgggatatactgtgataaagcatttaaaaatgtcgttttcccggagcttgtccctcccgaaatcaacaggttgtattttgcccttaccagcatctttaaaaactctgctgcatcttccggaagtgcccctttttgaataagggtctgcatatcctgcggtttctctggaaatttccggattgtgattgtagaaccatccagagaaaccggtgccaggacaatatttacacgggagccatctgcaagtcttgtatctacgattggattcgataaattaaccacccggttatgtcttccaacgatctgctgtatcacatcctgcattttttcttcgctggcaaatgcctgattccatgcatgaacccttcctgccttttcgtaaaaaatatgtttcggtccatttaccatgatctcggaaatttccggatcatccagaagttcctgcaaagcatccagttttctgagtgaattaaatactcttgcttccagcatcagacgttcccgaatggaaatgggttcctcctgcatcagccgggatgcctcttccccaatcagattttcaatttcttcatccgacatctcccgcgaaagatccatgcgttccaatacacgttgccggatacatcctacatactcatccaaccggcatcatcctccggatactgtctccaaattcgttccatttccattgctcgacgagccgctcgcaggacaccacaggggttgccacaggtggaagctgtatctcccgcagattctcggataaccgttcttctccgcgtttttgaatttctgtcaaaaattctttctctctccattgtccaagccctcctctgcttttcatcaggaaaattttctggcagctccccagcaattcaaaaaatcccataaaccgtgaccccagatttaaaacgatggttgtataattcatttcctgcgctaaaatctgaaacaatttctgatacgtcagatttttcacttcacacagacactcggtatttcccagaggatacacaacatctgtcctgtccagatgaccgatgcaggaaaccatcctgctctttgagtattttccgctttctgccatcaccagaagttcttccatcccggacgaataaaattcccccatcagctgcgacaatccactgttttcctgcaaatccagaagcagaactttttcgttttcactcagaatggaggacagcgtgaccgcaaacggaagctgcatttcattttctgccagcgaatatactgcaagaacctgtaatttttgcttcacacccccactggcattttttatttcctccccaatctgttttaaaatctcatcgacgattttattcacttcctgatacttatccacaaacaccacccctttttccacatctttatccacattttcatttccatcaaacagataaatttgtggaatttcacattctatcctgttttccccagccaaatcatccgacagaacaattgcatccagggttttccagttctcctgaagtgcctccttctgggaaaacatgtgcagctcaagctgatcccgataatgattcatcaggcagctggtaaaacggtcaccatactcccggtctccaatacagagtcccaatcgagctctcctcatagctcctcctttcttttcaaaacagtgacagccatactgtccgatgcgcatataacattcccagtaaaaccgcaacagaaaaatgcatcagattctgctcctgaacccagccatttcgataagaggagaatttccccgaaaacagttcccttaaaaaaacctgtgctttaaaaaggctgattctaagattgcgcatatacaacatcttgagcacggctattactgctcctgccacaaatgctgccagcacacagtctgtcaatgtttttaaatttgtaaatccaccgataacggaaaaaagtttgatatctccggcgcccaacacacctatgagataaaaaagatataacatgataaccggaatagaaatattcaaaagaacttgaatgattcgcggcattccacccaaaactataccgaatgccatcgataaaaataaacccatgataatcagccggttactgatcctcatgctggtaatatcctgaacgactgccacaattaggattgcatacagtgtcagaaccgatgccccctgcatcgaaatcaatttgcatcacccctttgttgtgaatcgaattataacaatgccaattttatttgtcaagcagttttttacaaattttttgtataacttttccatttttgcttatacttgtaaaagagagacttcagaaagcaggtgatccaatgaaattgtttaagacaacccctcagccccctgacggctatgcaatacttctcgataatctgaaacagacaaccgcagaactgcaaaatacctatgccaatcttgaaaatgtcgttgatccggatttgatcgactattacatttatcaggcaaaagcggtacagatgcgctataaatttcttctgggatgtgtaaaaaaaatagagggaaactattcgcttccctcctgaccgttcacattttacggaaattttatacaaaaaagccccggtgactgtccacatccatataatcttcgtttacggcaccgcgcgcataagtcatccctgcatatacctgctgggtatttttcataaggggtgcactcttgtcctgttttgctgcctctacaaaagaagtatacaaccggtgcatgatatgttccgcttcctgcactccatccagccgattctcgtacatcgcccgtgaaagctcatttttacagaacatatagagtttatacaggttgtgcgagatcggatacgaaaaattgagacttccgatcagttcatccagaacactctgtgcattccggatcgcatccttctgtccatcatgatctccattgcagtgtgcctgccgaatatcatccacataggcaaaaaagatatcgtaaatgatgacgatcatctcaccggaattacactggctcagtcgtctcgtaaaatcttttttcagctcattttccatatgctactcctatttctgcagcaaagacagtacctgctgtggaatatcatttgcctgtgataacaccgaaacagcagcctgttccagaatattctgctgtgtatattctgtcatttcagatgccatatcggtatccataagccctgaatatgcggttgtcatatcttcctgtgtctctgcaagactggagcttgcatactcgagacgattggtatatgcaccgattccggagcggacagcacttaattttgcaattgctgcatccatcgtgctgatggctttgtcagcacctccgttgaccgccacatttaccgtatccagatacagactctccgaggaaacttccggaatatgtacatccatattctgatactggttcgcaccgatctggatggtcatcgcaccaacatccgtcacatcaaatgtaagggtatccccattttgtacgtcatcactcagcagaaaatccatggaaaatccacctttatccgtgattttcacacgatttccctcaacatttgtaattactgtacttccaaattcgtttccaagtgtgacctttgcgtccgatccacttgctataagtttgtaactttcgtcatcagcattctgaacaactccctgtgcttttgacagacctgttttttgtgccatctcttttgacataccaatggtcagtgtctcctttgatcccttgttatccgcagtaatattataaactcctgccttatttggatctttttcaaacttgcacccgatctcatctgccacggacatcagctgcttgtatacatcatccgcactcatgcccttttcatactctattcctactccattgatggaaaccgtacccccgtcaaaattcggatcattgatcaggttggacatatccaatgtataagtagcttcctttgccacttcatctactgtaatcgtataatctcccggaagaacctcctcggaaaagtcaattcttgttgcgctccgtgcaaattttgtagtatccttatgtgttccactcacatacacacgtgtatttgccgaaccgtcaagcaacgtcttcttgttgtactctgtatctgtggaaatccggtcaacttcctgtgtcagctgatcaatctcgtcctgaatactctgacggtccgaataagagtttgttccatttgccgcctgaacactcaattcacggatacgctgcagcatattgctgacttcgtttaatgccccgtctgcaattctgagtacggactgtccatcatcagaattcgcttctgcctgattcagaccatcaatctgtgctttcatcttgctggagattgccattcccgccggattatcccctgccttgttgatcttatatccactggaaagacggcccatggaaatactcagtttattttctgtccggagcagctgccggttggctacaacagcagacatattgcgattaattttcatatttgttccttcccgtatacgctacgtttgagcatccctgccctctgatttgacactccctgtcatttcatctgacatatatatcgtccgaaaatgtcaattctttaataaaaaaaagtataatttgcaattaacgggaaatcgtattataatagcaacattaaacgatatttgcaaaggaggatttatcccatggctaaagtaaccaaggatactatgatcggagaacttcttcagattgatgagaacgtagcacctatgcttttaaacattggtatgcattgtcttggctgcccatcatcccagatggagactattgctgaggcagctatggttcatggaatcgacccggatgatctggtaaatgacatcaacgatttcatcgagcatgatgcaaccgcatagatttcacgtatcaaaaaggagtgctgaatttcagcactcctttttgatttaaattttctaaagagatgcaaacacctgcagtgcctgcggtcccgtaattttatttccatgctccgcaaaatatgctccgactgcaggattatagtttttctgctgtgcatattcgcaaataatattgcagactttattaaactcttccggtgtgtggtcatctttgtggatcaccagataaaaccggtttttcttctcgttcttaaacaggtcatttcgtccattgtaataatttacaagtacatgtgcgagacgctccacctgatctatcgtcgtaaattcaaacattttcgtcagatctgccggtacttccggtacttcttccggtgcctctgtctgctgtgcattttcactctccggagaggcttttgcttcacgtattttctggaaaagttccaaaatatcatctgcgcctttgcgttccacatttccgactgctcccgtatttgaaaacagttcctcatctccggcttccgtaaactgggaaaaacgggtatcgagttcttccgggtattcaacctttgtaatcagcaaaaccagggattcggaagacaatggaattgcctctaccataagtggattgtcactcacatcaaatccaaactcataatttgcctgctgtatcatatcatggaaaagtccttttgctttctcagaaccatatgccagttcccgcagattaatctgacgatctgcaagatcctgttttgttaatgtgcatcgaatctgattttcatttactttttcaattttcatctctatcacatccttctctggaaatcgctttccgtaaatggtacacttattataatcaaatgccctcccgttgtaaagttaccacggattaaaaaattataaaaaaaatacttgcattgcaaaataaagtgtgttataagtttatgcatgagatgcgtctctgacccaaaggagcgtatgaataacaaaaatttaatattgtctgaccgatacgagctgattcgtccccttggccagggagaatgtggaagtgtctttcttgtcagacagcaatctttagagcagtaccgtgcaatgaagcgattccccaaaaatacttcggcacaaccgctcttcgcaatatccgaagcacagattctaaagtctgttcagcatcccggaattcccacaatttatgattttgaagaagatgaatcattctactatcttgtggaagaatatattcagggtgactctttagaagaatttttgcttcatcaacagtcaatatcccagaaccagtttttatatttttgtgagcagctttgtgacatttttgcatatctgcatacattacggccttctccgattctttatcaggatcttaagccggaacatattatagtatgtggaacacagcttaaattgattgacttcagtgtcgcatcttttgctgccatttctggaaaagacttcaaccatttcggaaacgtggatttttctgctccggaacttatctcaggaaaaccggtaaccctgagatccgatatctacagcattggaaaaatcatggaatatatgatgccatatctggatgcagccaccaaccgatctatttatcccaaaattcaaaaagcaatttcagcagatcccgacctgcgctatgaatcaccgcaggctctgtactctgcattaaaagaagtaattgaaactacgggaagaacgcatctcaggcagacaattgcagtcgttggaaatcacagcggctgtggtgcaacacacatagcaatcgcgctggtgacaacacttaactaccttggcatttcggcggtttatcaggaaaaaaactggtcaaacgatctgcgcaagacggttgcccagttgaaacatgtgtgggaaaaaaacggttgtttcttttatcgcaattttacaggatttccaaaatatgacagtggcatcgaaatcccagagcctgtcgcacaaatcatggtaaatgattacggatgtgatttttctttctcctgccttgcaacggcggatcatattatctatgtgtgtggaggagcattgtggcatcgggacgatgcaaagtccaaagactttcttttacaaaattttggtaaccgcctgcatgttgttgcgaatctgtgcgaccacaattctgccatttattttgccagaacattttcacagccggtctattcttatccgtttaatacggacatctttcgtgcagacaaagaaaagctggattttgttcactggctgcaacaacctgagaaaggacggaatcgcctatttttacgtttcataaaccatttattccggctcctgcaaccataggagtctgcggtacaacagtaaattccggtgtaacacactttagtatttcgctttgcaactttttacacagcagatttctggcccgcaccgcatacctggaagtcaattccagtcatgaaatcgctgcgctttcttcgaaaaaggacccaaccattccttttcgctgcaatggtgtcagctactatccggagattacactccggcagctgcgggaacagttacatctgcaacacaagtataaaattctggatttcggggttctgactccatactcatttccggaatttgtccgctgtgattactgtattgtactgacaaatgtgagtatttggaaggatcggcagctcttacaatttattgaggaactgaaaaaaacaaatttaggaaaggattataaaacaaatgtccgttttatgagtatgggaaacctcaaaaaagaccgaaaaagagtcgaaacgtcctatggaatccgtgtgattccggttccctttctcgaaaacccgtttcaagtgtcctctcatgattttggattctttgaacaaatatggaaaggaaaacagttatcacattaaatttatctactgacaatcagctggtcattgaattcagaccagaagtatatgaaagtctgatcgttactttttaaaacgatccattaaaaaaataaaataacaaatgggctattattatgggtgtgaaatgagtctcaatgcaactccgtcacgcacaaaataaactgaaaaaagacaaatgggagggcagatccacagacacaactgccctcccgaaaaaattcaaataacttctatttcttaattttatctgattccatttgaatctgtacaggcacaatgctataatcggaataaatatataatttgccaacagacaaaggaaggacggctcatgaagaaaaaatctcattccattttcgctgtgcttgcactggcacttgtcattgctgcagcgatcgtagtcttcgccctgatccgcaaatacacaccgagtaaggaacacgaagatttaaccacttattatcatctgacaaattccgatgaggttgccattgttttaaataatgaagtaacctcttccaaagccagggtcattgacggtcatatttatattgattatgattttgtccatgacaatttaaattcacgtttttactgggacaataacgagaatattcttctctatgcaacaacacaaaatctgatctcggcacaggcagagcagaccagttatatggttacaaaatcttccgcagattacggtcgtaaaattgttaccataaactctgatactgcatatattgatctggattttgtgaaagaatattctgattttaaatacaaacatgtaaaagatcctcaccggatcattattaccagccagtggggaaaataccagactgccactgccaaaaaaaatgcctccctgcgcgtaagaggaggcatcaaaagcccgattctgaaaaaagtttcttccaaagaggaagtcaccgtgatcgaacagggcgacaactgggacaaagtaatgacagacgacggtattattggatacatgcagaaacgtatgctttcctccgtcaaagaaaaaacaagaaaaagcgatttcactccggatacctttgcacatataaagaaagattacaatatctgtatggcctggcatcaggttacaaaccagtctgcaaataacgcggtttcctctgtccttgccaataccagaggaatcaatgtactctctcctacctggttttatctgaatgacaacaatggaaacattgccaacctggcaagcctgaattatgtaaattactgtcataaccaggggattgaagtctgggcgcttgtcagcaatctggaaaataaaaatgtcgatacaacagaagtcctgacccatacctctaagagacagaatctggtaaaccagattgtttccatggcgattcaatacaatctggatggaatcaacgtagactttgaaagtatgaacggggagaaagtcggggatgcatttattgaattcatccgggagctttccatcaagtgcaaaaacaatggggttgttctttctgtagacaattacgttccgatgtcacatacttccttttataaccgaaaagaacaggcaaattttgcagattatgttgtgattatgggatacgatgaacattatgccggaagccccgaagccgggtctgttgcctctttaagctgggtaacccagggtgtaagcgatactttaaaagaggttcctgccgatcaggtaattcttggaatgccattttatacgcgtgtatgggaaatcccatccgagagcagttccgatgacacaacagccggtgccaaaattccctcaaaaatttatggcatgaaagctgcaaacgattttctcgccacacatggtgcaaccaaaacatggcaggatgactgtggacagaactattcggaatttacagataatgacaccacctataaggtatggctggaagactccgcctccgcagaatgccggttgaaactggttgaagaaaagaagcttgccggtgcatccttctggaaactcggatttgaaacgagtgatatctgggataccgttaccaggtatatccactgacttacctgcatatatataggaataaataattccataaagcaggttctatgaaaaagaaatttgaaattcttatggttgcctgtctgtttataagtgctttcttacttgcgcgtgcatcagctgcactgacatcttccagacatgcggcttcctccaaaacctgtatcgttcttgatgccggacatggaggaagcgatcctggaaaagttggctgtaacgatgctctggaaaaagacatcaacctgtctattgtgctaaaactcaaaaccctgtttgaaaacaaaggatataaggttgtactcacgcgaagtgatgataccgttcctgcagatgaaaactcgcgcagtgtaaaagtagaagatctgcgaaaccgcgtaaaactgatcacagataccaatccggttatgaccatcagcatccatcagaacagttttccggatgcctcagtctccggtccacaggtgttttacttcgaacagtctgcggaaagttctgcaattgcctcagtaatgcaggataccctaaacaacagccttaatcctccaaagccaagggtctgtaaatccaacaacgactactacatattaaaaaaaacacccacaccgatcataattgtcgaatgtgggtttctgagcaatgaaacggaagcagctctgctggtcacagatgcctatcaggaaaaactggtccgcgccgtttacctcggtgccataacctatctggaaagcggaaaggacgtaccggatactgccacctaatccgtttctttacgaaacgatatactagttacacttgatctcaaactctttatcctgtgcaaactgtgcactgttgtaaagaatcagtatatcggtaggtgaaaacatttccaaaagccggtctccgcttacattcagctggcgaagatccacaacgacaagtttttcataatcttctgccagaaaaggaaggatactgttcgcaaaagaatccttgatcaaaagcagcgtttttccgttctttattcccccggtaatctcaagcactgcctgattcccaccggtaaaaacgctgtactggtctgctgttttcaggaaggaaacatcatacagtgtctttgtcttcttttctcccatattataaacaacacgcagtttatccgccggctcataaatttcaattttgtctgcctgtctggcataatttatttttgcataagttgttccatagaaatctttactgatgcaacggaacttctttttcccctgtgccctctgaagatctccaccaaccgcctttgtgtattgttcataggcataccatgctcccagcgtcgtccagtgatggtctgtccggtaatagatttcttcctctttatgtgcatccagtacgggctccacggaaatcagtacatcctctttttccaatttctgctgcaatgcatcataaaacttctgctccttataatgaggggcaaatgccggaagtttttcccggagtacccacgactttgtcggcaccatcatcacatggacatccgcgttctgttttgcttttccgacaaacttctccagagcctgcagatttttggaaatctgctgcggatcaaactctttttctgtatagtgttccaaaaggtaatggttctttccgatgtaaacattatgaatttcatttttgcccataaacaattccatgtctgtctggaacgaaacccaatgatcccttccgggaaactgatcccgcagatacgattcatattttttctggaatcttccatccagaactttcgttatacttatttccgggcgtgtctgaagttctcttttttcaaccggagaataggttctctgatgcgacagtgcttcttttcctgccaggccgaggagaagcaccataaaaatcacacccggcagccgtttgaatatccgtatcataattttctctatttgtacagtttattgatggcttttacggccttttcattctgctttttatatgcagcaatcactttgtcctcggactgttcctcctgcttgttgctgattgttccaagcatgataaagcatacatagtttccttttacataaactttggaagcctgaatctttaactggttcatcgggtactgacaggtatcctgtatcagttcctccctgtatttttttaatgccgaccggattttctttttggaagctgcattctttgcttttacaataaccagtgtgtctgcatttgcgctgatcatcggcacctccgcaatcgcagcactgtaccatttggaagaaattccgtagcgttccttcaattctttctttgatactttttcacttgggatataatcatccccatacgctttctttacagcattgtatactttttgtatggatggggttttcttccctttctgcgtggatgcttctaccgtcaccggtgcttcccatgcattttccggtgcatatattcctgtcacacaggcaagcaccagtatcattgccacaattttctttttcattcgccattctccttccagatcctgtatattttcattcttatcgtgaaaccacctgtaatctggtttccgcactatcctactacagatcttttgtttttgtcaaaagggattttatggaattaataaaaacttccgctgtatgatacaaccgcgttgtctgtacctgattggaacggtcttcctccagttctccctgctctttcatttcactttccctccggattccggacatctcaaactgcgacaaagaaagatccggtgtatatgcaacatggatatctgccggttcctgcatggcatcctgcagttcctgcaggtgttcttcgatctgttttgcggtctcttcgctgcctgtcacaattgttccagaaatacggtctgattttacctgaaaagatgccgtaatctttcctgccttttctccatccagaaaaatatccacaagaccctttttcttttttcctcttacgatttttaaagaaaccccggtgacagaatctcctgtctgcatcggaatcacataacattcttcctgcgattgtttcgcaccaatctgaaactgtgcggtcatctggcgcatttcccggatatcaatcgtgcggacatccggatcttctacgatcatcgtatccatcacatgctctgccacatccgcaagcgtctccatggcatctgcaagatccgaaggattctcaagggcttttgaaaactgttcaagtacctgctctttcatctctgcaatctctgtcatggaatctttggaaacatgatcttgctgaaacaaccgctccatcatccggtttggtttgcgcagcatttccgatgctgccatgacatttatcatactgtttggaatatcataccgctccagataggtatatacgtcttccggtgtttctgcaagctgctgatactgcgcaagctgctcctgccgatagcttttttccgcttcctgttccccaacggattcatccatctgccggagtgcctctgccagttgttccggagacatattctgccacttttcttctcccagacgggaaagtttttccggtgaaatatgttccatcacatcgcgcagacaattctgctggaacgcagccgagatctgctcgtcaattttcggaccttctgctgtgctgtcaactccatcaaaatcatcgtccacctgataatccagaccactctttttttctgaacgcacagcacgcaaaaggtttcgcatcgtcacgtccgatccctgattcatcagaaatccaagtgctgccccatctcctttttccacctgtgcgatcagacggtaaatgccgatataactgctgcgctcttcctcagaaatctcatgattctgctccagtttccacagatatttgctaaaccgttcctgctcctttgttccgttctcctgctgaatctcctgtgccacctgattcagctgctccatattcatatccagtggattttccccacggcggatcatttccagcgttactgccggtttcatattagaaaacgcacgctgcatctgctcatccagtgcttttacttccataatattttccggtgtaatttcggtattgttatatgccagtatccgcactgcacggcggtttgtttcacttgtatccagctgcagatcctgtaaaatatcgtccacattggaaaatgcttttgttatggaatcccccatgtcactgcgcggagcagtcatcagtgtttcataactttcatttgcctgtgcaaatgcgcgctgcatctgcgctccggcatcatgaatctcctgaacggaatcatccgcatccacctgcccgattacatatgccggctgctgtttcagttcggcaaacacatccatggtttctgccataagatccacatttttttcacttggctcaactccggcaccggcaagcaggtctttatagtattctctctcctgagattttaaatcctcgaccagatccgccagcggtgtcagatccatctctacgcctgctttttccatcgccacggatgcctcactggtcattaccagacgtgcttcctccatctgtctgcgtgcagtaatcatggaagcatctgccggacgttttcctgccgcaattgccttcgccatggaatccacgatctggtcccagtctatatgatcggtctgcagatcgtccgataatccctgcagatctgtcagatactgcagattttccggtgtaaggggaatctggtttgccaccagccacttgctgttgtccaccgcatgttcgtcatcggaaaggcctgcttctgcaataatctcacgaatctgcggcatcagggactcaaaatcaattccgctctgctccggctccacaatattttctgcgctgctgctgtaattggacagatacagattgcggatggtcggctccatatcatttttcagaagataactcatcgcctgtttcgtgatttccggaatcgaggcagcctgtgccagtgcctccgcactgtcctgcacattttcctccgtcgccggcaggtcgtttgccgcaagagagtccatgatctgctgcgtcacaaccggacttccggtgatctcctctaactgttcctttgtgagtgttccgcccatggaagacacatccactccggcttttgccagtgccgctttaatcttgtctgtcacggtaataatggtatggctgtctgcatcggaaatggaaaatccgtcctcttccatcttctttaaatcttctgtggaagtggtatttgccactacagcgatttcgttgctgcgcgcctgtcccgaagaaatctcctgccctgcaattttttccgctactgtcttttcttcctgcccctgctttgccgggttggaatacgttgccatatcgatatttccagcctcggacaccgcagttttctgctgcacataggcttcctgtccgccaaaagctacaaccgctccggcatccggcatatttgcctgataagccgcaattgccctgttactgttatcgcgttttgcattccgcgttacatcttcccatatatttttctgctcaacctgcatgtattgcctccgtaccattacattttacgctataacatgtatcggcaggttatcccgaaacctaaagtaaaattacattaataacacttctgtcatcttatgtacttgcagtaatataactaccgactccaaacattatattattaaattttatttctgtgcaaacgcaagcagttcttttcttacatctaccagatattttcgtcctgccacaatctgcgttccatccgccatgtaaatcaggcttccaactatagaatccacatacatgatatttataatatatgatttatgacaacgaacaaattgcggaggcaatcgtttctccatctccccaagggaaaccctctccgcatatgccatatttttcatttgaattaccgcatcatgtttttccttccgaatcaaaatcatatcataatatcggattttaacaatatcattttctttatggaagtaataaaaatcacctgcatggattgtaagatatttgtccatgcatccggataaggtttcctgtgtgattggttttaacagataatgaagtgccctcacatcataaccacgaaagacatactcccgaaaagctgtaagaaaaataatctctccagaatatcccagttccctcaatcttccacaaaatgtaagtcctgtttcgttttcttctaattcaatgtctgaaaacaaaatatcaaaaccattctgttcaaaagactttagcatttcatttccggtctgataccagaataattcgattcggtttccgctaccctcactccaaattttcagagccgactccaatatgcggtaatcgttttctttatcttccaaaactgcaattttcaaattcatgtctgctgctctccctgatacaacggaatcaaaatatttacggaaaacatttctttttccggcaatatttccatgattccgaaatgtctctctacaatttcccgtatgcgcttcaatccaattccatgttccattccattttgattgcctttccctgcttttgtgctcaataattcattctcagaatcagatctgtaatccccatccgaagtattgacaatttttattgacagcatattatgaaatggcttcatatacaaccatattctcttactttctgcccgcatgcatccctcaattgcattatcgtagagattccccagcaaggaacaaatctctacatcacttaatggaatctcttcgggtaaatatatgatattttctgtaagaaccccaacattttccgccatgctttgcttattgctgacgatacagtcaaccgttgtatttccactggaaagcgtataatgcaccttattcaggtctgctgtgatctgccgcatatagtcaacggcctgtccggtatggttcccttccaaaagcgtctgcaacacatccagatgattttttacatcatgcttcattatacgcagctctttgaccgaagcaagaatctgctcgtactgctgtgattccatatgtgacagcagattctcttccagcagtttattatttttttctctttccacacctagattataaataaataacagcataatcataaacaggaataacacaaagacaaaaattgtcacaagcatgaaaaaatcgtttccccgggattgctgtaatgctcttactacagcaatcatgtctatttgctcgattgccacacacaacaacgcaattcctataaaaatcagcttttcctttgtccgaaggcagatattttgttttccaatcattatcgtcaatccgatcaacaccccaagcaggatcaggtaaaccaatgtaaaaaccgcccgaacccagcctcccgataaaacgcgattgatattttcgtgaaaaagaaccactggaagcattgcagacactacatctgcaagcaacgcatagatcgaatacaatataacataaaaaaactgtgaaaaaagagaagaatttgtaaaaatcattgtaattaaaaaatgcactattataccgtaaaacacagtataaaatattgatactttcatctgatttaaaaaaaataaaatgatagaaaacagtaaccatgcacaccattgccatttaaaaattctctttttgagatccaactttctattcataaataagaaaaacaaaaatgattcaaataaaataataagaaattcccatatattccacaaagtcagcacctccacctgactacaattgtaccataaatgcagaataaaaaggaaattgaatccttaatttcaatgtcgtttaaagccaatattttgtatttcgcgccaattctattgtttttttatataaatatgctattgtaaaatttaatatattctagtgtatattatattgccaattaacaattcccccgaaagaatatcatatctttcggggaaaaggagcacttatgttacgatttttaatcaaacgaaatctcagcactttatccaccgttatggttctgctatggatttttattcttccatttctggaatcctggtggtacatatatcagattattccgggaaactatgcctatcagccggattgtgctttctttttatgcggaaacagcgttggtatcggacatatctttcaaggtctttacttatggctgattccattgtactgtctggtaatttcctccaatgattgtttgatggatcaggaacggggttatgataatatcctgatcagccggattggaaagagaaaaatgatttaccgtcttcttataaaaaattttatattgctgtccgtattggtttttctttctctttccctgaatctactctgtgttcacttgatgtttcgtggtgggaaatacaatccatctgaaatttctgctttaaatgtttttacaatgttttggactaaccatcctttgttaaacaattttgtacatattctgatcacaagtattatctatggcattatgggtatgttttgttgtgcaacatccttttatttccgcaaccgaaaaacggtatattttgtaagtatatttttctggctgattgaaattttaaaacccggctccctgcttttaattttccagccgtttcaaattaattctacccttacagaaacagcttcaggacttttattatttttcgtgccagcaatcctatacatctgtattctgaccagaaggagtgtctatgaataagaaatgtatcacaacagtttttacttttttgtttttttatgtcacagtggctcttgtatatgcgaaatcaggtcatatgtatcataaaaacctgattacattttcttcttatatggcctcctttttctcaggtgatttttactttttgcatgcttatgcaattattattccttttgtatatctggtttatcttccccggatgatggctccgcaaactagctactttgtctgcagataccagacacgataccagtatttccgataccaatactggacagtgctttgttttactttgctatttgctgcccttcacatactttcgggaggaatctatctgtttacacagatcggatttcgttatttgaatttttttcccattttttatatttttttctttcagtggattgcggattttttgtattgtatgggaatcttttgcattcagcaaatattaaacaactacattcctaccctgtacgcttcacttggagtatgtcttttatgctgcacgcagatttttctttacaaaataagcaacagttatttccttcctcttcggaattgcctggtagccattcactatatggcgcaccaccagtctgttattgtatgcttttatgacttgcttcggcttacatttcttgcccttcttttgtatctggtatatttgcaaacaaataagaagaaggagttttatgaatgaaagcacttaaaaattgtattcgatttcttttgccgttttttattttacaattattacattttaaatatatcagtattttacccgacactgcatttatgtttgcttaccaactgccatcacacgccacatcttttttagatgtttgtgcccaatggcttcttcctataagtgcaattttatatttttctgtttatgataccgattttttgtattattacgggagttttattattcctcgcttaaaatcacggaatattttaatcaataaattacatctttccggtattatattagtttttattacttgctctatatatttttgtgggaatgtattattatattttgaatgttttatgcaaaatagcgtgaccatcataatgcatttatttggtacttttttaaacctgtatctgttgtttcagtgggttcttttactccgcttatgtgtatctgaaacgaccaccattttatttctctcgatttattgcctgatatccgaatgtatggttttcatccatccattccgcaaaattgcttaccttatatttccatggtattgcacacctgcaatcaaaatcatttttatcatgatgctgtattttttactttatttacaaataaaaagaaaggactttgtatgattcaattagaacacatctcaaaaaaatttaaaaagaaagccgtactaaatgatatttcttacacatttgaggccggaaaaatttacggtatttatggcattaacggttccggaaaaacaacgttactccgtatcatatccggtctggttttcccgacttccggctcaatcataattaatgggaaaacgttacataaagaaatctcttttcctgaccatatgggactaattatagaaaacatggaattacaaccccagttaactgcattcgaaaatctggaagaattaaataaaatcaaccattatgccaccacttccgacattcaggacgcactccggaaaataaaccttcaaagcaatgaaaaagtaaaaaaattctctctagggatgaaacaaaagcttaatattgcgcaggcaatttttgaaaacccacaattacttctcttagacgaaccaaccaatgcgctggatacggataccattgggtgtctgaaagccattctggaagatttaaaaaagaagaattgctgtattataattgccacacatgatcatcagaatattaccagtctctgtgaccggattcttgaaatgaaagaaggaaacctttatgataaaaattaatcatcgcatcgttttttggatattttctattcttattattggcatgatcttactctcttgtggttgcaaccaattgttaaaattttattttccgcagtctttttctgtttcaaaaaatgaaatgactaccaacgatctgcttcaaaatgccgaaaattataattacagaattcgtgcgcaaaattatgcagatcttgtttcctatctaccaagcaattcgacacctgtagatctgcgtattcccaatgaacttgctggttataaagtatccgaaattgaagaaggatgtttttcatggtgcgaggctatcaaaacagtatacattccagcttctgtcaataaaattggtcatgtggctttttatgataatccttctttaacatcaatttcgatagaaaacggaaattgcacaattgaaaaagattcttttggaaattttaccggaattatctatgctccccaaaatagtcaggtctatgaacaattaaaaaattacggatataccgtaaaaactttgtaattacatacttaaataccttaattttaaatgccagaatgtcaatcaaagtaaactctttatcttaactgacacttctggcatttgataaaatatcctttatttcactatcttttactatattctaacactatcaaaaccactccgcaaaatagtactattacagaacctattagaaatggccacaacccataattatttataaatccaataaaatgatttgtatcttcatacattaccctgtcaaaagttgaaattgcactcaatactataatttccaaaaaaccaaatattaaaaaaattgttccaagatattttttcattctcatttttctcctaattcatctcattatacatctttatctttttcccatttattaacaaatctattccatataaaaactcggcagaaattatccccataaaaacagcattccctaattttgtattgccaaggtttaaaaataccgcgcaaactactccacctgctaatataacaacaccgattttacaatagtttctcttataacctttcaagttttcatcatgaatgacaggtcctgtaaaaatattaatcaataacagaccgccacatacaatcaattttactgtcaggggaacaaccaccaaccagattattccatacattgctataactccataaacactgctatacaaaatacatcggaaatgcgtttttgcatgatatcctccaatataattccgaagcattaaaaacatcacacaccaaatcaacattgggatcaacattttaaaataccatgcacacacaaatataaccataaagggaatactcatatttattttcaccatttttctaatatactgctttcattatatcatatatacataaaaatgctgttcttccctctctttttgttctgtcgtttaaagccaatattttgcagttcacaccaattgcaccaattctattgctttttctatacaaatatactagtatggaattaaatatattttttaaaaaatattatgtcgtcaattaactatctatcaggataccaagtcatacactattaatggcactttatcagatacaatttctgatatcacggatttaattttgagtttttctgcttaaacaaatggttctataaaggatatacaccacagaattgggagaatggagatgattgaaatgcaccgtattccacttaaaattgtgacaagattatccgttatatttacggtcataggtttacttcttgtgatcataggtatttgcacaggaactatgatgggattgataatattaggagccgggttagtggaacttgttggaacgataatttttattgctgtgttcagaagatgtcctcattgtggtagttttcttaaaacaggttgtaatcgatattgtccacattgtggtaaatatgtggacgagaatgattatatttacttctaagcaatgatcctgtttttaagttgtacttgaaaagactgcgctgtggtttatggtgttgtccgggcagatatgaatatccgtacaagacgcgatgtcaagaaatttttagaaggactctctaccggaagttccagccttcttaagaatgtaaccggtggttatcattaccatacaattgaagctgaatccgaagagattttagatgatattcaaaatgaactcgcagaaaaaggttttctggccaaactgcaggattatgaacctgtagatttctggggcgaagaagaatcaaatacaaacgtttaatgcaatcaaggcgtcagtccggtatttccggaactgacgccttttaagcattgaaaattgtcaatgccactgttttgtcttacatatacttcttcacaatattctccattactttccacttatgttccatatcagagacaagtttaaactgtgtccttgcccggtccaaattctgccccggtctgtgaattttaaaataaatgtctccctgaatataatccataagaaacctcattccacattcataggtcataagcctagcgcccatcggaagcagctttatctcttcctgtgaaagttttccaccacatccctctataaagccattcgcacatgcttcaaaaagctctaagttgaaccacactttatccagattttgttcatcctctaatgctgtacttgctccaatccgcaccgcatctccaaaatcattcatggctgccccaggcattacagtgtccaggtcaatcacgcatattccttttttggtatccttatccatgaggacattattaatttttgtgtcgttgtgtgtcacacgaaagctgatttttccacttctcaacaaatcctgaaagcagtccacaatttcttccctgtccaatacaaactgaatttcctcccggactaaatccgctctaccgcacacatcctcttccactgcctttttaaatctctcaaatctttctctggtatcatgaaatcccggaattgtctcatgaagtgttttcgccggataatccgctaacatactttgaaatctgccaaatgccagaccgccctcataaagtatttcaggattatctatcaaatcatagcttacggtattttcaatgaatacataagctctccaatactcaccttctgagtccacataatagggtttcccgtcttttgccggaatgacatttaatgtctcccgctctggatttccaccgttagctgaaatttttctttttaaaaattcagtgactccaacgatattttccattaattcaaccgggtttttaaaaatactcttgttcatctgctgtaaaatataatgcctttttactccttgttcattttcaaatgtaacacggtaagtattattaatatgtccatttccccatggaatttcttctttatatacaccttcaaaacagaaatttgcagccacttctaattttccgcagagctgttttggataaaaattattctcttccagctttttcaatgcagtcataaccattggtttgtctttcctgtaggtaactccataccacttttctgttgtaagaagaacttttacttctgccttattgttatctaacagtctgctgacaactgacggaagataatattcacatttcagtggattatgttgcagcccctcctgcagaaaatcacgaaatccatactcaacttctgacaaaaatcccttgctaaatccccataaattcatggaaacaatcgtatctcctgccaattccgtataactttttccatcatcttccgtatatgcggcattctctccacgttttacaatcgttgtatgttctattacactgacaagttttccagcaccatcaatctcacagacacctcttgccacacttccattctccgtcaaagtatttttcaactgatatcctaccattgcatactgatacttttcattatcttcatgcacactcagataatcataaatctgcttaaatgcttctcttccataatagtcgtctgcattaatcactgcaaatggtccgtcaatcatatctttacagcttaaaattgcatgcgcagttccccatggctttactcttccggccggaacttcaaatccctccggcagattttccagctcctgaaatgcatatcttactttcataatcttttctatacgattccctatgacattatgaaaatcttccgcattctctctttttattacaaaaataacctcttcaaatcctgcaagataagcatcataaatagaaaaatcaacaataatatgtccatattcatctactggatcaatctgtttcattccaccgtaacggcttcccattccggctgccataattacaagtacaggtttcttcatattctttatacctcctgattaaacagcgtaccatttaatctcatttgcctctattttcaacgcaaaactgcttccatcgccgcgatagataaccgtattctgtggctcgtaggtattatttacaacacagaatttgccattttttacatatgcatgtacttccacattgaaatttgtactaaaccactgatgtaataaactttcgccatgtgtactccacaaaatgcttcgataaagaattctgctgttctcaaagctatatggcagtccactgatatagaccgaacggccctcgccaaattcatgcacagccatctgaacttctttgtccctctgtaccagaatttctgttccctcatacgcaaacatattcttcttgccctctccgaagtcaacaggctttgttgtatctgcaagaataaagtgatttttgtgttcttcccagttatacttatcgtagtttaaggtaaatccggtttctttttccacaccaattaaatcggcaagctgcagataatgtccctgatactggtgtcctgccggttccccgacaccgataaatccaccgccccggtagacaaattcacgaatggctgcggaaataactgcattctcccagactgccccgccggtgtgtgccgtatccccgtccccgacattgataatgacatcaatatcctttaatatatccttatcctttaaaatatcatcaaaggaaataaatttcacatcaaacggtgcgccgcttaacgcctcgataattcccgcgtaactgtaattctgtttctgatataaggcatggtgtaccatatggcagccccagctgcggattttgccccagctgtttaaaacagcaaccttcttcacacagtacggtgttgctccttttgcattctcatacagttcacggaattcattgcacacgctctccacatagtccaaaaactccgggaaatctaatgcaagctttaaatatccgccatatccgatacggtcgattggttttcttaagatggcacggcgtgctgtcacccagttttcctttgcttccttgacaggatctccgccctcatggaaggtgtccgggaaaaagtatggaaggaatcttccttctgtatattttacaccttcaatatcagagatcagacgaagtgtacttccgtttccaacgcttcctaccactgcgtcaagaccgatcgttgcaaactcttccatgaatggttctgttccgatccagtgatcccccaaaaacatcattgcctctttgccgcattcatgtgtgatgtcaaccatctcttttgcaagctttgcaacttccctgcgctggaatgcctgaaaatccttatattctttaccaggtacacggtactgattgttataatatccctggtcaatgatatattccgggcggaatttataacccatttctttttcaaactgctctaaaatataagggcttactgacgcggaataaccataccagtccacatatttttcccgctttaactcgtcaaacatcaatgtaaactgatggaaaaacgtcgtatagcggatgacattgacatatggatgctctgcacagaacttgcgcagacgctccatggaatatttatgtgttttcggctgtcttacgtcaaacgtaatctgatgttcgaaatctttccagtcatttgtcaccgcattgtacatatgtaccggatcccagataatatatgccagaaagcttactgtatattcatgaaacggttctgcctcatgaatacagacgcaccctgactcctcattatattcccactgtttggtcgataccacctgacctgtggaacggtcaacaacctcccaccatcgtttaatatcatctcttgtattgacctgcattaactcatccgaaatccccttcatcagaggaatttgcagttcgctttcaacagccgtataaaatccactcataatataacactgctgcacctcatccgggtttgccttcgcccactcattatcttttctcgtggtgtagtaagttgcataaatctttgccccggtctttgtcagctcttccgggaattctgttccgtcacaatcgcggattgcatctgcaccccagcgtttcattaactcaattgtctctggaaccacatccagatttgtaggaattgtgacacggcctgtatttttctcactcatttttcttcctcactctatttcatccatataattactttcttttcttcttttctgcaaaagggcaattataaatccacaatgccattaataaacagataattccaataagcataattcctaaacctgtcatttttcctgtcataccccatccaaaaacagacaggcttattccggcaataaaaagagctgccattaaaattattctgcattttgtgtgctttttccaaaattccattttaatctcccttctcatcaaccctttaaaccaccaacagtcattccctgtgtcagtttattctgaacacatatatataaaattaatgtaggaagcattactattacaagtcctgcatacataattccatactgtgctgctgactgctgtgcctgcatcagatttaataatcctaccggtaacgttttcggtccctttgccgaactcattagtgtcatggaaatgatatattcattccaaaaagaaagaaaattaaacaagattactgtaataatagatggttttgccattgggaaaataattttccacatcgttgtactataacctgctccatcaatatatgccgcctcttcataatcatgtgccaatgttgaaaaataccctgacaacagataaattgtaaacggaagtgctgtcgcagcatatacgattgcaagtatgaccagattatttaacagaaaacttttcccaattactgatttcagccaattgtctccatctcgcagcatcagaaaaattggaacaacaatataattcacgttaataaaaagaccacccataaaagccgcatttaaagatttgcttcctttaaatttaaaacgtgacaaacagtaagctgccggcagtgcaacaattaaaagaattacaagtgccaaagctgtaaccaatacggagtttaacatgtaatctcccatttttgctgtattccaggcatcaataaagttctgaaaataaaaacccttcggcaaagtccacggatttccataaaactctttattttgcttaatggatgccataaacacccatgccaccggaataataatactgactgcaagcattattaaaactaaatagataaaaaatttatacaaccgttccgcagaattcggattctttttctctctcatattttctctccttaaaactccagtggttcacgctctgtaactttatttacaagtgcagacaatgcaaacgagaaaataaatattacaacacctattgccatactgtatccatataatccggcatccttctgtccatacatatagcttagtgacacttcagaagctccgtttgggccacctgaagtcatagcttttacaaaaagaaatgccatattaatagtagaaataataaaaaatgttaatgttgtacgaatattagtccagatcaacggaattgtaatctgaaaaaactgaacgagcctgcctgcaccatctaatccggcactttcatacaggcttttcggcacactcgccatagatgccatgtacatgaccatatagtaaccaatcgcctgccagatcattgcaataataagactgacgatcacaagcgattcacctttccacaaaatcgggttctccattttatgaaacagtccgataatactgtttagcattccgttctccggcttataaattgcagaaaaaatacctgcaattactacaaccgataaaatattgggaatataaaaaataatacggaaaaaattctgtcccctgattttttctcttgacagaatgcctgcaaaaacaagtgcaaatgcaaaggtaactattgtaacaacaacaataagtaaaatcatgttttgcatggaccttataaaattagtatccgatattaatgttttaaaatttttcaggccaacaaatgtttcattcggtgaatatgcacctttttcaaataacgacatccggaatacatttaaggtaggcaatatcataaacacaaaaaataaaattactgctggtgctatgcataccgccaaaaaaccgcttcgtcctctggcttttttcatactttcacgttcctttcaaacaaaccgtactatttaaaattcggcggacaaaaatcctgtccgccgactcatttttaccactatagcattaaggaaaactaaaaactcttatttcaaatttgcccgcatctggtcacttgccgaaataattccatcaatccactcctgctctgtcatatctcctgataccaaagagtttacagggtcaaagaatacagtacgtacttcaatacccggaattgcttcaaatgatgcaaaattgcccatggctgcctttgctccattatcatagatagaataaaacatgacattatcaccttctaatttatctgcaattcctaataccggctgaatagctcctgcttttgcaaaaatttcacatgctttatcactgtataaatatgagataaataattttgctgcatcctgatgttctgcaccagaaggaatccatgcctgttcaaaccatgtataactataactgtctcctcccgcttttaccgccggaagagctgtcataccccacttaaatccatctgcacgaggagcatctgccatttcaccgacaatccaggttccatttggcatgaaaattgccttattatcaagtactaactgctggttctgtgtaaaatcctgatcatttgcctgtgccggtgtaataggatttgtgtactcagctaactttgcaacaatatcaaaacatgtctgtgcttctggtgtttcccagataccttcttcataatttgtagccttatcaaagaattcaggtccgcctgcggcatacattaatgcatagaaaaatgcatcaaaatatcctgttgtcggatatgtaaataaataaattccctcttcttttgctttatctccaagttcccacatttcatcccaggttgttggaacatcccatcctttttcttctaaaagacctgcattataaaacagaccacatggggaataaaacattggtgcaagatatgtctttccatcaccataaggattcgtcaatgatgtatctgtaaatcctcctgcaatcttctctgaaacaagtttatcttctcccggaactttcatagataagacatctgtaatgtcagtaatcatatttcccttaataaactgttccgttaacgcagcttcacgtcccgtggccagatgaataacatccgggtattcgcctccctgcatggatggtcctattacatcctccaattttttatctgttgtaagttctacctgaattccggtttcttctgtaaatgcatctgtcacttcctgccacatttgcgaaccataacctgtctcaatcgcagctacactgattgttgttccagcataagctgcatatggatcatctgatgttgtctgtccagtttcttctgtcttgctgttatctgacgcagaattctccgttcctgaatctgtaccgcaccctgcaaataaagatgctaccattaccatactcatcattgtacataaaatttttttcttcatagtaacctcccatttttgttattttttactataagttcttatgtttccttccctacatttgttattatatagtacgccatctctttttcctatccatatattgctctatattttataattcttgctttattttaaaaatcttgttattttgttttttttattgtatactaagtacaacatcgttccattttgaccaggaaatcattgcaattataacatgaaaggactgtattttccatgagcaaccgcaaatttaatctggataatgaggtacagccggaaatccatttccgcctgctttccatatcagcatccaaatttgaaaatgactggacttcgtttccccacagccatcattttacggaaatcttctttattaaagacggcaccggacgcatgctgattgaaaatgaatctcttccggtctcctcaaacagccttgtcgtgatcggtgcacaggtaacacacacagagttttccgatccggaaaatccactggattattatgtgctcggggtggaaggattaaaactgaatactgacaaagaaccggaatacattcatgtcccggcttttgcaaactcgccttttatccgccagtgttttgaaaatatcctgcgggaaatgcataacaaacaggatcgctacgcagagatctgccagcattatctggatattttaattttatatttctgccggaaagaccatgtatcctatgaagtggtggatgcgcagaacagcagccgcgaatgccacaaggtaaaacgctttatcgagcacaattaccagagcatgatctctctagattcgcttgccgaaaactgcagtctctcaaaatattacctttcacaccgttttgcagagctgtacgggaaatctcccatcgcttacctgaacgaagttcggctggcgtctgcgcgtgacctgctgctcacaaccaatcacagcatcgaagagattgccggatgtatcgggttttcctctaccagctatttttcgcagtccttccagaaaaaatttcatgaatcgccacagcagttccgcaaatcccaccgtgtcaggacatgaccatgtttcattttttacataaaaaaataattttctaaaaatttccccgaaagaatatcatatctttcggggaaaggaaatggatttttattcttccgtttctggaatcctggtggtacatatatcagattattcagggaaactatgcctatcagccggattggaaagagaaaaatgatttacggtcttcttataaaaaattttatattgctgtccttattggttttcctttctctttccctgaatctattctgtgttcacttgatgtttcgtggaggaaaatacaacccatctgaaatttctgctttaaatgtttttacaatgttttggactaaccatcgtgcatattctgatcacatgtattatctatggcattatgggtatgttttgttgtgcaacatccttttatttccgcaaccgaaaaacggtatattttgtaagtatatttttctggctgattgaaattttaaaacctggctccctgcttcgcaccaactctattgcttttttatgcaaatatgctattgtaaaattaaatatatattctggaaaatattatgttgccaattaactatttacacgaaaggaaaaccatgattaagagtaaaaaaaatactataggaattgtgaaagatacaatttgtaaaatcgacctgaaaaaagcaaatacaaactgtcttagccttatgtatgaacccccaaaaccaaagtgcacttggtatcaacctcaagatcaacattatttacattcaaataagaaaggtggaaattgattataaaaaaatattaagtataattttagttatggtattcatgattactttcaataacaacgtatatgctgcagaattagataatatgcaacataacgaccaagcatatgtgttaaattcattttcaggaaataacttggaaagtatttcagtgagattttaaaatcacagaaaatcaaattgaatttgaacagtttggaagaaattttttattttctatacacaaattaaatatggatacaagtgacgggaaaaacattccagatgccaatttttatacaggtatatcttctactatcttaaaaacaaatattttatttgcctacaaatacaattttattgtcctgccagaaattaatatcgtattccagttcaatatgcttggagcgccgcattctcctttgaggaaacacaaacgctcttaaaacaaaccggatatccccacggaataagaggtttgcgatgttcactatgcttccattcctttaaataatccattatttttctatacatcactgcacctccatgaaatgtttacttttggcatatcaattattcatgtaaaaatcaacgtatttttcatttgtttttacactaaattgcatgaattatttctaaaattatacattatttaacacgattccccgtattacgatcaaataattaaaaaagaaaccgggcatccacgttgtaaacatgaactcccggttccacttttttagttaaaatttaaatactgctactccgtaaggcggcagcttatatccgatcgaataatcccgtccatcacaaggcttcttttctgccttgtaagacagcggacgcttcgtatcttctgtgtcggttccaccaaactgcggatctgcactgtttaataccagcttataggtatgtctgcccggcacacctacccgataatcgtcacgctctactggtgtgaaactgatcacgaagagcaggttattctttccatccttactctttcgcacaaagctgaaaatactgcgttcatagtcgttggcattcatccactcaaatcctgcccaggtcgtatcctgctcgtacaggcatggattcttacggtacaaatgaagcaatgcctttacccaatcctgcatatgtttgtgtttcggatcatccagcaggaaccagtccagttcgcgcttctcgctccactcacgctcctgcgcgaattcctgtcccataaacagaagttttttgccggaatgtcccatcatgaatgcatagccagccataaggtttttaaacttatccccttcgagtccgggcatcttgttgagcatggagcatttcagatgtacgacctcatcatgggataataccagaatatacttctcactctcattgtaactcatggcaaaggtcatcttgttgtgattgtccttgcggaaatacgggtcaagcttcatatagtcaaggaaatcatgcatccagcccatgttccacttgtagctgaaattaagtccgtcatcctctaccgtacccgtcactttcggccatgccgttgattcctctgcaatcatcacagaacccggatttcttccgagaatcagcgtattgatgtgcttgaaaaactcaatggcttccagatttttatttccaccataaatattcggaacccactgtccatcttccttcccgtaatccagatacagcatggatgcaactgcatccacacgaagtccgtctacgtgataattctcaatccacatcagcgcacttccgatcaggaagttcttgacctcattctttccgtaatcaaagattttggttccccagtccggatgctctcctttgcgcgggtctgcatattcataagttgcagtaccatcaaactctgcaagtccatgcgcatcttttgggaaatgtgccggcacccagtcaaggatcacgccaatcttgttcttatggcattcgttgaccagatgtgcaaaatcctccggtgttccataacgggaagtcggtgcataatatcccgttacctgatatccccaggaaccatcgtatggatactcggaaatccccatcagctcaatgtgggtataccccatctccctgacataaggaatcaatgtctttgccagatcgcggtaggaataaaatccatcatcgtcccgccccggatgccgcatccaggaacccggatgtacctcataaattgccatcggctgctcatatacttcctctttggaaagtttttttctggcattcatccattcgctatcagaccagagaaaattggaaatatctgtgacaatggaagcggtctccggccgcagctgtgcataatttgcataagggtctgctttgtacagctttcttccgtcctgcgcgataatcaggaacttgtacatacagccaatctggacgcccggtacaaacagttcgtatacgcccatcgtctccggtgtcacacgtttcatctcgtgggaagtttcattccatccattaaattccccaatcacgtatacacgatccgcatgcggtgcccagacatcgaagcatactccctcttctccttcaattgtcattttgtgagcacccattttgcgataaatatcataatgtgttgcctgtccaaacaggtaacaatccatctctgtaaaattactcataaataccctccctgtcttctcttatctatcttactcgaaatccttttccgttagtacaattctgtcatcatccgtataacggctggcggtcagaatactgatagctttctttaaccctccatgtgcctcccggtgaattgcttcatccacaatatctttcacctctgtcagtgttgtcgcctgatccagtctctgaatattgctgatccggttatacaatgccagaaccgccatatcatcaattttgtatccaagttccctggaataagaacgtgcaaacgtgaccagctcatcatttgtaaaaatcggaactgagatctgttcactgaattttttggcaaatgtttcattctgcgcaaataatctcttgatgcccttggatgtgtcttcgagtataacgaaaagaccactctcatctgcgtccagcaatccggataactccgacacggtctttttctccatatctcctgcctgttcaataatcaggcatcctcctgccaccttatccagcagcccgccgacatttttctgattcaatgcttccgcatggatctttccaatctttccatccaaaaccccggtctcctgctgcaggactttgatcatgctggtggcaagtgttgtttttccacttccctgtccgcctttaattacgagattccccctcgatgcagtttccttatttttcagatgggacgaagcaactgtcaacgctttgcagagctgatcctccatgcccttcaccggcataaaatacgaaaaaatcgctttctgttcatcggtcagttctacaagcggaagattctgtttttcctcttttcccagatccaccggtgtgtctacctgtggaatatgtactgtttttcctttccaggaagagcgatctgtttttcttcttacaaaagcaaactcttcttccctctcctgtgcaagtgttggtttctgtggtagatcctcgatcggaacctcctcaaaatcctttttctttgttgtatctgattctgtctttgtttccatttcttctacaccacgattctcatttaagtttttgtcatcttctgtcacatcggatgtctcttctgccggtttctgtgcggcagcttccgtcttttttttctgctgggaacgtaccatttcttctaaagatactccctctggccaaagttcttcggcatctgtatccctggcaggctgttcctcttttttgttctcttcctcttcttcctttcgttcttccggctcattcgttgccggcggtgtttccctttccggcgtctgtggtggtgtttccgtcgtttcctccacaatatccgccttctctgccagtaccgcatccagttttggcaatactcctgtcaggcggtccataatatcgcctgcctcctgcagtgcacgcgctttggcggattcgagtttccgctttctggcatcttctaatgcagcttccgcagccttgcgcattttctcccactcactcagcacttcctcaattgtcatctggcctgtgatctgatgctcaatcatgtttttctcatttgtcatcatgctcatctgaccatcggagtcttctcccaacaactctttgaaatttgtcttgagtgaaccatcaatctcctcatctgtctcaatgtgccgtgtattctgttccggctgtgcctcaggcttttcttcctccatctgcattttcagataagggacatcttccaccatacgattgatattgtccagcgtatccgtgaccgtctctttttcggttgcatccatgatctgctgcataccctttgcaatttccgcctgaagattgacggtattaaaccgttctgtgtttacttctacttttggaattgcgaccggatcatgcacggtctccccggcacgcgccatctcctccacatcaatgtgtgtcaaacctgctctgtcatcttttgcctgacaaaacgaccgatacttttcttcctgtgttttcgtcaatggctgatacagcattttcagttccaatgcacgctctacatatggcccatctccaaaccagagaaccagctcatcacatgcatcaatacacttctcactcatccctgctttgtgatacagataagcaagctcatatgcccactcttccgtgtattcctgctccttgagttcttcaagaatcggtatcagttcttcataagaagccccctgtgccttctgtatatcatagcgaagtacatatttaagggtgtcatgaggcgcaatctccacaaactcatcgtaataatcctgtgccgcctgaaaatctttcatcttgaccgccacttccgcaagacggtaaataatcattcttccgatcggcgagcgatcatatgccatcagcaaaacttcccggctctcctcataacgctgtactttttcgtacacttccccagcttttaccagaccatttacatttttaaccttattccaattgatggtatctgcaatatctgctgcctcatcatatttctcttccgcatagcgggatttcatctgatcaagcttcagattatattcgtatttgtccaattgttatctccttaaagtatccccaaacaggtctatctgtctattttcaagtataccataggcggcaattagtgtcaaaaaataatccgaaaaaaagagctgcacacaaacgcgtacagcccttgaaattactggtttttctttgtttcgtctttcttcccggaatcttttaaagttctctttttcttttgtttttccccgtaatatatgatcgcaccggttgcctcattcacaccggccgcctccacatatgccgccgttacggttgtaagatttttctttcgtatgctgtggtttaccagtctgcggataatatagtaaatcatcgcaaacaccggaactccaagcagcattcccagaaatccaaacagtccgcctccgatcagaatcgaaaacattacccagaacgcagataatccggtggaatcacctaaaatcttcggtccgataatatttccatccacctgctgcagaacgataataaatatcagcagatacaacgcatgcagcggactctggatcaccaccagaagaagtgtcggaatcgcaccgataaacggtccaaacaccggaatgacattggttactccaatgataaccgcaaccagtatcgtatctgggatatgcagaatcagacatccaaaataacagatcacaccgatgatggcagaatctataatctttccaatgatgaaaccaccaaatacttcatctgccttgtggaaaacttcgataataatgtttccatgtttcggtttaaagatcgcatacacaatctttttgccctgtcccaccaggctttctttaatggataagacataaacaacaacaataattccaatgatgaagtttaatatggatttgaccatcgtgattacgccggaagtaatctgcagcagatattgctgcatctgtggaagcagatcgttcgttgcccagttttccacataatccgtcagctttgtcagcatatcactgatggtatctgtcactccataggctccgagttttccgcttttcaccatacggatcaggctctccacattaccaggcagtgcttccaccagcccggtaacacttgataccaccgaaggaacaattgccgcaatcaaaagtaccagaatcaccagaagaaacaggattgccccggcaatggacaatccacgtgccactttagccgctgatttttctgatttcattttttttttcagaaacggcagccagtgccgctcctgaaatttcataaccgggttaagcagataagcaagtcccagtccgataataatcggctgcaatgcacctgtaatcagatgccaggtatctgcaacccccttgtaccggagcaccagaaagaaaaatacggtacaacaggcaaaggtgagaaataccatcaatccgattttaatcagaagaaccgtctgacgcatgccatcctcactctgtttgatctgttccatctgtttttgtttttccacgtctgtcatacaagatctcctatccgcggtaataattgatcaggcagcctttgagaataatatctttctcatccggtgtcagttctcccatacgcagggtaaatggctttaaagcaccatcctttaccacatatgcctcaaattctgtttttccgtctgcgatcgcctcacggatttttggaacaaacaggtaatccagattgtggaacggaagctctccctgatcaataacaaacgggatcataccccagttaatcaggttggaacggtatctcttggtcgcatattcatttgcaatgtttgcccatccgccaagtaccttctggcaggaagccgcctgctcacgcgcagaaccgtctcccggttttactgcaaaaatcgtacttccaaaaccaacgtttgagcggttgacatcggagaacgttgcacggatggtatccataaccggatgaatctccggaagtgcatctcccggacaggtatctgcctcgacagccttctgtgccttctgtacttccttggcacgtccaacatattccggatcctttctggaaagtgcaaactctgccagtcccagtgggttggaacggaaagaggatgtctctccggaaggaatcagctcgtccgttgtggtcaccggatcgtgaatctcggaaacaactttcagcacaagattctccggaagcgggctcatagccggccagtccttgatatttggtccaaactggatctctacgtccggatctgccacacccttgctgtcaaatacacggttttcataaatggtcttatcaaagaagtatttcggcttgctgtagtttacatcaatatcggtagctgcggtaaggaatcccttatttgcagcggttgcagcgatagaacgcgcatccatcagtgctacggaagcaacctgtccgttttgtaccttagatccctcacgattcgggaagttacgtgtagaatgacggatagaaaatgcattatttgcaggtgtatctccggcaccaaagcacggtccgcagaatgcagtcttgacaatggcacctgtctctaacagattggcaacggcaccgttcttaacaagttccatataaatcggagtggaagccgggtaaacactcagcgtaaactcgtccgctccaatggaagtgccctttaagatatctgctgcatcgcagatattttcaaatccaccaccagcacatccggcaatgataccctgatctacatacagtcttccgttctttactttgctctttaagtcaaggtctacttttccatcaaagcttacctgtgcacgcttctcacagtcatcgagaatatccatcaggtttgcatttaattcctcgatcgtgtatgtattgcttggatggaacggcatcgcgatcattggcttaatctcgcttaaatcaagttcgataaagctgtcatagtatgcagtttctcccggattcagttcctcgaaatctccggttcttccgtgaatctcatagaattccttcacctggtcatcggttctccagatagaagacagacaggttgtttctgttgtcataacatcaacaccgatacggtaatcaacactcagattggatacgcccggtccgacaaactccatcactttattttttacaaatccgttggcaaatacttcaccgataatggcaagtgcgatatcctgcggtccgacacccttctgcggggtacctgtcaggtaaatgccgacaactcccggcatatcaatatcgtaagtcttattcaaaagctgctttacaagctccggaccaccttctccaattgccatggttcccagtgctccgtaacgggtatgggagtctgatccaaggatcatctttccgccgcctgcaagcatttctcttgcaaactggtgaataactgcctgatgaggaggaacatagattccgccgtatttctttgcacatgtcagaccaaacatgtggtcatcttcgttgatggttccaccgactgcacacagactgttgtgacagttagtgagtacataaggaatcgggaacttctcaagacctgatgccctggcggtctggatgatgccgacaaatgtaatatcgtgggaagtcagcttatcaaatttgatctgcagtttttccatgttgccggatgtattgtgactctttaaaattccgtatgcaatggtttgtttctttgcatcttccggtgtaacagtctttcctgtctttgcattgacagcagatgccgcttccggtgaattaatgacaacatccctgccgttgaccaggtatgcgccgttctcgtataacttcatagtttcctccttgttttcgaaatcatggttaatggtaattatataataaaatgtatttttatgcaacgactgcaaacgtaatggatgccgcaaacagatcgccatctaccagaattgcaaactcaccgcccatcagctgtgtaagattctttgcaatggacagtccaagaccgcttccctctgtcgtgcgggattcctctcccctcacaaaacgctccgtcaggtctttcctcgccgctccctgttccggcagcggatttttcgaaatatttttgatacggaaaaccgcatggttctcctctacttccagatctacataaaccctggtattttcgagtgcatattttgccgcattggtatacagattttcaattgcacggtagagctgccgtccgtctgcccggatcatcaccgaattgtgcggcagtttcgtcacaatggtcagcccccgtgcctcaaaacgttcattgaactcaccacccgtctggtacagcagttctaccagatcaatggtctgcatatccagctggatatttccggaactgatctttgatgcttcgaccagatcctccgtcagctgtttcagccgctgggatttttcatccagaacccggatataattacgtgcattttcgttttccaggttttcacgtttgagcagatccacataattgacaatggaagtaagcggtgttttgatatcatgggaaacattcgtgatcaggtctgccttcatccgttcattccggatccgctcctgaatggcttcgctcagccctgcacggatattattcacagaagctgcaatgcctctttcctgtccgtgaaactgttccacatccagtgtcgtatccagtgcccctgccgcaattttttcaattgcatgctggatctcatatctttcgcgcgccttacgcgtacacagtctgggattctgtccggagataaacacccgtctcaggaagcttcctgcctgatagatcagactgtatgtcagaagggtattgtttttgacccgccggacaatgctcaaataaaacagcaggaatacaacatcgaccagatacccgactgttccgaccgctaccatcagtccggacagttcaaactggatgtcatggagatttctccccaaaaagagcacaagataaatgaatgccacaaaaagtgccatctggatatccgtataaattttatcaatccaggtcaggtaaatggttgcatcctcctctgaccggcgccctgcaacacctgtcagataggcaaggaatacaaagcttccgaccatgccgatcaccataaacaggctgagaatacccagccctccgatatgtctgcgcagattgtatccgatcccatagattccgcaaagcatcataatcagaaacatctgatgcatgacaatggctgcgcccttttttccgctggagaattctttcatagacagctacgcccccgcttcgattttatagccgacaccccagaccactttcagataccgcggttctttcggattgatttcgattttttcccggatatgccggatgtggacagcaactgtattgtcagcgccaattgcttcttcattccagatttcctcataaatctgactgatggaaaatacttttcctttatttttcatgagaagcagaagaatgttgtattcgatcggagtcagtttgacctcttccccatctaccgtaactttttttaattcatcgttaataaccagaccgccggcttcataaacggcatcaccggaaggagtgctcgaaagtgtggtataacgccgcagctgtgacttcacacgggcaaccagttccagcggattaaacggcttggtcacataatcgtccgcccccacgttcagccccagaatcttatccgcatcttctgtcttggcagacaggatgataatgggaatgctgcttgttttacgtgcctggaatgtcgcacggattccatccagtttcggcatcatcacgtcgatcaccatcagatcaattttctttgtgcgaagcatatccagagcctgttccccatcatatgcttttactacctggtatccttcctgaatcaggtaaatctcaattgcgtctacaatttccttgtcatcatcacacaccagaatcgtcatgcggatgtcctcctatcaggttcttgatcttgttctgaaagccggcggatttttctttttcttctgctgcttcctgttcttcctgttcatctttccacttaaaataatcagcatccagattcacacgcagttgttcttccagctgctttaactcttcatcgtcatcttctaccgtaaccggtgccggaatctccggcttcggcgacagcttctttggtttttccaccggcttttccactggcttttctactggttcttccgcaaggtcttctaccggttcttccggtacggaaagtcccagcttatccagatattcctggttaatcttaatatcggtctgccggtttgcgtaaattgctttttcttcccgcttctcctgctcgtactccggtcttccttccatcttttccttctcaatctcgcggttccgttcctcgatgatctttaagtacttttcggtatcaaccagatcctgcagctgtcctttgagttcggatttgttggttcttaattcctgttcttctttttccatctgttctttaatttcctgatagatggcaccgacctttttgtccgcctcctgcatgatatcctgcatacggtttaacgtttcatccatatacatgacagatgccgcataaatgtcctctgccttacggcttgcatcccagatgatctgatctccctttttatggaaatcgcgctctgccttgtcacggcttcgaatggtcagctcgtattcatccataatctgataaatacaggtatttaattctgccagcagatcaatcacctgctgcttatctatgataactttactcggctctttcggatacggctcactcttcgacagcaaaacgtgaagactgcgcagtaccttttccgtattgtcctgtgctcccatgtgtcctgattccttccataatagataattccgtactttctattataatcaatccccctataatacgcaatattttagattcttaggtttttctaaattttattacacaaaactttattttttacagacacaaggttataataattttttaaaaatgaacctgtttaataaaggatatatactatgaatatcgtcaaaacttacggaaattatattaaaaaatatgccggcacccacccggcagtttcccgcaaaatgattgacatcggattacatctcgaacagttccggactgaacattttgcagaaaaaacaatgccgaaagcatatcagaagctgaatacgctcggcgtaaaaaatacgcttcatgcgctggaatacccggaatccacggtctggtgcaatctatttgcacccgtggaaattttccagtgcttcggactcagtgcgctttccatggaatgtctttcctcgtttctctcaggatttacgtgtgaagactattttatcgaccgcgcagaaagccggggaattgcctccacactctgttcctatcacaaagattttatcggtgccgtagactccggaattatttcacctgccagactcggtgtgacaacttccatgatttgtgacggcaatattaacacattccgctatgtcagccggcacacggatcttgacacttatgtgatcgatgtgccggacagctgttctccggaagccgtggaatatgtgaccatgcagctgaaagaactgattcagaaactggaagcactgaccggaaaacgtctgtccatggatgacctgtcggaaacacttgcccgcgaaaaccagtcgaaagcttattacaaagagtttttaaaactgcaggcagagcgctattatccatcgacactgactctgcagatgtacatgctttttgccacccacttaaacatcggaacaccggaaacccttgatctgttccgcagttttgccgaggatatcaaacaatatccgaaatatgacggcacccggattgtgtgggtacatctgcttcctttttatcaggaaacactcaaacactattttaacctgaacagagattaccagatccagtgtaccgaaatgaacctggattacatggacgaactggataccacccacccactggaagcacttgccactaaaatgctaaacaatctctataacggtccatacgaaaaaaaagcaaatatggtcgtaaaactggcaaaagaaatgcatgccgatggcgtaattaacttctgccactggggctgtaagcaatctgccggcggagtattccagcttcgcgaaacactcaaggccgcggatattccactgctcgttctggatggcgatgccatggaccgccggaacagccatgacggacagatcaaaacccgtctggaagcttttctggaaattctggataaagagaggaattcatcatgttaggttatgtatgtaaatatacccccatggaattatttgaagccatggacacggaaatcacacgtctggaaccatccgttacggattttaaccacgcggacaccctgatgcacgccaacatctgttcctataccaaggccgtgctggaagatgtgatggaacatgactatgagggtgtcattctgactacctgctgcgacagcatccggcgtctgtatgacacattaaaaagccagttcccggataaatttttctttttgctggatattccccgcaaatttaatgattttgcagtgacgctctatgagcgccagctaaaacaaatgctcaccgagtacgaggctttctctggaaaaacactggatctgaaacgttttgtttccatgatgcagaacaaagcggctctgaaaaaacaggaaaacacccgcatgtctgccagcgcagcgtccgaaaaaggaaacggacagaaactcaatattggtatcatgggtgcccgatgcaacaatgaaatccgtcagttgcttgtcgaccgcggtgccaatctgctgtttgatttaacatgcaccggacttgcacgtgatttttccattacagagaatcaggtgctgcattcctatgctgccgcgctgctaaaccagattccatgcatgcgcatgttaaaagcagcgaaccgtgaacattttcttgacggttttaccgaccgcctggatggaattatatatcataccgtcaaattctgtgactcttattcttacgagtatgcggatttccgccagcggctggatctaccgattctgctggtagaaaccgattccaccagacaatgtgccggacaggtccggacccgtgtggaagcctttatggaagaattgaaagtgaaaaaaggattgtccctgaccggggaaaaacaaatgataaaaagaaagggtgatactgtgtatacattaggaattgacagcggctctacctctacaaacgccgtaatcttagacgaaaacagacagatcaaagcattttcagttgtccgcactggagccaaatcttcccagagtgcagatgccgcactggcagacgttctgaaaaaggccggacttgaccgggaagatatttccctgattgtatccacgggttatggtcgtgtcagcattccatttgcggacaaaaatgtaaccgaaatcagctgccacggaaaaggtgcgcatcttctcttcccggacgttcacacgatcctcgatatcggcggtcaggatagcaaagccatccggctgaatgacaatggagaagttgccgattttgtcatgaatgataaatgtgccgccggaaccggccgctttctggaaatgatggcgcgctccctggaaatcagtatcgacgaacttggtccggtatccctgcagtccaaagaaaatattgaaatcagcagtatgtgcagtgtttttgctgaatcggaagttatctccctgatcgcacagaacaaagagattgctgatattgcacatggaattcacaaggcaattgccgggaaagcaatgtccctcttgaaacgtgtcggtctgaatccgggatatatgatgactggcggtgttgccaagaatccgggtgtcgtcgccgtgctggaggagcagcttggagaaaaactacatatctatgaggaaccagagattgtcggtgcactgggtgcggcattgtatgggcttgaggagatcctataaaccagaaaataattttacaacaacaatcgtgatacgatttattttccaatcgtatcgcaattgttgtttttctgttactgttataaatgatttgacttctgtccgaaaatacgatattctgtttttattggatttataaaattatataccataattacttatgcgatacatcgccattgtaccgcaatcaccactcatggagagcatttcgctcataaatttccattagaaccacaatttcatagaactggtcataacagctctgttttttatactttctatattgtaacagcagatgcttatgatatatactaaaggaaaggtaggacgctacatggggaacactgacattttgacaacttcgttgccagatgccgacacagaaaacacaacagaacacagcacgattttcgacgatgtattccgaaccatcgcgcaaaaaatgccgcagcttctcatcccgctgatcaacgaagttttccatacttcttacagcgaagaggaacagtttgaacaattgcgaaacgaacattacgaaaagtatggaactgtgatcacggactccattatccggattggcggacatatataccatctggaatgccagtcctctaaggacaggacaatggttatccggatgttcgagtacgacatttcgattgcacttgaacatgcttctttgggggaacatgcaatttgggagattgcgtttcctcaatcgtgcgtgctttacatccgcaatcaccgttcgcttccggattatcacgaggcaatcgtaacgtttgcagatggtcagaaagtacgttaccgcgttccggttttgcaggcgaaaagatacacggtggatcggatttttgaaaaacggttgctgattctgcttccgtatcatatcttacgatatgagcattttttgaaacataatggaacaaattcgaaaaaagtgaagcatctgctggacgattttcgggagatcaaccgaaggttagaggacgcgtccgaaaaagaacaaaagtcacatctttatatggatatgattgttttaattgagaaaatcgcagattatattatcccagaggataatgctatcaggaaaggattgggtgagattatgggtggtaaaattttaaagttacgatccgaggagttgctggaacagggcgaagccaagggtagaattgatgcaattcaaaatatgatcaaatataacgttccaaaagaaaaaattttactggattacacttcagatgaatacgaagaggcattaaattctatgccagtgaaagtataaacacacaccaaaaggggctccaaagagcaatgtcattaagttaagaattttgacataattataaaacacatcatatttgcaattgtttgataaatatgatgtgtttttttcttttatctattttgtagcacaacaaaaagacagattgtttatctgtcaaaaaaaacttataattatctatgattaagccactctatatagaaagcttacagatgcctggggtttgactttgcgagggtcttttcgaccaggtcttactggtaatacatgcttttctattaggttaatcacatcaggtggactaagattgcgtttattacggagatattctctacaaatataaatggcgattgtaaagttcacctgttttgttttatcattgtttttcatttgttttattacatgtgttgttattaattcgcaatagttatacaaaagtaatcgtgcatatatttcttgtttaataaaatctggttttcgtgcatggaaacttgttaatcctatggcatattttaattctctgaatgaagtttctattccccatctcaaatgatagatttcctttattttttttacatcaaaaat

SEQ ID NO: 985 - DNA, 7669 bp, Unknown
  gut microbiota DNA sequence
agacattcagaaacagttacaacagcttcccgaagggaaactgatctgcaccagatgtggtaatcgaaccaaatggtatcgcagtgatgggcataccaaaacatatattcccaaagaccagaaaccttatgcctctcagcttgctatccgacgttatcttctggaaaagcaaaaggaatatcaaactaatttagatgctttagcttattatttccgtcatgacagttataacagtggcaaagcagaacaattactcacttatgatagtgcttatcattcactgctggcagaacattttcagccagtatcccaggaacttcaaacctgggaatcatctccatataacaaaaacaaaaattatccggaacaattaaaacataaaacatgcaaaaatgaatttatgcgttccaaatcagaagctatgattgccatgagcctttatgtgcaaaaaattccttatcgctatgagtgtgaattaaaactcggcagtattacacttttccccgattttacgattcgtcaccctgaaaccggagaaatattttattgggaacactttggaatgatggataaatccgagtatgtgaaaaatgcatcagataaaatttctttgtatatgaaatatgggatttatccaaatgataaactgcttgtgtcctatgaaacgcaaaagcagccactttccactgagcagatccagcgactattacaatttcatttcgactgccagtttcaataacaaattatttctaaaggtactgtcgcattgaggcatatcaatagcaactgaaaatcggtaattcatttctatcttttgcaacattatctatatttgaaggcacgctggtatctatagtattaaaattacttgctcaggtgacatttatgccttatttcacgcttcaaatcagatatttgtcacctatagtctaaaatcacatcaaaagataccgctttttgtccaaaagcggtatcttttgatgaatttttctaatatagagactaaacggtatcctgctcatcaatttttttactatagagaccaccgtggtatcttttttcatgtttttacttctatagagaccgccgtggtatctttttcatgtttttgcttctatagagactaccgtggtatccttttcatgtttttacttctatagaaaccaccatggtatccttttccatgttttttcttctataagagaccacgcaatatcttacatcatatttctacctatagaaaccatgtctctagccttccagctcctcaagctgctgggaaagtgcctcccagttttccatatccgccatgatttcttcctcgagcgcatcgatttcgccctgaatctctgtcagcttggaatagctggactgatattccggccgcagcagttcctgttttaaagcgtccagtttctcctctttgactgccagctcttcctcggccttcttcacttttttttcaattttcgagcgctccttgcccggattgtaatacgctttcttaccaccggtttcctgtgtgcctttgctctgctgaccagcaccgttctggctgattgcaccgcctaacgctgcaggatttttacgataatcatccccggattctgccgcttcacgatccagtttttcctgatattcctcgtaaccaaactgatacagatgtgtcgtgccgtcctcaaaaacaagcagacggtttgctactttgcgcacaaaataccggtcatgcgatacgaagatcagcgtgccggagaaatcttttaacatactctcaagcgtttcttttcccacaatatccatatggttggttggctcatccagcaccagcacattcggtcgacgctttaagatcttacacagtgccagacgcaccttctccccaccggaaagcatatcaatatttttaaatacatcctccccggtaaacataaaggctccaagcgcattccgcgcttctgtctcggtcagattcgggaactcatcccagaaatcatccagcaccgtcttccggctcgaatacatcgccatctgctggtcaaaataaccaatctgcacatttgttccaaaattgtactctccggccagcggggcaagctgtcccaccagggtttttaaaagtgtcgatttccccagaccatttccaccgaggattcccagcttttccccttttttcagatcaaaactgaccgtagaaagcggatggtcatatccaatcgcaagatttgtcaccaaaagcacatcatttccggtctctttgtccggctggaaatttgcatggaatgtccgggtatcgaaacgatccggagcttcgagttttaccatatgttcaatggctttctccttggaatgcgccatggacaccttggttggtttatttttaaaccggtcgacaatacgctgcagtctggcaatttccttctgctgcgcattgtaatctttcatcatcttattgtagttttcttttttccgctccatgaaattggagtaattgcccggataacgggtcgctgtgccgtactcaatctcgtacaccacgtccaccacattgtccagaaacatacggtcatgtgataccacgaccacagccttcggataatttttcagatacgtctccagccactcgatcgttgtgatatccagatggttcgttggctcatccagaagcagaatatccggcttgctcaaaagcagcttgataaaggcaatctttgtctgctgtccaccggaaaactcggacagcggtttctttcgctcttcctcggaaaagccgaacttacggatgattacatcatactctttttcaaaatagtatccgccgtcttccttgaatttttcttccattgcggtataacgtgtcacggcctcttcggaataatcagtctcaagtgcctgtgccgcagcttccagttcttttttccggcgctccatcggagcaaagactttacgcacttcctgctcaagcgtaacggaaggatcttcaaacgcaatctgttttaagtaaccgatctgcggattgcctgcttttgcaataaaaatatcctcatcactgtctcttttgtccagctccacatccccgtggatcagctttaagagcgtggttttgccgcagccgttccgcccgacgactgcaattttttccgtatttcttatttcaaaattgatgtcatgcagaatctcttcatcggcaaaagagactgctccatggcagatctgatataacatgttttctccttttatttaaatgcatccggctgggaagcaagatagctgacaaactgctctgccgtacgtccggaaatgcctccatgactcaattcccacttgttggcctctgcacggagttcctcatccggtaaggtaacccctgcacgtcttgccagatgcaaaacaatatcaaagtattctttctgtgtcggcttcgagtaattaatggtcacaccaaagcggttcaccagagaaagtttctcttcaaccgtatcggaatggtgacgatcattggaattatcctgatcgtttcggtcattccagctctctttgatcagatgccgccggttggaagttgcataaatcagaatattttccggtttggtttccacaccgccctcgataacagcttttaagaacttatactcaatctcaaattcctcgaaagaaagatcatccatatagatgataaaacgatagtttcggtttttgatctctgcaatgatctcggaaagatacttaaactgatgcttgtagatttcaatcatacgcaggccgtctttgtaatactggttgacaatggctttgatactggtagatttaccggtaccactgtcaccaaacagcaatacattgtttgctttctttccctgtacaaacgcttccgtattgtctaccagcttctttttctgaatctcatatccgaccagatcgtccagcataacggtatccatattgttgattgcacgaaatgtaaagcttccctgcggtgtatcatcaatccggaatgctttgttgagaccaaacattccaacaccgtagtctttataaaaaccagtcactgcatcaaagaattctttttcatcctttgccgcctccagttttttgcttaaagagcggactttttcgctgacatttttgttgtacatcagatcctttttatggatggccttataattggaaatctggctgaaacagttgattcccagatctttttcgattggtccgaaatcatagtcaaacaaatctttaaaaatacggaaatcattttccaccagttcattgacacttccatcactggctcccaccttttcacaggtcatgctgaaaggattttcactcatcataaggaaaaatgtcagataattatgccacagattatcatcaaatccataatctgttgccacttttaaaatccgttttacctgcgtattgatatcgcggacaagtccggttttattatattcaccggtctcatatttcccgaatacttctcccatctgtgcaaggattgaatcctcgtccaaatctccatacatcagtaactgtgatatttcctgatacattgtatctcgcctctttcttttctcttcctatttattttacctatattacacgaaaaaagggactttgtaaaccaaagtcccctgtatgcagctaaaaagctactgtgatcgttgttccttttcccggctcactttccaaatgaagtaccgcatcatgcagttccacaatatgcttgacgatagcaagtcccagtcccgtaccaccggtctgtttggatctgcttttatcaacacggtaaaaccgctcaaaaatacgttcctgctggtcttttggaatcccgataccattgtctgccacagaaagcatcggctgtcctttttcatagtacacacgcacgtgcacctcaccaccttcattattataacggatcgcattctgacacagattttccacaagttccgaaatcatgcccctgtctgcccgcaacatacaggacacgccttcataatacagcgttacattccgtttctgtgcattcatctgcagatttttcacacaggtaccggctacctcatccagatccacctgttcaaaacacagcaggctgtcttccccgctgtccagctcggaaagccggatgatatcattgataagagaaagaagccgcgtcgcattctgctggatttcctgtgcaaaacgggtctcctgctccggatctaccatatggttttcgatcagctccgcatacccggaaattgcagtaagcggtgtcttcagctcatgggatacatttgccgtgaaatcctgccgtacttttgcggccatcaggatgttttcgtgctgtttacgaatcgtatttacaaatggcacaagctctttgtatacaggttcttctatggtatcttccatgttttcagcaagccgttcaatcggatgcagcaattgtttggttaaaaaatgtgccagaacaatacaaatggaaacaatcagtatcagtatcagtatcacaaatggggatgctgcaaggaacacactgtagacactacgtgcctgtgttgccacacggataaccgttccgttttccagccggagcgcataatagtaattgtccatctgcatggtatccgaccgccggacactttctccctcaccctgaaacaatgccgtctttacttccgggcggtttttgtggtttggaagctgtgaaatatccagatcattatcaaaaagtaccgtaccatcctttgcaatccaggtaacacgcagatcttccccgacttcataatattcggaaagtgaaacatttgtattgtccggatcatcaaacaatcccgtgccggaaagcagtcttgcattgatctgcagatccttgcgcacctgtccctgaaacagtttataataaataccggtcatacagatcatggttacaatcactgcaatacctgcaatcagaatcagccgtaaattgattcgtttcttcataacagctccttactctatcacatatcccacatttcgaacggtacggattttgcttcccgcttctccaagcttctgccgcagtgtcttgatatgcatatcaacggtacgggattcgccctcaaattctgtcccccatacatgacgcatgatgacctctctggacaatacaacactcggattggtcatcagcagacgaagcagttcatactccttaaacgtcagctctaccggtttgtcgtctacaaaaaccatatggcgttcgtgatccagtgtaatattttcaacctgcaggatcttgacatcctccgtctccgtccgccgcaaaagtgcttttactctcgtaatcagctccataatagaaaatggtttcttaatataatcatccgcaccttcatccagtcctttgatcatatccatttctgctgtctttgctgtcaccataataattggcagtttctttgttgcaggatttttccgcagtttacgcacaatatcatacccactctcatccggaagcataacatccaaaagcaccagatccggcataatatcctccagttttttataaaatgtagttgccttttcaaatgcgcagaccatgtaattgctgtttttcaatgcaattgtctcaatctccctgatattttcatcatcttccacgatataaatcaatgccataactttttccctctgtctatctttatatatacctctgcaacatcaagcaggacggccatgcctgcacaagaccgccctctcacacgtattctatctgtttcttatcatagcatacgacatgtaaaatccaaagtatcgtttatgtaaaatttatgtaaagttctatccactgttaggattcttttatttctttttatcattcaatgcaaagataacccattctgcaatattggtcgcgtggtctccgattcgttcaaaatattttgcaaccatcagcatatccgccgcctgctcgcctttttccggatcatgccggatcagttcaatgatatctgccttatttttatcaaacaggtcatctacaatatcatcatgccggatgacttcctgtgccttattcatatccttttccacatatgcttcgatgctgcggatcaacataattacggtttcactcgccatctttttgatatcatccagattcagcacatacggttcttttgaaagcatgattgtgatttccgagatatctgctgcatggtctccaattcgttccatatccgttaccatcttcattgctgcggaaatcacacgcagatcccttgcaaccggctgttgctgcatcagcagattaaaacagatgttttcaattttcttctgttcatgatccacatccgaatctgaattcatgattttttctgcaagctgcgcattctgatctatcaatgcttctattgctttctggatggaatcctcaatcatggttcccatatacatcatttcctgattgagcagtctaagctgctcatcgaactttgagcgcattaaccaaacctccctgtaatataatcttctgtccgtttatctttcggataagaaaaaattgttttcgtatcgccaaactcaaccatttcccctacaaggaaaaatgccgtatcatccgatacacgcactgcctgctgcatattatgggtaacaacaactaccgtgtatttctttttcagatcctccatcagtt

SEQ ID NO: 986 - DNA, 20871 bp, Unknown
  gut microbiota DNA sequence
gacttaatgtaaaaacaaataaaatacagtatcgtcgttggaatcagaccagaggatactgggtggacgactactggattactttaaagtaatttgaaatttttgccggtgcagctgcaccggcattttttttataaatgattctttcgcaaattataattcttccggcagttcccacgcctgtgcctgttgttcatattccgaagcacgggagagaagatccccggcagagcatggatcacagagttcattttctgccagcgtacggtaacattccgccagttgaagcaatgcttttttccctgaaatttcaatatccagaacaggctgtgtctcaaatgcagcattataaaaccacagagaagcttcctggggattctgccgttttcggtagtattgtccgagctcataacagatttcggagcaggaagaactgcacatatctttcagacagatcgaaaagaaatcatccacagaattttggatacgggcagcgtgcgccagaatacacgcggattctgcatcagcgtgcgcttcatagtgtatcgaaaaataatccgcagcgcgcagaaaatcttcctcatccccacatttataaagctctcttgcatacatgcgcgtgattttttccgagaggacacgattttcacgaaatgctttttcaaacatggcaaaatcccgtttggcatgcatgacatgtgggcggtgcagaatatcaatatcactgtcatagataacgggatcggtgcggatcgtttcgtgaaccggatcgacccatgaaaacgtgcgcaggcgtttaaaaagttttggtcgtggttcttttttacagttctgcacggtgttgaaatccggtggagtgatatagttcatctgaacaatttcaatttccggaagaagagcaccttttaaccggagaaaacgtctttgattttccagatcaaggtattcgtccgcatccggacagtagatgtaatccatggttgcaagcgaaaacgcataatttcttgcggcggagaaatcatcacaccaggtaaaatcatagatccggctggtgtattgtgcggcgatttctttggtgcgatctgtggagccggtatcaacgatgatgatttcgtccatcatggaagcaacggaatccaggcatcttgccagaaccggttcttcatttttgacaatcatacataaacttattgtgatcataataacagatggtccttccgaggtttttcttttatattacactatcctgcaacagttttacatagaaataaagaaatatacttgtatcttttttgaaccatggctataataaaatttatgtggtgtgaaattataaaacaaattttggcagatatgcggcagccacttcaatatgtgccatgggcactggttattgtggtacttgggctggttgtaacaattgtactttctgaaaaaaaggatggaaaaaaagcatctgtccggttttttcgtatactttttgcgatttatatacttgtggtgatacagattacttttttttccagagaacccggttccagaaacgggtgcatgaatctggatctgttttccacgtggggatacagcgtggttacccatgcattttttattgaaaatattcttatgacagtgcctttcggaattctggtaccgctttgttttcaccggctgcggccgatgtggaaatgtgttgtgctcggaggtgtctgttcggttctgacggaactgagccagtacgtgacgaaacgcgggtattgtgaagtagatgatatgttgaccaacaccataggtgttttatgtggttgcattttgttatggctgattgaactgataataaaacaaaggagaaagaaatgaagtatgattatctggtggtaggagcgggattatatggctccgtatttgctcacgaggcagcaacaagggggaaaagggttctggttgtcgataaacgtccgaatattgccggaaatgtttatacggaggacattgagggaatccatgtgcacaagtatggtgcacatattttccataccaacaataaaaaggtgtgggattacattacaaaatttgcggaatttaaccgctttacgaattcaccggtagcaaattacaaaggggaactatactcgcttccgtttaatatgtacacctttaataagatgtggggtgtggtgacaccggaggaagcagcggcgaaaattgaggagcagaaaaaagccgcaggcattacagaaccgaaaaatctcgaggaacaggcgatcagtcttgtgggaaccgatatttacgagaaactgatcaaaggatatacacagaaacagtgggggcgtaagtgtacggatctgcctgcttttattatcaagcgccttccggtgcgcctgacgtttgataacaattattttaatgcgctgtatcagggaattccgatgggcggttacacaaagatggttgagcatctgctggagggaatcgaagtccggcttgggattgattatctggagcagaaagaggaactgaaggctctggctgagaaaacggtatatacaggagcgatagatgcgtattttgattattcgctcggcgcgttggaatatcgttccgtgcggtttgaaacagaacttctggatactccgaatttccagggaaatgcagcagtcaattatacggatgcccagacgccgtggacacgtatcattgaacacaaatggtttgaattcggcaaggatgatgagggacatgatttaccgaagactgtaatttcgagggagtacagttcggagtggaaaccgggggatgaaccgtactatccggtaaacgatgaaaagaacggagctctttatcagaaatataaagaacttgcggaaaaggaaaaaaatgtaattttcgggggaagactcggagagtataagtattatgatatggacgctgtgatcgcttctgcactggaaatgtgcgaaaaagaactgggataggcttctagaaagatacaaaaaagagcattcgctgtatggttacagctggaatgctctttttgttatacatatttgtccagcatcattccggaatagatggatgtgatgtatggggttgcaaagttgtgaccgggatttttataggccacaacgatcttgttgacatagttcatcggattgatggagatattttccgcttcttttccgatggaatcccgaaattgggataaagtttcaaatgtattctgatcacgttccggaacaactgcttcacggagcgcttctttatcaatagagatggagccgttctcgtttgtgaccagaccgatgtcctgtaaagaactccggcttgaaccggatatggaaagaatctctgtctgaagtttgtttccggcactggcattggtgtctgcatacacggctgcggtggaaagtatggaattataggcatccaccagagactggatattgtccgcaattgcatccgcatctgttttaaatccaatgtttactttctcactatcggttggctgatttaaggtcagttcaaatacctgattgatggaaaatgtgttggtcagggaagagtggcttgtgccattcagtgtaaaggcggaactctgtgcaggggaagtgatgcggtcaattcccagctgatccatgatttccgtggaacctgtgctggcatccggtgcaatggaaaaaagttcggtttcgttatctgccagaccggtctgtatggaagtcagtttcagcgcactcgaaccgtttccatcggacagtatttcggcggtaattccgagactggaggagttgacaagcctggccagcttgtccagcacatccagattggtttcgtcggaattgatattatattgaaattcatatgcagcaccagacgtattcagatcaaaagaatatgcgccgggacgcatcgacagtgtattgtcttttaaaaaacgtccctgattgatctggggtgtggcaagccgctgcacttcaatgtcaaagttattggttttactttcttcacttccgtcgccgatataggtcacactgactttttcgtcatcggaagacatggcaactttcttcttaaaagaatcctcaaatgaaccgtactggtcggaaagagatgccacaacgttctgaatggagcgcgcgttttccttgatgtctatggcatattttttcgcatcggtgagattcggaattttataaagaggcgaatctttatttattttgacaatttcattataaactttgcgcagttcacttttcttgtgtgaatcataacgtgaaaccgttttctgggcatacgtcgagatataataagcgtaggcattatcaatctttgccattgagattcccctcctttcttccctgaattgaggattgagagcaggacagtaacagacctgttctcctgtgaggtgcatatcctttgcacccaaaaagattctacttgaatagtatatcggcatcataccgcattttccatacccttgtatatggtaaaattttactaaaaattcacaatttggcgtaaaagctgcaaaaaaccataaaaaccattgcaaaagatgttgacggacatggaaaatcatgatatagtatgaaagcttggaagtaggtcttttttttatgcctttttttaggcgggacaaaacacgaaaattaataacggaggtggaagttgtgcgtacaaagattacattagcctgcacagaatgtcagcgtcgtaattacaacatgacaaaggacaagaagactcatccggacagaatggaaaccaagaagtactgtagattctgcaagactcatacagttcataaggaaaccaaatagtccgtacagagcaaaggagttatgaaatgggacagacagaaaacgttgaaaaggctccaaagacaagctggtttgacggtgtaaaggcagagttcaaaaagatcatctggccggaacagaaatcagttgtcagacagaccattgcagtgattgttacatccgttgtagtcggtcttattattgcactgctggattgggcaattcagcacggtgtgaatttccttgttggtttgaaattttaacggaggcatagtgatttatggcagaggcgaactggtatgtagttcatacctattcaggttatgagaacaaagtcaaagcgaatattgacaagacaattgagaacagacatctggaagaccagattttggaggtccgtgttcctcttgaggaagtgacggaagttaaaaacggagtgaaaaaacaggtttccaagaaaatgttcccgggctatgtgctgattcatatgattatgaatgacgatacatggtatgttgtccgcaatacccgcggtgtgacagggttcgttggaccgggaagcaaaccggtgccactcacagatgctgaaatgagaccgctcggaatcaaagctgaaaacgttgtggtggatttcgcggaaggcgacatgatcgttgttatcggcggtgtctggaaagatacctgcggtgtgattacagcgatgaaccataacaaacagacggttacgatcaatgtggatctgttcggtcgcgaaacaccggtagaagtaagtttcgcagatgtaaagaagatgaattaaggaggcaattccaatggcaaagaaagttgaaggatacattaagctgcagattcctgctggaaaggcaacacctgctcctccagtcggaccggcacttggacagcacggtgtaaacatcgttgagtttacaaagcagtttaatgcaaagacagccgatcagggcgacttaattatccctgtagttattacagtatatgcagacagaagctttagctttattactaaaactcctcctgcaccagtactgatcaagaaagcctgcaaaatcaagtctggttccggtgaaccaaacaagacaaaggttgcaaagattacaaaggcacaggttcaggaaatcgctgagctgaagatgcctgacttaaacgctgcaaatatcgaagctgccatgagcatgatcgctggtacagcaagatctatgggtgttgaagtagtagactaatctaagtttaagaagaaatgtgggagggtaattgatttcccacccgatattaccaccaggaggtttatatttcatgaaaagaggaaagaaatatcaggacgctgtaaaggcatacgatagaagtgctcagtacgatgttgctgaagcaatcgacctcgtaaagaagaatgccacagcgaaatttgatgagacaatcgaacttcatcttagaacgggctgtgatggacgccacgcagagcagcagatccgtggtgcggttgtactgccacacggaacaggtaagaccgttaaggtattggttttcgcaaagggaaccaaggtagacgaggcacaggcagcaggagctgacttcgttggaggagaggaattaattccgaagatccagaacgagggatggttagacttcgatgttgtagttgctacaccggatatgatgggtgttgtaggacgtctgggacgtgtccttggaccgaagggcttaatgccaaacccaaaagctggtacagttaccatggatgttaccaaagctgttaatgacatcaaagccggtaagattgagtatcgtttggacaagacaaatattatccacgtgccagttggaaaagcttcatttacaagtgagcagttgaacgacaacttccagtctcttatgggcgcaatcaacaaggctaagccttcaagcttaaagggtcagtacattaagagtgctgtattaacttctacaatgggacctggcgtaaagcttaacgttgtaaagattgctcagtaatagaaaaatcaaaagtcgggaaccggaaacggttcctgatgaaatgataaaatgtatgatcagacttacacaagcaaaatgcggaaaacacttgacatccgcataagaacatattataatagcaaagcatattgccgaagacagtaaggtgctatcgcatattgcgacagcgtaaagggaaatccacctaccgagggaatttttgatgataatcgtcataaagaatgatacccctctgctgtaaggcggagggtttttattatacctcacgctatatgcaagaaataaaataaggaggtaaatgaatcgtggcaaaggtagaattaaagcagccgatcgttcaggagatttctgaaacaattaaggacgcgcagtcacttgtagtagttgactaccgtggacttacagttgctgaggatacacagcttcgtaaaaatttaagagaagctggcgtaacttacaaagtatacaaaaatactttagtaaaccgcgcaatcgagggaacagagttcgagagcttaaaggatgtcctggaaggacctaacgcatttgcagtatctacagaagatgctacagctccagccagagttctggcagagttcgcaaagaaggctccaagccttgagatcaaggccggcgttgtagaaggaacatactatgacgcagagggaatgaagcagatcgcaagtgtaccaagcagagaagtacttctttccaaattacttggaagcttacagtcacctatcacaaatcttgctcgcgttcttaatcagatcgcagagaagggtggcgcagcagatgcagcagcagacgcagcaccggctgaggaagcaccagcagcagaataattattaaaaataaaattataacggaggaaataatcatggcaaagttaacaacagcagagtttatcgatgctatcaaagagttaagcgtattagagttaaatgaccttgtaaaggcatgtgaagaagagttcggcgtatctgcagcagcaggcgttgtagtagcagcagcaggcggagacgcagcagcagctgaagagaagactgagttcgacgtagagttaacagaagttggaccgaacaaggttaaggttatcaaggttgttcgtgagattacaggtcttggactgaaggaagctaaggacgctgttgatggcgcacctaaggtaatcaaggagcaggctgacaaggcatctgctgaagacgctaaggctaaacttgaggctgaaggagcaaaggttacattaaagtagtctgtgcgtaagcgacgagaaaccaataataacccggcagagatgcttgcatttctgttgggttattttatttggctgtatcccctctctctatctgaaaaagttctcaaaaataattcttgcattccccttgattttgttgtatagtataagttgcactattgtggtgcactaggcatttccatgctcttttttaggaaaaactagattgaaataaaaacgagaggtgaaacgtcaatggagaaaaacagaatacgtccagtcaaggctggaaaaggcttgcgtatgagttactcaagacagaaagaggttttgcagatgccaaacctgatcgaagtccagaagaattcttatcagtggttcctggatgaaggtttaaaagaagcatttgcagatatctccccgatcacggattacagtggtcatctgagtctggatttcgtcgattttacactgtgcgaagacgatgtgaaatatacaatcccggaatgcaaagagagagatgcgacatatgcagcacctttgaaagtcaaggttagacttcataacaaagagacagatgagattaacgaacatgaaattttcatgggtgatcttcctcttatgacagagacaggtacgttcgttatcaacggtgcagaacgtgtaatcgtcagccagttggttcgttcccctggtatctattacggaattgctcatgataaagtgggtaaaactctttattcatgtactgttatcccgaaccgtggtgcatggctcgagtatgagactgactccaatgacgttttcagtgtaagagtagatagaacccgtaaagtgccgattaccgtattgcttcgtgcacttggtgtaggtaccaaccagcagatcattgacatgttcggcgaggagccaaagattctggcatccctgcagaaggacccggcgatcacagagcgtgagccacagggaagttttgaggctggtttattagagttatataaaaagatccgtccgggtgagccgctttccgtagaaagtgcggagagtctgatcactgccatgttcttcgatccgagaagatatgacctggcaaaagtaggacgttacaaatttaataagaagcttgctttaaagaaccgtatcaacggacaggttctggcagaggatgtactggatccttctaccggagaagtaattgcagaggcaggcacaactgttgaccgtgatctggcagatcagattcagaatgctgcagttccggcactctggattcagacagagacacgtaacgtaaaagttctttcttctatgatggtagatatcagaagctggattcctgaaattgaggatccgaaggctattggtgttacagaactggtatattatccggctctgcagcagattatggaagaaaacgagacattggaagagcgtatcgctgcaattaagagagatattgcagacctgattccaaagcatattacaaaagaggatatcttcgcatccatcaactataatatgcatctggagtggggcatcggaacagatgacgatattgaccacttaggaaaccgtcgtatccgtgctgtcggtgaattgttacagaaccagtatcgtatcggtctttcccgtctggaaagagtggttcgtgagcgcatgacaactcaggatcttgagggaatttccccacagagtctgatcaacatcaaaccggttacggctgcggtaaaagagttcttcggatcttcccagctgtcacagtttatggatcagaacaacccactgggtgagctgacacataagagacgtctttctgcattgggacctggcggtttgtccagagaccgtgccggattcgaagtacgagatgtccattattcccattatggacgtatgtgcccgattgagacgcctgaaggaccaaacatcggtctgatcaactctctggcatgctacgcaagaattaacgagtacggatttgttgaggctccgtaccgtaagattgataaatcagataaagacaatcctcgtgttacagacgaagttgtatacatgactgcggatgaggaagataattaccatgtagcgcaggcgaacgaaaaactggatgaggatggacattttgttcgtaattccgtatccggtcgttaccgtgaagaaacgcaggagtacgataagactgcattcgattacatggacgtatctccaaagatggtgttctccgttgctacagcactgattccattcctgcagaacgatgatgcaaaccgagcactgatgggatctaacatgcagcgtcaggcagtgccgcttcttaccaccgaggcacctgtagtaggaaccggtatggagacaaagacagcggtcgattccggtgtctgtgtacttgcaaaagaagcaggtatcgtggagagttctgagtctaatcgtatcgtagtacgtgaggaggacggaaatcgcagagaatatattctgacaaagtttgcacgaagcaaccagtccaactgctacaaccagagaccaatcgtgttcaagggacagaaagtagcaaagggtgaggtgatcgctgatggaccatctacatccaatggtgagctggcacttggaaagaacccgctgatcggcttcatgacatgggaaggttataactacgaggatgccgttcttttgagtgagcgtctggtagagtatgatgtatatacttctgtccatattgaggaatacgaagtagagtctcgtgatacaaagctcggaccggaagagatcacaagagatgtaccgggtgtcggtgatgatgccttaaaggatcttgacgagcgcggaatcatccgtgtcggtgccgaagtccgtgccggagacattctggtaggaaaggttacaccaaagggagagacagagcttaccgcagaagagagactgcttcgcgcaatcttcggtgaaaaagcgcgtgaggttcgtgacacttccctgaaagtgccgcacggtgcatatggtattgttgtagatgccaaagtatttaccagagaagatggcgatgagttatctcctggtgtaaatgagtctgttcgtatttacattgcccagaaacgtaagatttctgttggtgataagatggccggacgtcatggtaacaagggtgtcgtttcccgtgtattacctgtagaagatatgccatatcttccaaatggccgtccacttgacattgtattaaatcctctgggtgtgccttcccgaatgaacatcggacaggtgctggagattcacttaagccttgctgcgaaggcacttggctttaatatcgagactccggtattcgatggcgcaaaagagattgatatccaggatacactggaacttgcaaatgactatgtaaacatgccgtttgatgcagaggaagcagaagacggagaagaaaacttctacgataagtataaagatactctgagagaggacgttatggattatctttcagagaatcgtgcacacagaagtctgtggaagggtgttccgatttcccgtgacggaaaggttcagctgcgtgacggacgtaccggagaatacttcgacggaaaagtcacaatcggacacatgcattatctgaaactgcatcatctggttgatgataagattcatgcacgttctacaggtccttactccttagttacacagcagccgctgggtggtaaagcacagttcggtggtcagcgattcggagagatggaggtatgggcactggaagcttatggtgctgcatatactctgcaggagatcctgactgttaagtccgatgatgtcgtaggacgagtaaagacatacgaggctattatcaaaggcgagaatatccctgagccgggtgttccggaatctttcaaggtacttttgaaagagttacagtctcttggtctggatgtcaaagtgcttgacgaagacagaaatgaagtagaactcattgaaaccagtgagtacggaaataccgatatcaatgccatcattggaaatgacagagatgacagagattatgcatttgaagacagtgagtcgtttgaaaaacacggatttaccaagcaggagttcgattccgagaatgaagagcttgtcaatgtagaaccggaaaatgataacgatgatgaagatttcggcgatgctgatgatctctttgatgacgcagaagaagttcttgatgatgaagagtaattgggaaggagtgtcataaatgccagaaacaaataaaaaggacatgaatcaggcaatgcagtttgatgcgatccagattggattagcatcacctgagaagatccgtgagtggtctcatggcgaagtaaaaaagccggagacaatcaattacagaaccttaaagcctgagaaggatggtcttttctgcgagaaaatttttggaccgcagaaagactgggaatgtcattgtggtaaatataaaaagattcgttataaaggtgttgtctgcgaccgctgtggtgtagaaattacaaaatccagtgttcgtagagagcgtatgggacatattgagctggcagctccggtttcccatatctggtatttcaagggaattccatcccgtatgggtctgatccttgatttatctccgcgtgtacttgagcgtgtgctttatttcgcttcttatattgtgcttgatgcaggagatacttctcttgcatacaagcaggtactttctgaggcagaatatcaggaagcaagagagcagtacggaagtgcattccgtgtgggcatgggagcagaagccatccatgaactgcttgctgcgattgatctggaaaaagattctgcagagctgaaagcagagttagagaatgcaacgggacagaagcgtgcacgtattatcaagcgtctggaagttgtagaagcattccgtgagtccggaaataagccggagtggatgatcatgacggttatcccggttattccgccggatttacgtccaatggttcagctggatggtggtcgttttgcaacatctgatctgaatgatctgtatcgtagaattattaaccgtaacaaccgtctgagaagactgcttgatctcggtgcaccggatattatcgtgcgcaatgagaaacgtatgttacaggaagcggttgatgccctgatcgataatggccgtcgtggacgtccggttaccggtcctggaaacagagcattgaagtctctgtctgatatgttaaagggtaagggcggacgtttccgtcagaacctgttaggaaagcgagttgactactccggacgttccgttatctgtgtagagccaaaacttaagatctatcagtgtggtctgccaaaagagatggcaatcgagctgtttaagccgtttgttatgaaagaactggcagctaaagggattgctcataatatcaagagcgccaagaaaatggtagaaagacttcagccggaggtatgggatgtgcttgaagaagtaatcaaagagcatccggttatgttaaaccgtgcccctacactgcacagacttggtattcaggcgttcgagccaatccttgtagaaggtaaggcaattaagcttcatccgctggtatgtaccgcgttcaacgccgatttcgacggtgaccagatggctgtgcatcttcctctgtccgtagaagctcaggcagaatgccgttttatgctgttatcaccaaacaacctgctgaagccgtctgatggtggtccggtagccgttccttcccaggatatggtcctcggagtatactatctgactatgcacaaactggcagattataaggataaaaaagatgcagttgctgtttccgataaagtgtataacgatattgaggaattaaagaaagcaaccacaccggatccgaagacaggaaagagtgagatcggcttgtatgatctgatctggtttgaagatacaacagacaataaccgtcgggtattatgtaagccaatggatctgttcggatatcattacggaagcatgaatcaggcattgcttgcgtatgagaatggagagattacacttcatcagaatatttatgtataccgtaaggcaactatggctgacggaacagaagtatccggatttatcaagacaacacttggtcttctgattttcaatgagatcattccgcaggatctgggatttgtagaccgcagtatcccggagaatgctttgaagctggaaattgatttccatgttggaaagaaacagatcaaacagattctggagaaggttattaatattcatggtgcgacaaagactgccgaagtactggatgatgtcaaggcaatgggttatggatattccacaagagctgccatgaccgtatcaatttccgatatgacagtgccaccacagaagccacagatgatcgagcaggcacagaatacggtagaccggatcacacgtcagtataagcgtggtcttatcacagaagaagagcgttataaggaagttgtagagacctggaaagagacggatgatgagctgacaacagcacttcttaccggacttgacaagtacaacaacatcttcatgatggccgattccggagcccgtggttctgataaacagatcaagcagctggccggtatgcgtggattgatggccgatacaaccggtagaaccatcgagctgccaatcaagtcaaacttccgtgaaggtctggacgtactggagtacttcatgtcagcgcatggagcacgtaaaggtctgtccgataccgcacttcgtacggccgattccggatacctgaccagacgtctggttgatgtatcccagcatatgatcgttcgtgagtctgactgttgtgcaggaacaaaccgtgagattccgggaatgatcgttaaggcatttatggaaggcaaggaggaaatcgaaagtctggaagaacgtattaccggacgtttctcctgtgagacaatctgtgacaaagacggaaacgttattgttaaagcaaaccatatgattacacctcgccgtgcagcggatgttgtgaataagggtgttgatgagaacggaaatccgatcaccagtgtgaagatccgtactattcttacctgccgttcccacatgggagtctgtgcgaaatgttacggtgccaacatggcaaccggtcaggcggtacaggttggtgaagcaattggtattatcgccgcacagtccatcggtgagcctggtacacagcttaccatgagaacattccataccggtggtgtagccggtaacgatattacacagggtcttcctcgtgtagaggaaattttcgaggcacgtaagccaaagggacttgcaattattacagagttcggcggtgttgctaccattaaggataccaagaagaagcgtgaagtcatcgttacagatccggaatccggagatacaaagacttacctgattccttatggatcacgtattaagatcatggatggtgccgtacttgaagccggtgatgaactgaccgaaggttctgtaaatccacatgatatcttaaaaatcaaaggtgtgcgtgccgtacaggattacatgcttcgtgaagtacagcgtgtatatcgtctgcagggtgtagaaatcaacgataagcatattgaggttatcgttcgacagatgttacagaagatccgcgtagaagagaatggagattccgatcttcttccgggcagcatggtagattctcttgatttccttgaactgaacgaaaagcttgaggaagaaggcaaggaacaggcagttggttcccaggtattacttggtatcacaaaagcatcccttgcaacaaattcattcctgtcagctgcatccttccaggagaccacgaaggtccttacggaagcagcaatcaagggcaagattgatccgttgatcggtatgaaagagaacgttatcatcggtaagctgattccggcaggtaccggtatgaagagataccgcaatatcaaactggacagtgatgtgaacgaagaagaagagttctcatttgacgatctggaagatttcactatggatgaagaagaggaaatgatcccgacagtaaccgttccggatggaacagatctgtcagccgtttccggaactgatgaggattcatcggaagaataaattacagcacagataatagaatctgtgaagatacaaaagagggagagcaaatctccctctttttcatgtattttttaaaagtgggttgacaagcacaacagaaatttatataatattttagcgtgcattgtagtatgatgcatgcttgaagaataatacaggaggtgaaaataatgccaacatttaaccagttagtaagaaaaggacgtcagactactgtaaagaagtctacagcacctgcacttcagagaagctttaactctctgcagaagaagccaatcaatacttcttctccacagaagagaggtgtttgtactgctgttaagacagcaactcctaagaagcctaactcagctcttcgtaagatcgccagagttcgtctttccaacggaatcgaagtaacatcttatatcccaggtgaaggacacaacttacaggagcatagtgttgttctgatccgtggtggtcgtgttaaggatttacctggtacacgttaccatatcatccgtggtacattagataccgctggtgttgcgaacagaaagcaggcccgttctaagtacggcgctaagaaaccaaaggcagctaaataataaacagattatttggcagacaatgggtcacaaacagagctaaataggtttagtgttgggattattgttgtatccgctaccggatataacctactcattatatagcccgcacgaacacattagagagacacatgtgagtaccgttgaattaattaaaaatgattaaggagggaagtaacgtgccacgtaaaggacatactcagaaaagagacgtattagcagatccgttatacaacaacaaagtggttaccaagcttatcaacaacattatgttagatggtaagaaaggtgttgcacagaagatcgtatacggcgcttttgctaaagtagaagagaagacaggaaagccagcaatcgaggtattcgaggaggctatgaacaacgttatgccagctcttgaagttaaggcaagacgtatcggtggagctacctatcaggtacctatcgaggttcgtccggatcgtcgtcaggcattagctcttcgttggttaacaactttctcacgtgctagaggtgagaagactcaggaagagagactggcaaacgagatcatggatgctgcaaacaatactggtgcagcagttaagagaaaagaagatatgcacaagatggcagaggcaaacaaggccttcgcacattacagattctaattggaaatctaataggaggaaaaaaccttggctggaagagaatatccacttgagagaaccagaaatatcggaattatggctcatatcgatgctggtaagacaacattaacagagcgtattctgtattatactggtgttaactataaaatcggtgatactcatgaaggtactgctaccatggactggatggagcaggagcaggaaagaggtatcacaattacttcagccgctacaacatgtcactggacagaagaagagttcacaaagccgaaaaagggcgctcttgagcatcgtatcaacatcatcgatactcctggacacgtagactttacagtagaggttgagcgttcactccgtgtattggacggcgccgttggtgtcttctgtgcaaagggtggtgttgagcctcagtcagagaacgtatggcgtcaggctgatacctacaatgtacctcgtatggcattcatcaataagatggatatcttaggtgcgaacttttacggagctgtagatcagatccgtgagagattaggaaagaacgcaattgttcttcagttaccaatcggtaaagaagatgatttcaagggaatcattgatctgttcgagatgaaagcatatatctacaacgatgagaagggtgataacatcactgttacagatgatcttggagatatggctgatcaggcagcagagtatcgtacagaactcattgagaagatctgtgagttagatgacgatttaatgatgcagtaccttgagggcgaagagccatccgttgatgatatgaagaaggttcttcgtaaaggaacatgtgagtgtacggcagtgcctgtttgctgtggttctgcatacagaaacaagggtgttcagaagttactggatgctattatcgaatatatgccagctccaacagacatccctgcaatcaagggtgttgatctggatggcaacgagatcgagagacattcatctgatgatgagcctttcgcagctcttgcattcaagattatggcagatccattcgtaggaaaacttgcttacttccgtgtttattccggaacatgtaagtctggttcttacgtgttaaatgcaacaaaggataagaaggaacgtgttggacgtattcttcagatgcatgcaaacaagagacaggagttagacattgtttactccggtgatattgcagcagcagttggatttaagttcactactaccggtgataccatctgtgatgagcagcatccggttatcctcgagtctatggaattcccagagccagttatcgagctcgcaattgagcctaaaacaaaagctggacagggcaagttaggtgaagcattagcaaaacttgctgaagaagatcctacattccgtgcacatacagatcaggaaactggtcagacaatcattgccggaatgggtgagttacatctggagatcatcgttgaccgtctgcttcgtgagttcaaggtagaagcaaacgtaggtgctcctcaggtagcatacaaagagacatttacaaaggctgttgatcaggaatacaagtacgctaagcagtccggtggtcgtggacagtacggacattgtaaggtacgtttcgagccgatggatgccaacggagaagaactgttcaagttcgattccgaggttgtcggtggtgctattccgaaggaatacatcccagcaatcggtgaaggtattgaggaagctacaaaggctggttcccttggcggattccctgttgtaggtatccatgctaccgtatatgacggatcttaccatgaagtcgattcttccgagatggcattccatattgccggatctatgtgtttcaaggaagctatggctaaggcagctccagtattacttgagcctatcatgaaagttgagattactatgccggaagagtacatgggagatgttatcggtgacgttaactcccgtcgtggacgtatcgaaggtatggatgatctgggcggcggtaagattgtacacgcttatgtaccacttgctgagatgttcggatactcaacagacttacgttctaagacacagggtcgtggtaactactctatgttcttcgagaagtatgagccagttccaaagaacgtacaggagaagcttctgtctaataaggcaaaataatagaaaaagcttgaaatatagctgattattcgctataatcgagttagtcggtttgacaacctaaaaccataaaaacaagcccaaaaccgggcataaaatgaaggaggacatttcaaaatggcaaaggctaaatttgaaagaacaaaaccacattgtaatattggtaccatcggtcacgtagatcatggtaaaacaactttaacagcagctattacaaaggtattagcagctcgtgttgctggtaacgaagcaacagatttcgagaacatcgataaggctccagaagagagagagcgtggtatcacaatttctacagctcacgttgagtatgagacagagaagagacattacgcacacgttgactgtcctggacatgctgactacgtaaagaacatgatcactggtgcagctcagatggatggtgctatccttgttgttgctgctactgatggtgttatggctcagacaaaggagcacatcctcctttctcgtcaggtaggtgtaccttacatcatcgttttcttaaacaagtgcgatatggtagacgatccagaacttatcgagttagtagagatggaagttaccgagcagcttgaagagtatggtttcaatgattgcccaatcatcaagggttctgctttaaaggctcttgaagatcctaacggagagtggggagacaagatcatggagcttatggatactgttgattcttatatcccagatccagagcgtgatacagataagccattccttatgccagtagaggacgtattcacaatcacaggtcgtggtactgttgcaactggtagagtagagcgtggtacattacatctgaacgacgaacttgaaatccttggtgttaaggaagatgttcttaagacagttgtaactggtatcgagatgttccgtaagcagttagacgaggctatggctggtgataacatcggtgcattacttcgtggtgtaaaccgtgaccagatcgttcgtggacaggttcttgctaagccaggtactgtaacttgccatcacaagttcacagctcaggtttacgttttaacaaaggatgaaggtggacgtcatactccattcttcaacaactatcgtccacagttctacttcagaacaactgacgtaacaggtgtttgcgagcttccagcaggaacagagatgtgtatgcctggtgataacgtagagatgacaatcgagctgattcatccagtagctatggagcagggtcttacattcgctatccgtgagggtggacgtacagtaggatctggacgtgttgctactatcatcgagtaattaaatattattcagtaaattcaaggctcccagagatttctct

SEQ ID NO: 987 - DNA, 52294 bp, Unknown
  gut microbiota DNA sequence
agattcaggaagaaatcggattggatgtgctggtacacggtgagtttgagcgaaatgatatggtggaatatttcggtgagcagttgagcggctatctgtttacagagaaagcgtgggtacagtcttatggtacccgctgcgtgaagccgccagtcatctggggggatgtatcccgcgaaaagccgatgaccgtggactggtccgtttatgcacagagcctgacaaagaagccgatgaagggcatgctgaccggtccggttacgattttaaactggtcttttccgcgtgaggacatttccttaaaggaaagcacctatcagatcgcacttgccattcgggatgaggtgctcgatcttgaggcaaacggtatccgtgtgatccaggttgacgaggcggcgctccgcgagaagcttccgttgcgcaggagtgactggtacaaagaatatcttgactgggcaattccggcattccgtctggtacacagcggtgtgaaagcacagacacagatccacacccatatgtgctacagcgagtttaccgatatcatccgcgcaatcgacgacatggatgccgatgtcattacgtttgaggcatcccgttccgatctgctgattctggattccttaaaggagaaccatttcaagacggaggtaggaccgggcgtgtacgatatccattccccacgtgtaccgtcagtagaggaaatcaaggcagcacttgaaaaaatgctcacccgtatcgctccggagaagctctgggtaaatccggactgtggattaaaaacccgcggcgtaccggagaccgttgccagcttgaaacatcttgtggaggcggcaaaggaactgcggaaggaagcataaaaagtgttacaaaaggaaaccggtgcaaattgattttgcaccggctctttttgtttttgaaaaatcttttcagaatcccaactattttgtatcatatttcgtatatctgagtgaacggagataaaggcggtgaacatgcatgcagacggacaatcagttaatccgcagaattaagaaaaaacaggataaaaaagcggcggatgaactgatccggcgatactaccgggaaatctatgcgtttacctatcggcagaccggagagagggaacttgcgcttgatctgacacaggaaatttttattacggttttgcagggaatttatgcgtttgatgagaaaaaggcgggcttccgcacctgggcataccgtgtggcagccaacaggatcacggattattatcgcagcaaaagttataaaaaggaaaagctgcagctgcccctgcaatgggaaacagaggatgaagaggaagaaactgtgcgtgatctggcggagcatatggtgcaaaaagaagagattcgcaggatcatggacattgtcgtttcctatgagcgcgaatggattcgcatttttcagaaaaaatgctttgaggagaaaacatttgcacagattgcagaggagatggatcttgcggagagtaccgtaaagacccggttttaccagatgttaaaaaggattcggcaggaggtgcaaagatgaaggaaaaggaatggaagaaagaacagaagataccactgcttccagtagaattcccggaggatagcgttatgcagaaggaatgtcgtgcgattgtggaaaaagcaataccaaagcggcagagtctgtgggaaagaagcaaagaaatttactggggaccgggcattcgtgccatattttatcagagcggaagtatctggcttattgttgcctgtctgtatctgggaatcggatggctcggacagtcatatgcaaagcagcccgaaacgcagatgatcatcgtgtttttaggatttcctgtctgttttctggtgtttgcggcactggcgtggtggctggatgcgcagaaccacatgcaggatctgatcgcctcgtttcattattcccagagttatctgtcgggactccgcatgctgtatgctggcgtgatcatgatactggtcaatgtgacaggagcagctttatttacagatatttcgggaaaagcgtttgtgagtatggttctggtgggaagcagcagtgtgtttttgtttgcctcggtctgtgtatatgcctgtcacaaaggagcgggcggcctgttttacgcagttttgatcgcagtctgggcgtgtgtgtgcgtaattgcaaggcttgcgggaactggcgtgcagatgtttctttttacatcggttccgctggcggtgcacggcgcggtcactgccgcaagtttttgtcttttgttcatatcaataggaaaggtggagaaaaaagatgcttactctttcgcatgttagcaaaagttacggaaaatttccggcggtggaagacatcagtcttgagatggagcatgggctttacggaatgcttgccccaaacggtgcgggaaagacaactctcataaaaatgattgcaaccctgctggttcctacgcagggagaaattttatgggatgggattcctgttgcaaaactcggggaaaaataccgggatctgctggggtatctgccgcagcagtttggatattacaaaaacaacacacccgtgcagtatctggattatctggcagcacttaaaaatatgccaaagcagaccgcaaaagaaaagatagaacaactgcttgaactggtcggactttctgatgtggcagacaaaaaaatgaaaaaattttccggaggaatgatccagcgggtgggaattgcacaggcaatgttaaatgatccgaaaattctgatactggatgaaccgactgcgggacttgatccaaaagagcgggcgcgcttccgcaatatcctgtcaacgttgtcaaaggaccggatcgtcattctttccacgcatattgtgtcggatattgagtcgaatgccaatcaggtgattctgttaaaagaacgtaaactataccggatggacacggtttccaatatttgtaaaacgcttgatggaaaggtgtatgagtgcgtgatggaagaccgtgcgtttgatgcatttcaagacacgcatctgattctttctgtgcggcaggagcaggaacatatgcaggtgcgttattacagcagcaagccggaggaaggcagcaggaattgtacgccgaatctggaagatgtatttctggttacttatcaggaggaaccggcatgaaaatattgataaaagaatgtaaaaaaatcatggatatccgggtattgcttgttatagcagtatttacggtgctgttttaccagttgtttttagaagtgacgatttatccggcgggagggcagacaacagattcccagtatgatatgccgttttacgccgaactgatcgaaagctggggaacttcgctgccgcgtgaggactggtcgaagctggatgaaaaaagaaaagaactggaagaggcatacacccggatcattgcggcggatcaggttcttgcagatgcaaaaattacgaattatcaggaattttcgaagacacaggaaacattttttgataaggatactttaaccgatgaggaaaagaaaatcgatcaggaactgtcgcgtctggtctttgaggattcaaaagggtcaaaactgttttttgaacttcaggtgctcgatcggctggatgaatacaaaaatttacagaatggagacagtatctctctaatgccgggtggaattttttatattgtagaaaaagatatgagaatgatgggaattctgcttctgatttgttttgcaatccttgcactgccgtatctgatacgggaacggttatgtcatgtgctgccgttgtatgcaacgactgctaccgggcggaaactttttgacaggcagtttcaggcacttgtggcctgctgcggttttgtgggaatcgtacaatttgatatttatgtactggtttatgtcataaaaggactggcggtattctggaaaggcgattgtatcgacgatacgggactgcagttgtggtgtaaaaatctgccatttggtttctatatgctgctttacatgctgctggtgtttgtgtttgtgctggctgcggttgttttgatttacctgatcggaagaacggcaggcaattacattgcgggaattgcatttgccattccggcatgcgcagggattggctttttgctaatacacatttttgtacatctgtttcagaagccgatggatgaaaatagcctgccttattcagaagagctttggattctggggtggattttggcatgcgcgtgcgtgctgtggtggaaaatgcacagggatcattacagagatctctgacgatagatgagtgtaaaggagagaaagaatgcgccttttgcaaaaagagtgtggaaaatgtctgcggcatccgtttctgtggattgtctgtatcacattcgggctgtttcagtttttgagtatctatacctatgtgggaaatgccggcatgagaaaggaactgcggcagatgcatgtggctgtgacggatgaggagacggcaagcccggagtatgaaagtgcctatgcggactataaaaagacctatggcggaatgtatgatacactggatatgcgtaagattctggaacagaaagaaaaaaagagtggatatgaaccgcaaggagcctggggaatgtggattgtgcgcaattatgacaggttgcagaagcgggtggaacagatcagaaaaacaggggaaggcacgtatgccttttatccgggaagttggtataaactgcactccactttgtatggaaaactgtggaagaagctgattttgcagaccgcggttctgatgattctttcgatgctgtatctgatggattatgagaggatatataagacgcaggatctggttttagcgaccaccaccggaaagaaaatgatggaaaagaaaatgcttgcaggaacgttgtgcgggctgttttatgcaggactgcttacagtgtttaccctcttggtattttttgcagcggttccgtttcagaacctgtggcatgttccggtggcggcatgtatggttgcagagccgcggctgcagatgatgtatccgtttgtcacgttctggtggctggagcagtggcgttatcttttgcttgcgctggtggtgcttgtgggactgcttgggatcgttgcggctgttactgccgcagtgcagttgtttttacagaacagttatttttcgtttgcggtattgggtcttctttttatgggggcatatctgcttgcctatgtgcagatgggaaatgtgtgggatcttatccgggaattatttaatcccacagtactgtatgcaaccagcggaggctggtttatggaaaatgatctgtgcctgtcgtttgcaggaaatgaatttgccgtgttattctgcagtggaacggttgcggtctgcttgatggctgtgggaaaacgaagataccaccggctggaagtctgattgccgtaaggtatgcagcaaaatccggtcatttttgatcgtttgttcgaccagctgattgtgcaccatgcaaacgattctcaaggagtgaacaggtatcaatgaaaacagaagagccatccctgggtgatataccgggatggctccatttctcataattcggtacttatattatatgagaaatcagaagaaaatacaatggaaaccccaaaaacataaattataattttcaagtttcggttgaacattcatatagaactctttataataaaaaaggggaatggctgaaaaagccattttccttttttcattaagaaactgagaatagaaagaggtaatgaatgaagacagcatttcagattttccgcagggatgtgcgacgtctgttaaaaaaccgtgccgcgacactggttatgatcggcgtatgtctcctgccgtctttgtatgcatggtttaatattgccgcaaacatggacccgtatgcaaatacttcgggaatcagggtggcaattgccaattgcgatacaggggccaaaaccgatgtaatcacgatgaatgcaggcgattcgattgttgaaaaactgaaagaaaacaagtcgctgggctggcagtttgtcagtgaagagaaagcaaaagaaggtgttcaggcaggagattactatgcggcaatcgtcattccggagaatttcagcagttccctggtaagtattctctccggagacctgaaacgcccgaagctggactattatgtcaatgaaaagaaaaatgcaattgcaccgaagattacggataccggtgcgacaacggtgcaacagcagatcaacgacacattttccgccacggcatcttcggcagtatcagaaattgtaaagtcttccgcagacagtattaccagaggactggacgatacacagtcggaactgacatctgccattaccgaagttcagaataatttaacggattatcagaagctggtaaaagaatttcagaaaaaagtagataaatccgatgcacagatcaaagaaatcaaggagtctttggatcaggtggatgaggcagcaaaggacagctcttcttctttaaaagaaacttctgtattgctggaaaaaagtcagacggcacttggaaaattttataaacagttctccaatgggctgaccggcggggaagtttttctggatgaagtttcgtcctcggcttctaagagtctgaataagtttgagataaaggcagataaggcaaatcttgcggttggggacagtctcgatacgattacccggatcaatgagaaaaatgcccagcttctcaaagatctggaaaagttaaatcagaatcttggaaaagatacacagttatcagcatctgtcggacaggaaatctcacagctgcagacgcagagcatttctgcgcagaaactggtaaattcattgaaaagtgcaaataccagtatgcggaaagtgttaaagaattccaaagatacgagaagttcactggaaacgcttgcagaggataaccgtgagagttttcaggacagcaggatcgatttcagcaaaaatatttacccgcagctggatcagtcactggaaggtctggcgaatgtaagcggggatctgtcaacaaccttacatagcataacatccatgacaaaacagatgagagatctgctggatcagttaaaatctgcattgcacagcagctccaaagtacttacgcagacgggcaatgttatgggtcaggtggatcagaaactgcagaaaattgtcacggatctgcagacactgcagaattcggatatgtatcagaatatcctgtcactggaaaagattgatgccaaagacatttccgattttatgtcttctccggtaaatataaagacggatgtcctgtatgaggtggaaaattacggaacaggaatgaccccgttttatacaaacctggcactctgggtaggtggactgatactggtttctattttaaaacaggaagtagaccgggacaaagaagtgccggattttacaccgacaagtgcgtatttcgggcgtattctgctgtttcttatcataggactgattcagggagctatcgtatgtgcgggagatatcattctgctgaaagtacagtgtctgcatccagtaaaatttattcttgctggaatgttaacttcctttgtttatgtgaatctgatctttgcactggcatcgacgtttaagcacatgggaaaagcactggcggttcttctggtaattttacagattccgggttcttccggaacgtatccgattgaaatgatgccggaatttttccagaaacttcatccgctgcttccgttttcttattcaatcagcgcaatgcgggagtgtattgccggatactatcatcatacttatagaagcagccttggaaaactgctggtatttttactggtcgcattgtttatcgggcttgtactccgtccgcttctgatgaatctgaatcatctgtttgatgtcagacttgcagaaaccgatctgatgatctgtgagacggattccaagggcagggataatccacagctgcagcggattatgcaggtaattatgaaagatgatgcgtggagaaagaaattaacagagaaaacactcgcgtttgaaaaacattatccggtcatggtacgctccggatttatctgtatgatggtcataccactcgtatttctgattttgatgtttagtctggaatccaaactggtttatctgattttgtggatcgtttctttacttgcgctgattctgtatctgttgattgtggaatatctgcatgaagagatgaaaaagaaatctgttttgggagagatgagttccgaggaactgatgaagattttgaaggaggagaacagcaaatgaaaaacattctgaaaattttcatcggcgacgtgaaacggattcgcaaaaatgtaatcgcaatgattgttgtcatcggtgttcttgtcgttccgtgtctgtatgcatggtttaatattgcggcaagctgggatccgtataacaacacgggaaatttaaaggttgcggtggcaagtgtggatgagggatataccggaagtctgattccccttgagattaatgtaggggaacaggtgatttccgcactaagggaaaatacacagatggactgggtatttaccagcaaagaaaaggcaatggagggggtaaaatccggacaatattatgcggcgattgttgttccgaagaaattcagtacccagatgatgagtctgttttccgatcagattcaaaagccggaaattatttactattccaatgccaaggaaaatgcgattgcgccaaaagtgaccgacaagggcgcaaccgcgatccagaaacaggtgaatcaggtatttatacagacaatatccgacacggcgatgacggtgtttcagtcggtctctaatatggctgaggcaaacggagcagaccggcttgtggataatctgattcacaatcttgaggatgcatcggatgacatggatatgactgcatccacgctggaaactttttcagggattacgtcttctgcccagtccctgctgaatacgtcttctgattttctgaaagaactgaaaacagagtctgcggatggaaaacaggttctggaaaattccaaaaagacgtttactgatatgaaaacgacaataagcagtgcgaccgagagcgtgggcaaagcgctgaaagcaggcaaaaaggtatattctgaaataaacctgcttttggatcagacggtggaagatggaataaatggcagtgaggatacggtggatacccttgtaaaagcagcaaagacggtggataaaaacatcaagtcatttacaacactccgggatcatctgatcaagctttcggaaaaacatccggaaaccgattcctcaatagggcctatgattgaaaagatcaaccgttctattgaaaaacaggaagaactgcgggatgatctgaccgatactgcggcttccatgaagaagtccactacaggtctgatttctgacaagaaagctttggatgcccttgtaaaagaaaatcagaaacgtctgcagcagatcagcaaagaatatgaaaaggatgtaaaaggaactttgcagaaacttgcagattcggtcaaagatacctctgcagatcttacaggtctgacgaaacagatcaatgcaagtgcaaagggtgtttacacgttaacggacactgcaggatcggatctgtcagaaatacagacctgtctggatgattccggtaaacttttacgcaaatctgcaaataaaataaaaaagattacggataagctcacaaaagcaaaagacaacggggattatgcggatctggaacatatgatctatgataataagtccggggtcagtgccttcctgtcggcaccagtggaactgaatacgaagaaaatttatccgattgataattatggttcttccatggcaccgttttattcgacactttctatctggatcggcggaatcgtgctggttgcaatgttaaaagtgaccgtttccgaggaaagcataaaaaagatgggactgaaaaatgtcagaattcatgaaatttatcttggacgctggatcatatttctgatccttggtctgttgcagagtacgctgattgcactgggggatttgtattatcttgggattcagtgtgcgcatacgttcctgtttttatttgggtgctggttttcaagtatagtctatgtcacgatcagttatacgctgacggtttcatttggagatatcggaaaagcaggcagtgtggttttacttgttatgcaggttgcgggaactggtggaactttcccgattgaatgtgctccgaaatttttccgggctgtgtatccgcttctgccgtttacgcacagtatggcagccctgagggaagcggttggaggctgttatgggaacgattactggatggatctggcaaaactgggcatcttcctggtgattgcactttttgtcggacttgtacttcgcaaaccgatcattcggatgaacgaagcgtttaccgagcagctggaggaaacaaaaataatctaagcgtagaaatgagggcagaattgttttatttttgcgcagtaatgtgaaagaaaattccgcaaaaatgccgtataatgcaggtattcaaatatgagagaggcaaggaggatacggtattgaataaggcatggtggaaagaagcggttgtatatcagatttatccgcggagtttcatggattcaaatggagacggcatcggggatctcaatggtattacagaaaaattagagtacctcaaagaacttggaattgatgtgatctggctgtccccggtttatcagtcaccgaacgatgacaatggatacgacatcagcgattatcaggcaatcatggaagaattcggaaccatggaagattatgacagaatgcttgcacgggcacatgagctgggaattaagatcatgatggatctggttgtcaatcatacatccgatgagcatgcatggtttgtggaaagcagaaagagcgtggataatccataccgcgatttttatatctggagaaaaggaaaagacggaaaagagccgaataactgggggtcctgtttcagtggttcggcatggaaatatgatccacagacggatatgtatttcctgcatctgttttcgaaaaaacagccggatctcaactgggacaatccaaaagtgcgggaccgggtatttgagatgatgaactggtggtgtgaaaaaggcattgatggattccgtatggacgtgatcagcctgatttccaaaccggaaggactgccggatggaattccgggagaaaccggatacgcagacagtggttgtgcgaacggtccgcatgtgcatgagtatttaaaagaaatgaaccggaaagtgctttcccattatgatctgatcacagtgggcgaggcatccggagtgacgctggaagaggcaaaaaaatatgcaaatgcagatggcagcgaactgaacatggttttccagttcgaacataccggaggaggaccggaggcagacaaccattacggtaaatgggacagccataagatgccgcttccggtatggaagaagattttatccagatggcagaccggactggaagggaaagcctggaacagtttgtttttatccaatcatgatcagccgcgctcggtttcctggtttggaaatgacagtgaacagtatcgggaaatttcagcaaaaatgctgggaacctgtctgcatatgatgcagggaacgccatatgtttatcagggggaagaacttggcatgtgtaatgcttattttgatcagttagaggattaccgggatattgaaagcctgaatgcttacaaagaactgacagaaacctgtggggtatctcatgaagaaatgatgggatatttaaagcggatcagccgcgacaatgcgcgcacgccgatgcagtgggatgacagtgcaaatgctggttttaccacaggaactccgtggattaaggtaaacagtaactatcctaaagtcaatgcaaaacaggagatcagcgatccggattctgtcttttcgtactacaaaaaactgattcgccttcgtcatgaaaacgagattatcgtttatggcgattacgaactgttagcaccggaggatgaggcattatttatctataccagaatgctcgggacgcagcggctgatggtgctttgtaattttacggaaaaagaagtttccattccggcagaagtaacggaacagattcctgcagatgccaaacttttgatcggaaattattccaaacagaaggaagaaatgctgcaggcatatgaagcacgggtgtatgcttatcatttataaattttagaaaagaaaaagcaccccgggctggtgtaaatggatgggaaaaacagattgacttgtatgattttcgggcgtaaaatcccctgtggaaatacgaattttcacaggggattattttatggaaaccacaaacagcaattatttcggaacggaaaaaatcagcagaattctgcttaaaattgcacctccggtcatgctcgcccagctgatccaggcactttataacattgtagacagtttatttgtcggaaaatattcggagagtggactgacggcactttccattatttatccattgcagcttcttatgattgccattgctgtaggaacgggagtcgggatcaatacggcaatggcacattatcttggtgtgcatgatgagaaaaaagcaaatgaatatggcgggatcggaacaccgcttacactggttctgtgggtattgtttgcactgatatgcttcctttttatgcccgcatatgcgcgtatgtctactgattcgccggaggttataagggatgtgaccatatacggccggatcgtctgcgtattcagcatcggattgtttaccgaaagtatctggacaaagattttacaggcaaatggggacatgaagacaccgatgatcgcgcagattgtcggggcattggtcaatatagcactggacccgttgtttatttttggtatgtttggtctgccaaagcttggaattgccggggcggccatcgcaactgttgtgggacagattgtagcggctcttattgtaatgaaaaaagggtttcgcaagtctccaccgctttcggtgtatccgcgggatatctgttttatttataaacttggaattccgaatatccttatgcagtcggcatataccttttatattctcggattgaatctgattcttgcaaccttttccgatcaggcagttacggcactggggctttattacaaatggcagtcttttttctttatcccgctgggcgcactgcagacttgtattgtaccggtgatcagctacaattatgcttcggggcagatggatcgctgtaagaaaacattgtccacttcgcttgtgggaggcatggggctgatgtttatcgggacgttagttttcaatctgattcctggacagatgcttcgggtatttacaagtgatccacaggtgattgcgattggaaccgttgggtttcattttgtgggaatcagttttatcccgatggttacttccctgatttttccggtgttctttcaggcagttggagcagccgtgaaaagttcacttctgaccgttgtaaggaccgttgtgctgtttgtgccgctcgggtatttattttcccgtctgggactgaatgatttctggtttacatttccggtgacggaagtcatcaccacgctggtcggggtgttcttttaccggcggtttatggcacaacagaagtgaagagtaccgattgtatttagacagaaaaaataaattaaaaaatggttgcgatttttatagaaatagcatattataatatcaacaggactccccacacctctcacgtaagtgatgtgtcccatggggagacatttttattttgggagaaataatagtggatataagcgatggtgtacgggaaaatcatagtaaagcagggcatgattatcaaattataaaacagccgaaaacctatgaacagcaagtggaacttatcaaagaaaaaggctttatagtgaataatgatacggaatgtatcagttttttaaagcaggcaaactattatcgtttatctgcttattttcttccgtttagaaaaaagaatggaacatattttgcagatataagttttaatagaattcaacgaatttataagtttgatagtaaattacgaggagtactgtttaattgcatagagagaattgaattacatttaagaacacaacttgcttattactgtggacatgtctatggatctttggggtacatggataagagtatttataataaaaaacacaatcatgataaatttagaaaactactgaatgtttgcatagaggaaaataaaaacagtttagttgttaagcatcataaggaaaaatatgatggaaaatttccgatatgggtaattatcgaattcttttcgatggggatgctgtcttatttttatgcggatttacaatcgggcgatcagaaatatatagcaaaagagatatatgatacatcagtagcgtgtttaaaaagctggttacgttgtattactgacttaagaaatagatgtgctcattattcaaggttatattattggtcatttacggcattacctaaaatgccaaaggaatctgtagcaccacaaaatagaaaattattttcccagatattagttcttaaacgattgtatcccgataagaaagaatggaatagcaaggttatgacagaattaagggctgtaatagaagaatatgaggatgacatatcgttaaaacatatagggtttccacaagactggtatgagcagttggaaagatagacaaacaagggatcacagaaataatttgtggtctcttgtttttatcaatcaataggaatctccttttggtactagacagggactgccgaattcattacaatggaactaaatcggaatagtagtatatttattttcacatggaggaagaaaaaatggaaattgtttgcttggacttagaaggtgtactggtaccggaaatctggatcgcatttgcagaagagaccggcattccggaattaaagagaacaaccagggatgagccggattatgataagcttatgaaataccgtatcggaattttaaaggagcacggtcttggactcaaagagattcaggagaccatcgcaaagatcgatccgattccgggcgcaaaggaatttttggataaactgcgtgccatgacacaggtgattatcatcagtgatacgttttcccagtttgcaggtccgcttatgaaaaaactcggatacccgacaattttctgcaactcgcttgaagttgccgataacggagagatcacaggctttaagatgcgctgtgagaagtccaagtacacaaccgtcaaggcattacagtccatcggttatgataccatcgctagcggagacagtcacaatgatcttggcatgatccaggccagcaaggcggggttcttatttaagagtaccgatgcgatcaaggctgagtatccggatattcctgcatatgagacgtacgatgagctgtttgcagcaatcaaaaaagtgattgaaagataatttgtcggagatgaaaacaaagaaggaagctgttgcatgaatgcacagcttcttttttgttgtatcgttttttacaatacatgtgttgggagagagggtatgataaggacaagttaagaaaagtaattggttcttggaaaaaacataatggagggcgataccccatacggggcaccgcagtagacaaaggcgtctatgagaaatcataggtgtctttttgattttcacggaaaccatacatgattacacatagaaaggaaggagttatatgagcagcagaatttcagaacatccaatccttggagaacagcagaaagggaaactggttacattcacctatgacggtaaagaattacagggatacgaaggagagccaattgccgcagcattaaaagccgcaggcgtgatggttcaccgttataccaaaaaggaacacaaaccgagaggaatcttctgtgcgatcggaagatgcaccgactgcgtgatggtcgtggatggaaaaccaaatgtccgcacctgcatgacaccgcttgcagagggcatgaaagtccagacacagtacggcgtatcggataaaccgtttgaagaacagtagaggggagtgagtaatatgaagcgttatgatctgattatcgtaggagccggtccatccggattgtctgcagcagttgaggcagcaaagcggggactgaaagttgtagtatttgatgaaaatgaaaagccgggcggacagctgtttaagcagatccataaattctttggatcaaaggaacataaggcaaaagtcagaggttttgtgatcgggcagcagctgttgcaggaagcagcggatgccggtgtggaagttgtgctgaatgcaaccgttatcggcatgtatctggataaagaaattgtggtaaggatcaaagaggaggttcatcactacaaaggagattccataatcattgctacaggagccgcagaaaatatggttacctttgagggctggaatcttccgggagtcatcggcgcaggagccgcacagacgatgatgaatctgcacggggtaaaaccgggaaacaaaattctgatgcttggttccggaaatgtcggtctggtcgtatccttccagctgatgcagtgcggctgtgatgtggttgcactggttgatgcagcaccccgtgtcggtgggtacggagtccatgcagcaaaggttgcacgaaccggtgttccattttatctttcccatactattgtaaaagcagagggcgaggagtatgtgaccggcgttacgattgcggaagtggacgagcatttccagttcattccgggaaccgaaaagcatttcgatgtggatacgatctgtctggcagtcggactttctcctatgtcgcagctgttgaaaatggcgggctgcgagatggaagacaatccaaagcgtggcggacaggttccgatctgtgatgcatatggcgaaacctcaattaagggcattttcgtagcaggcgatgtatcggggatcgaggaagccagctctgccatgatcgagggacgtatcgcaggaatcgcagctgcccattacctgggatatatggatgaggaagaattaaagacaaaggtaaaagaacaggaggatgcacttgacggactgcgtcagggcatgtttgctccaaagaatcgtggaaaacttatcgagaagacagaagaaggaatcgatatttccatgaatcttctgaaaaaaggatatgttgcagatgatgaaatcgaacgcttcccgggcgtgacacacaaagtcggtgttcatccggtgatggaatgtacacagaacattccgtgtaacccatgtcaggatgcatgcccgaagcattgcatcaggattggagaaaatattacctcccttccggtggtagatccggatgtggattgcatcggatgcggtatgtgcgtggcatcctgctccggacaggcaatcttcttagtcgatgaaacgtatgagccgggatttgcaaccgtgacgcttccatatgaattccttccacttccggaaaagggagaaaagggatacggaatgagccggagcggtgaaaaaatctgtgaggcggaagtggtatccgtcaggacatcgaaggcatttgaccatacgaatctgctgacgattaaggtgccggcagatatggcaatgaaggccagattttatcgtaaggcagaagcctgattcacagaggaggaaaaaattatgcatgagattaatgatagatcaagagatatcggacctttcgtaccgggaccggatgacgatatgatcatctgccggtgcgaggaagtaaccaaaggggaaattcgcaaagcggtgcacgatggaatgttcacactgacggagatccgccggtatttaagaaccggcatgggactctgtcagggacagacctgtgcaaagctggtcaaaggaatcgtggcaagagaactgaacgtatccccggcagaactggaaccggcaacatcccgggcaccgatgcgtccgatcgagatgcgcgtgtttgcggcagaggcaaaggagggcgaggaagatgaagaataatgcggaagtagtaattatcggtggtggaatcatcggatgcgcaacagcttattatctggcaaaagaaggggtttccgtgatcgtactcgaaaaaagcgattatatcggaaacggtggttcctcaagaaacggaggcggtgtaagacagtccggacgtgatccaagagaacttccgcttgccatgtatgccgtggaacacatgtggccgacactgtccgaagaactcggtgtggatgtggaataccataaagaaggaaaccttcgtctcggaaagacagcaaagcataaagaaatcttacagggactgacggaccgtgccgttgcactgggactggatgtgcggatgatcgatggaaaagaagtgcgtgagatcaacccatacttaagcgatgagattacggttgccagctggtgtccgaccgacggacatgccaatccgctcgttgcaaccctcggtttttacaagagagccagagagcttggcgcagagtttattacaggtgaggatgtgctcgagatccagaagatcaaaggaaaagccagacgtgtagtaacagaaaaaaatgtgtatgaaggagaaaccattgtactggcatccggatatgaaagccgtccgattgcagcgagtgtcggtattgacatcccgatgcgcaaagagctgatagaggcactggttacggaggcagagccaaagatgtttccacagatgcttggtaccgcagatgcggatttctacggccatcagacgaatcatggatcttttgtattcggaggtgcttccggatttgaggcagaaaaccgtgacaatggacatatgattacttcaagtatcactgctccgtgcatctgccggggaattatgaaatacattccaaaacttgccgatgcaaagattgtccgtacctgggccggatatgaagatctgtgtgcggacggagtaccggtactcggaccggttaaagaagtgccgggactgctgttagcctgtgcttttaccggacacggatttggaatttcaccgattgtcggaaaactgttatccgaactggccatgggaaaagaaaccacactggatctgcatgaactgcggtatgaccggtttcaggcagtgatctaagatagcaggatcgttgtataaaaaagaatacaagagtagcaatcaaaaagatagtatggtatattataagcacgaataagtagcaaaggcgctatagtaggtgatactatggcgtcttttttgtttatttgctttgatattccatacctctgaaaacataaggaggaaatgcatatggataccaggattaaatttttatatttgagtgaaccggatatgatcaaagccggagtaaagaacatggatcagtgtgtggaggcaatggaagatctgctggttacattgaacaaaggcgattatgtgatggccggagtcaaccataattcccacggtgcacaggtcatttttccagatgatccgcagtttgagggaatgccgaaaaatgcagacgaccgcaggtttatggcgatgccggcatatcttggaggaaaataccagatggccggaatgaagtggtatggaagtaactgtgagaataaagcttccggtctgccgcgttccattctgatgatgatgttgaacgataaagataccggggcgccactggcactgatgtctgcaaatcttgtcagctgttaccgtaccggagcaattccgggagtcggggcaaaatatctggcaggaaaagattccgaaacggttaccattatcggaccgggtgttatgggaagaacctgtctgctggcttttttaagcgtctgcccgaagattactacggtaaaagtgaaaggaagaggacagcgttccctgcatgcatttgaagagttcgtaaagaaggaatgtccgctgattcagcaggtcatcgtatgtgattcgatggaagaggccgtaaaagacagtgacatcatctgtgttacttccaccgcaccggtaaaagaaatcgatttcccatatatcgcagaagactgggtcaaaaaaggtgcactcatctgtctgccatcggctgcacggtttgatgatgattttctgatcaaccgctgcaagaaagtggtggataactataaactgtatgaagcctgggcagaggaatttccgtatccgagttatgagatggtacagatcataggttccaagtttacggattatctgcacgaaggacggattcagcgggaagatattgtagatattgccgatatcattaataaaaagcatccgggacgggaaagcgatgatgagatcattgtatactcggtaggcggtatgcctgttgaggacattgcctggggcggtaccgtataccgcaatgcattaaaagaaggtatcggcgtggaactgcctttatgggatcagccggatatggcataaaaggtacgcctttttaagtactttttgccgggcggtcctggcagaggtttaagtacaaggggcgaaagaaaatgaaaaacgtcatgccaatgcagccgtatctggtgctggatacagatgattatgaggtaaaaaaagaaatgaaatccggaatctcccacttttatgaattttccaaaaagaagagtttaaaggaagagatgaaagcggtgccggatggcagcgtggacctgttgtttggaatcggagagcaggatgttaagacgtatattggcggaacggttcttgccgcaaaaggctgggagtttgaggacggacgttcatattttggggtccgttttcagccgggaagctgtattctgccggaagaactttccatccgggatctggttaacaaagatctcgagattgatggcaatctgtttggagatcacctgaccgaaaaacttgccgggagtaaaaatatttcggagcgtgtcaatgtatttacgacggaatatgcaaaactgcgtggaaaagaactggcggatggcatacaaaagctggaaaattatctcagggagagaatttatgataccgatggatgcatttgtatccggcagctggcagaggaaaccggatattcggaatgttatatccggcgtgtttttcagcaggtgcatggaatttcgccaaagaattttgaacggtttgtccggtttcagaagctgctgcatgtcataaataaaatgccggagaggatccggctggatgcactggcgcagcagtgcggctattatgacgaagcacatatgatcaaagattttaaacagtatgccgggattaccccacagggttatgagcggctcattacaggaacaaagattccggaactggaattgtaaagagcattataccaaggaggaaagaccatgagtttgtcaagaattgaagtaattacaggcatgtcaaaattttccagcttaaaagcagcactcagcaaagccggtgtgcggggaatgaccgtgatgcaggtacttggatgcggtgtggaaaaaggaaccagagagtatgaagtggatgagcttgaagagatggaactgcttccaaaacagcagatcaatattgttgtggaaacggagcgtgtgaattccatcgtagagatcatcaaggaacagctgtataccggtcacatcggagacggaaagatctttatctataaactggacaatgtcatccgtgtccgcactggtgatgagggcgaaaaagcgttgtaggggatgggggtctgtttatggaagaaaagaagttaggactcaaaagtgttatttctgtttctgtaggacttgtcattgcaacgagttgtctggtttcactcggacagggcgcagggacgataggtgtgacctttatttttgccatggtaattgcctgtctgtttaacatgacaaccattgcatccctgtcggaactcaatgccctgatgccgaatacgaccgggggactggcacagtatacgcttgcctgcctgggaccgtttccaacgatgatttccatggtgggagggtatctgttctgcaatgtattgtcttccggtgtggaagcctcaatttttgcatatgccatgggagaaatttttcatctgccgattccaaacttttcctataccgttctggtgacggtcattcttctgattgccaatttaaagggtgtggatatgtttgcaaagattcaggatgcagtggcatatctgatggtcggatcaatggtgattatgggtgtcatcggcatgctgggacttggcacaggaaaaaaggtgagtcagccgatggttctttccgcagactggaaaacgattgtttccatgaccgcagttgcattctggctgtttattggtgcagaatatgtgattccgatttcgaaggatgtcaaaaatgccaagcggaatgtaccgctcggtatgtttcttgggctgggactgatctgtgttgtgcagtcggttctggtgttcggatttcacaattataccccatgggacaagctggcagattctgcagccccgcatctgctgtacggggaaaatcttctgggaaatgtcggaaaaatatggatggcttttgtggcggcgctggcactgatcagttcccagaactctgcgatcaacgggctggcaagtatctgtcagggaatggcaaaaatgaatatgatgccgcgctgctttaaaaaactgaacaaaaacaatgtgccgtttgtcggtgtgtggttcatcagtattctgattcttgtatttgcatttatcagcagtgattcatcggatgcaatttccttttttattctggttggatcggtattctggatggtgtcttatatttttgcacatattgatgtgctggtactgcggcaccgtcttccgaaagcaccaagaagtttcaaagttccgtttggaccggtgctgccgcttgtcggaattgcaggtacggtgtttatgatctgtaatatttcgacagatccgacagaacgcaatgcgattctgcttttgtccggagccgtatttcttgcattgggtgtgtattctttcttctggatacggtttaaaatgaagatgccggtttttaaaagtgttcctgtggaaaaagtaatggcaatggaacacgatatgtatgatacgatccgaaaacgccggggaatttggcggtagaacttgacaaaccgagcaaaaaggattaaagtatagcaataagagaaaaccgatgagaaagagaagtaagcttatctggacatcacagagagctgcaggtggtgtgatgcagcatgaaaggatttgctgaatggacttttgagggcggcctgaaaaagaagcagattgcatttagtaggtgtcgccgggaaccgaacccgttatcaatccggcacatatggatgtatgtgacagagtggacaattcattgtcaatttgagtggtatcgcgataagagagcaaaggctttattaccgtctcaggattttatcctgagacggtttttttattcatcgggaaaaaggaaaaggagagattattatgaaaaagaaagtattagcagtgattttgacagcagtatgcaccatgggtcttatggcaggatgtggaaacagtaatgtgggaaatacaaacacccagaaaaatgcgtcctcagcagaggacggttataagattggaatttcccagttcgcagaacatggatcattggacaattgcagggaaggctttttagagggtttaaaagaagaagggattgaggaagggaaaaatctgacggttgattatcagaacgcgcagaccgataccggtacagcaagcacgatcgcagacagtttcgtatccgcaaaagaggatctgatctgtgcaattgcaacaccgtgtgcacagagtgcttacaactctgccatgaatgcagatattccggtagtttacacagccgtatcggatccggttgctgcaaaacttgccaatgaagacggttcctgcgtgggaaatgttaccggttcttccgatgtgcttccggtggaagaacagttaaaaatgatccgtgcaatgctgccggatgcaaagaagattggtattctttacacaacgagcgagacaaattcctgcagtaccgtaaaagaataccaggaacttgccggaaaatatgatttcgagatcgtggataccggaatcaacacttctgcagatatagacatggcggcaacagatctggtaagcaaagtagactgcctgtgcaacctgacagataacaccgtggtaaatgctctgcagaccgttcttgacaaggcaaataatgcaaagattccggtattcggaagtgagattgagcaggtaaaatccggatgtgttgcttccatgggaattgattactatcagcttggaatcgagaccggaaagatggcagcaaagattttaaagggtgaggagaaagcttcggagactccgtatattacagcttccaaagcagaattatatgtaaacacagcagcagccgataagattggaatgaagctggatgcatcttatgtcaaggatgcggctcagacttttgatgagattaccgtaaaataatcatatttgggaaagataaggggtatcacatgacattggtattaagcgtactggaacagggtatgatctatgcgatcatggcactcggcatttatattacgtatacgattctggattttccggatctgacggttgacggaagttttccgcttggagctgcaatttccgcggtactgatcacgaagggagtaaatccgatactgacgcttctgatttcatttctggcaggagtggcggcaggaacactgaccggactgattcatgtaaaattaaaggtacgggatctgttgtccggaattattatgatgacagctctttatacggtaaatctccgtattgcgggcagggccaatgtgccgatttataacatgacaacactgtttgacaatgcgctggtaaaaaagatctttacgggatcgcttgcaccatttgcaaatacgattatcattctggtgattacgctgattatgaagtttttactggactggtatatgagcaccaaatccggatatctgctgcgggcagtcggagataatgagaccatcgtcacttcgatgggtgtggacaaaggcattattaaaatcatcggccttgcgattgccaacggactggtaacattgagcggatgtatttttgcacagcagcagagatattttgacatctctatgggaaccggaacgatggtcatcggtctggcaagcgtgatcatcggtatcagcctgttgaaaaaagtttctttcattcgtgtgacaacaagcgtaattattggttcgatcatttataaagcatgtgtggcaattgccatcaaactgggaatgccatcctccgatttgaagatgattacagcggtactgtttcttgtgattttagttctcggcatggatcgcaaaaagagaaagaaggtggcatagatgttggaattacagcatattcacaaaatgtataatccgggtacgatcaacgagatctgtctgtttgaagattttaacctgaaaattgaggatggccagtttgtttccgttgtcggaagcaatggttccggaaagacatccatgctgaacatcatttgcggcagtataccggtggatgccggaaagatcctggtgaatggagtggatatttcccgtcagaaagattatatccgtcaccgcagaatcggtcgtgtatttcaggacccgtccaagggaacctgtccgtccatgacgattctggagaatcttgcaattgcggacaacaagggaaaggcttatggtctcggaagaggaaccaaccatgcgagaatggatgcgtatcgtgaacttcttgcaagtgttgggctgggactggaagacaagatgcatacaaaggtcggggcactttctggtggacagcggcagacactggcacttcttatggcgaccatgaagccgatcgaatttttgattctggacgaacatacggctgctcttgatccgaagacggcagagatcgttatgcagcttacaggaaaaattgtaaaagagaagaaggttaccacgattatggttactcacaacctccgctacgctgtggaatacggtgatcgtcttctcatgatgcatcaggggcatgcaatcattgataaatccggagcggaaaaacaggcaatggaagtcgatgatattcttggaacatttaatgaaatttccattgagtgtggaaattaagagtgatgggtcagacaggattgcctggccctataaaaatatataaaactggatatttacatataaccattctgctgtaaaatatcgttagattttacagaaaagaggaattggttatgaaacacgaaaatatttacaaattgacattgactgcgctgatggcagcattatcttatgtggtatttacatttttacagatcaaggtaacacttccggggggagatgcaacatccttccatctgggtaatgcggtatgtgtacttggtgcactgcttctcggcggtgtgtatggcggaatcggcggagcaattggtatgacgattggagatctgctggatccggtttatattgtgtatgcgccaaagacatttattttgaaattttgtatcggtttgatcacaggactgattgcacacaagattggtcatatctctacatcaaatgacaataagcatgtattaaagtggacaattattgccacggtctgcggacttggatttaatgtggtatttgatccactgttcggatatttttacaagcgtgtgctgatgggaaaaccggctgcagaagtggcactggtatggaatattacaacgacttctgtcaatgccatcatttctgccgttgttgcagtaattatctacatggcacttcgtccggcactcaagaaagcaaatctgtttcttacattaaaataaaagataatgaaaaagaaagagcgggcaccgtcaggtgttccgctcttttttggaatcagtaggttaagctgatatccccggtatcgttggaaatggtcagcgagtgtgaggaatcgccttggttggagtaactgcggtgacagtaggtatcattaacatttacatctccgacaccggttcctaattctatatggtaaccggacaggtcttccttgcaatcgagatcgacatctcctacattactggtaatttccatggaagtaaaggtacaatcttccagatcaatatcgcccacatttgcatccagtgtggaagtctccagagtgcagttctccagatcaatatctccgacatcggcacgcaggtcaagtgccagaacgttcagaccggacaggtcaacatcgcccacgtttgtatggagttttaaatcggttaaagtatcggcgaccgtgatggttacagagcattttttgtttctgccgagagcattgtgggctttggcatactgtgtgattgtcaggcagttgttttctactttatattccggggtaagctttttgctggctttgcaggtgatggaaaaagtgttcccccgctggatggttaaatcgacaacatttaagtcggcattgatggatgagaaggcatccagatttttttggctggcatctacggatgtggatataccattatcgctatcatcattgtcatcactatcgtcatcatcatcatcccagtcagagatggcctctataaattcgctgaaaaacggcagtccttctgccacggagagaccaaaacgcaccagatggtagccggttcctgcaatgatacagagaatcgtaatgacggtaataaggattaaataaacatttcgtttcatgacagttctcctcccattagtttttactgatgtttttgatcagggattctacaatcgcagcaatcggccagacaatccaggtaatccaccagtcgaacgaaagaaaactccagatcaggtaaaggcaggtgatggttggccagtagacggacatgattgcagccagtgtggaattatggtactgctggcggtcctgctgctccggaacgtagtttccgccaatggtgttctggttgttcagatgcagcagtgtgcgatatccgcccatgcgcatggaactgattacaatcaggaaaacgccgatggcaacaaagattaatacaaacccggcggaacagtcctcaagtgtatctgccgcaaaactggatgccgcatctaaaaggatcggtgggacaacacttaagatgcacagcatgatacctatggtcagcaggagcgcatgtgtgcttttataatgttccatttcgtgatggatgtagtctgtggtggcaaaatcagtaacgaaatttccttcctctaagtgtttccagtgtcccatgcatacattcgaatagacaagcatgcccacaccgatggctatgaaaacaaacatcagaataataccggatgcatcaagtacatcactgctgcgcagcgaagtatctgcagcagccccgaaaaagatcggacagcaggcagaaaggataaacaaaaatacgcttagtgccacaaagtaggaatgacgggaatgttcccgcagaaactgtctgacatcttccatagagagcgatacagcattgggagtctgctcctgtcgcggctggtgaacaaactgtttgatcccaagatcttctgcaagttcgtcgagatttccaaattccgcgatgacggtgccaaccgcttcattttccgattttccctcattttttaactcggtgtatttgtcttccatcatctgccagagctcgtttttggctttgtatacttctggcgtgtttggaagatttaaaaacatagtttccagataatttctaatagcttccattttccgtttcccctttcctgataaactgttctacaacttcctgcgtaagcagccattcctcacatttttcctgatagtaagcacgccctttgccagtgatctggtagtaggtacggcgtttgccggttgcagtgttctgatcctgaaaagatgtgatatagccatttttctccatacgtgtaaacgcagaatagagcgtggtctccttgataatatatttttcatgggagagcgttttgatctgtctggagatttcataaccataggatggctgatccagcagaagataaagaatcatggtgtcattgtaaccacggataacatcactgctgattgccatatgcattcctccttactttatctgtcgtatttcgtctgtcgttgctacgatagatgtactacgtctgatgaagtaaatataacagaatagaggaaacacgtcaagtggaaaataaaaaatccccatgaataaatcatggggaaggtgattacggttatgctattttttcccggcagcaagttttctacggaattcctgcgttaattgtcggagtttttcatccggtacaaattgctttagggtttcttcatccatggcaacacggttatccatggttttcatgatgtcggtcacctgcatttcctgataaacgtttttgtcactcaggtcgtagatctgattgtcagaaaggcgcaggacaaccggacgcataaaatcacgggtgttttctataagaacaatgcctttatcacctgtggaaagatcaacactggcggcctttggaacaatatgaatacactctgcaagtgctgtgacaagcaccggaagaaacttctttgggtattttttgaaatactgcatggcggcaatttctgacatcggttcatggccgctgttcatcgcagtcatctggtcaaaccagtcggcgatgcgcagaatggatgccatttcctgtaattcctgatccggagcggttgcgagtttttccaggtggtcttcatatacataggtctgcatcagagccagtgcgcgtggaaaaaagtcaaaatcattccggtacatggaaagcggaacgagtcctttttccagagaaagctggatgacatcctgatcggatgaggacaggtcgttcattcctttttccagaatattccgcggaacattccggtatccattgtcataaagaagggcagccgtggtcagtatacggagtttttccttcggtagtctcagatgggcgcccatcatggttacgagtattgcggtgctgatcgcatgcttgtacatgaaatcatcactgctgcgcagattctggttaaaattcacacggtgttttaaagacccgtagtgggaaaggatatcttccagaaataccgggtatttttcgagttttctgcgctcggtaatgcagtttaacacttcccggagacggaaaatgtataccgtctgtaactgctcaaactccagatcttcacgggaaagcggaggaagcggttcggccggctcgagaatgtagacaccgatcagaccgaaattttttgcactggcaattcccggcgcggtgagtgcggaattgcgctcataaagcagcacaccttttttattgtaaattggtttggcaagacgcatgcctgcctttaagtcttctgttcttacaaatttcatatcacatgatcccccgtttggattcccctcagtattgcttgaaatataccataaatataccatgaaacagagccggttgcaataaatgaagaattttttatgaacaacgtaggttttcattgattttgtgcggaaaatgtggtattatagacattgttaaaaaattaacagcatcattgggtgcgagtttgatttaaaggagaacgaagaatggcaaagaaagttgtattagcaggtgcttgccgtacagcaatcggcaagatgggtggagcattaagcaatactccagcagcagatttaggtgcaattgtaattaaagaagctttaaacagagcaggtgttaagccggagatggttgacgaagttaagatgggttgtgtaatccaggcagctcagggacagaacgtagctcgtcaggcttccatcaaagctggtttaccgatcgaagttccggcaatcacaatcaacgttgtttgtggatccggtcttaaatgtgtaaacgatgctgcaacaatgatcatggctggtgaggctgatatcgttgtagccggtggtatggagaacatgtctatggctccttacgctatgacaaaggctcgtttcggatacagaatgaacaatgcaacaattatcgatacaatggttaacgatgcattaacagatgcattcaaccactaccacatgatgatcactgctgagaacgtatgtgacaagtatggtattacaagagaagaacttgatgagttctctgcaaacagccagcagaagtgcgaggcagctatcgcagccggcaagtttgatgacgagatcgttccggtacctgtaaaggttaagaaggaaatggttgacttcaagaaagacgaaggacctcgtgcaggaacaactgctgagtctctttccaagttacgttgctgctctggtaaggaaggcggactggttacagctggtaacgcttccggaatcaacgatggtgctgcagcaatcgttgttatgagcgaagagaaggctaaggagcttggtgttacaccaatggctacatgggtagctggagctcttggcggagttgagccggagatcatgggtgttggtcctgttgcttctacaaagaaagttcttgcaaagaccggtctttctatcgatgatttcgatctgatcgaggctaacgaggcattcgctgcccagtctatcgcagttgcaagagacttaaagttcgatatgagcaaggtaaacgtaaacggtggtgcaattgcacttggacatccggtaggagcttctggatgccgtatccttgttacactgcttcatgagatgcagaagcgcggatctaacagaggtcttgctacactttgcatcggtggtggaatgggatgttctacaatcgttgagaaatactaatttttttgccagataagatacatagagggggtgcactgcatccccttgaaatgtgaatatatttaatatttaggaggaactaaaatgaaggttggagttatcggtgctggtacaatgggccagggaatcgctaaagcattcgcacaggttgacggatatgaagtagcactctgtgatatcaagcaggagtgggctgaaggcggaaaagacaagattgcaaaaggatatgcaagacttgttgcaaaagagaaaatgacacaggagaaggttgacggcattcttgccaagatcactccaggtttaaaagaagacctctgcaaggactgcgacctgatcgttgaggctgctttcgaggatatgaatgtaaagaagactacatttgctgagttagacaagattgccaagccagagtgtatcttcgcttccaatacttcttctctttctatcacagagatcggaaacggacttacccgtccaatgatcggtatgcatttcttcaatcctgctgaccgtatgaagttagtagaagttatcgctggtgtaaatactcctgctgagactgttgaagcaatcaagaagatcgctgtagagatcggaaagactccggtacaggtaaatgaggctgctggtttcgtagtaaaccgtatcttaatcccaatgatcaacgaagctgctttcatcaagatggaaggtgtttccgatatcgctggtatcgacgcagctatgaagcttggcgctaaccatccaatgggacctttagagttaggtgatttcattggtcttgatatctgccttgcaatcatggatgtactttacaatgagacaggtgacagcaagtaccgtgcatgcccactcatccgtaagatggttcgtggtggtaaccttggtgctaagtctggtaagggattctacatctacaatgcagaccgcacaaagacacctgtagacgcacagtagaaaagtataaataaaaataaatcataattaaggagtgttaaaatcatggattttactttagacaagaaacatgagatggctcgcggtcttttcagagatttcgctgagacagaagtaaaacctcttgcacaggagacagatgagacagaacagttcccggctgagactgttgcaaagatggcaaaatacggattcatgggaattccggttccaaaggagtacggcggacagggatgtgatcctctgacatacgttacatgtgttgaggagttatccaaagtttgtgcaactaccggtgttatcgtatctgcacatacttccctttgtatcgatccaatcatgacattcggtaccgaagagcagaagaagaaatatgtagtaccgcttgcaaagggcgagaagctcggtgcttttggtcttactgagccaggcgctggtacagacgcacagggctgccagacaaaggctgtattagatggtgatgagtgggttttaaacggatctaagtgtttcatcacaaacggtaaggtcgcagatgtatacattatcattgcaatcacaagcattaccgaggataagagaggcagaaagaagaagaacttctccgcatttatcgtagagaagggtgctcctggattctcattcggaaccaaggagaagaagatgggtatccgtggatcatctacatacgagctgatcttcgaggattgcagaattcctaaggatgcattactcggaccggaaggaagaggattccctatcgctatgcacactcttgatggtggacgtatcggtatcgctgctcaggcacttggtatcgcagagggcgctttagaccgttgtatcgcatatacaaaggagagaaagcagttcggtcgttccatcgcacagcagcagaatacacagttcaagcttgctgatatggcagcaagaattgaagctgcccagcttcttgtttacaaggcagctatggctaaggctacacagaagacctattctgtagaagcagctaaggctaagttattcgcagctgagaccgctatggctgttacaacagaagttgttcagttattcggtggatacggatatatccgtgagtacgacgtagagcgtatgatgcgcgatgccaagatcacagagatctacgaaggaacttccgaagttcagcgtatggttatttctggatcattattaagataatcgtacagttgcgtcacaacaagattgaagaaaaggagataaataatacatgaatatcgtagtatgtattaaacaggttccggatacaaagggcggcgtaaagttcaacgcagacggaacactcgatagagctgcaatgcttgctatcatgaacccagatgacaaagctggtcttgaggcagcacttagaattaaggatcagaacggtgcaaaggttactgttcttaccatgggacttccaaaggcagatgctgttcttcgtgaggctatggctatgggagctgacgatgctattcttgttaccgacagagtattaggtggagctgatacatgggctacttccacaacaatcgccggtgcacttcgtaacttagattatgatctgattatcacaggacgtcaggctatcgatggtgataccgcacaggtaggaccacagatcgctgagcatcttggacttccggtaatctcttatgctgaggatatcaaggttgagggagattccgtaatcgttaagcgtcagtatgaggatagatatcatgaagttaaggctaaaatgccttgcctgatcactgctctttctgagttaaacgagccaagatatatgactccgggtggaattttcgatgcatgtgacaaagaagttaccgtatggggcagagcagacttaaaggatgtagatgattctaaccttggtctgaaaggatctccaacaaagatcgctaaggcatctgataaggtaccgaagggtgcaggagagaaagtaaatctggatcctgcagagtccgttgcatacttaatcggaaaattcaaagagaaacatattatctaagattatagagaaaagtggtgaataacatgggtttagaagaatataagggcgtatttatctacgcacagcaggtagacaatgaacttagctctatcgcttttgagttaatcggaaaggcaaaggagcttgcaaaagatttaggaacagacgtaacagcagtccttcttggatcaaacgtaaagggcttaacagatgagttaggcgagtatggcgcagacaaggttatcgtagtggacaaccctgaacttgagacataccgtacagagccatatgcacaggctcttgcagcagtcatcaatgagtacaagccagagattatgttagttggtgcaacagcaatcggtcgtgaccttggtcctaccgtatctgcaagagttgcaactggacttaccgctgactgtacaaagcttgagatcggtgatttcccaatcaacgcagttcctggtaaggaagacgagcagaagcacaaccagttactgatgacccgtcctgcattcggtggaaacacaatcgcaaccatcgcctgcccggacaaccgtcctcagatggctaccgttcgtcctggtgttatgcagaagcttccaaaagaggctggacgcaaggcagaagtaatcgagttcaatcctacacttgagaagaacaaccgttacgttgagattcttaacgttgttaaggcagttggaaatgtagagaacatcatggatgcaaaggttcttgtatccggtggtcgtggagttggaagcaaagagaacttcaagatgctgcaggatctcgctgatgtatttggcggaatggtaagctgttcccgtgccgctgtagaaaacggctggttagcacaggattatcaggtaggacagacaggtaagacggttcgtccacagatctattttgcaatcggtatttccggagcaatccagcacgtagctggtatggaagagtctgatctgatcatcgcaatcaacaaggatgaggatgctccaatcttctccgtagctgattacggtatcgttggagatctgaacaagatcgttccagctctgacagaggctttaaaggctgaaatgaagaataaataatttcatcttacataaagatgtgaaaagaaaccgccgcggatttccgcggcggtttttttgtgtaaggaaatacttgacaaacaggtttaaatgacttagactaaaagtagtctaagtggtttagaccaaaaataaataggtaaagtaataaatacggtgatagaaatgaaaacttatttgacaaaagcagaattaaaattgatggaagtaatttgggagaagggtcaaattccttcaaataaacttgttaaagaatgtttagagcggtttaattggaaaaagtcaacaacctatactaatttgaaaaaattagttgataaaaaaatggtttgtaattcagaggcagttattactgtattaaaatcaagagaagattatgaaaatggtcagagaaaagaagttataaaggaatatttttcaaattcgttaccgcaatttgtcctttcgtttatcaaagaaagaaatctgacaagagaagatattcaagaattggagaaagtaatagacgaatataaggaggaactacatgaatgattttttcaaattttatagtggttctttgagtggaacaataatagttattataatatttttatttataagatttttattaagaaaacagtctaatcacataaaaataatgttgtgggtgatacttttgatacgtttattgtttccggtatctatatatacggaatatggcattttgtattcggaaacatttgttgaaaagaatgaaaatctttctgcacaggaaatgaaaagtgataattctttgcaaatatttccaaaagatgaaaatacatcgaaaccatacatgggaaaaaagaagaatataaatattcttatgatattgtggtatataggtcttttggtttttgctgtatattatattatacagaggattgctgtttgtagaagagcaaagaatgcaaagaagatatcttcacaggatgaaatctatgagtggaaagaaagcatggcttgtgttatcggcttagttaaaccaaaaatatttttgccatttgatttgagtccagagcaacggcagatagtgttacagcatgaaaagacccatataaaacgccaagattatctattgatgatgttgtattatatagctcttgctttaaattggtataatcccttatgttggttaatttattttggagtaaataaagatatagaaatggcctgtgatgaacagacattacaaaatacatcaatggaggaaagaaaattttatgccagaacattacttcggttatgtgataaaggtagattaaaatatgtatcagctatgcgaccttttatttgcgaaaggagtacattgaagatgcggattaaaaatattgggaaagaatatagctgccaaaaaacaatatatatagttgttgccagtggattgttattagtagtattatttggaagttttctttataaaaaaattggtttgaataatgttgattcgaaagaacttgcaaggctggcaagttacaaatcaactttaaattttgatgatacaatgcctaaaattggttatgtcggaaagggacaattagttgtttatgacaatatgggggtgtatgtttatgatctttcctcttcagacctgacggattatgttgattttgaaaaaaatcattttaagggattacagggagatgatgcaacatttattcatgtatcgaaggatggacggtatatccagctaagtgataatgaaaaacagttgcagtatgatttgaaaacaaaacaacaaaagaatcaattagataaaaaagaaagctggaatccgaaaacagaaccgatgtgggtggagaccgcagaatattacagcgtaagcgatgtgtattatataggtgaaggcgaaacgtgttttcttgccattaacaaaaatgttactccaaattatggggcattgttatgtgtagtatcaaatgtgggggcagaaaaagaatattctttatttgattgatgcatgagttgttttaaaggctgagatgtgcaaataatttcattttatataagtgtgaaaagagaccgccgcggatttccgcggcggtttttactatatttgtaacgaatcttctgttttacagcctaagacacgcgcaaattttacgacatcaatgtctagatatgtaacaatggaaccgacaggttcgttatagttagcagagataaaacaaaagtgaggaacgcgcgtgattttactgatgatggtggacacacccgaagaaaaacgaaaatttgtgatcctgtacgaaaactatcgttatctgatgttgaaagtggcggcggatattctgcatgattaccagttggcagaagatgccgtgcaggaagcatttgtacgggtggcaaaacatatggaaaacgtcggacagccggaggagactgccacgaaacgttatctgattacgattacaaaacatgcagccattgatctttaccgcagaagaaaccggttacaaagcagggaaatctatatggatgaacttccagaagaaaccgggcagcttacttatatggcaccggaggaagaacatggagtgttagatattttaaaaaatcttccaccaaaatacagagatatatttctgttaaaatattccgcacatctggaaaaccgggagattgcaagaatatgcggacttcgggaggggacgatacggcagcggattgccagaggaaaacggctaattgaaaaagaactggaaaaaatcaagaagggagataccgaatgaaagtaacggacgaatggctttatgaaaaaatgccgatcgttgatgcagcaatggtacggcaactggaagtgtgcacgcaaaaagattacgttttttcagataaattcagaaagcgtatgaagcggctgatacagaaagaaaagtatatgtatgccgaaaaacagttgaagaaaatcacacagaaaattgcggcagcagcggttgtgatgcttgtgggagcactcaccgtcacgatgagtgtggaggcttaccgggtacggttttttcatacgataaaaatggtgctggatggtaacatcagtatttactcttatgaatcggacgaagagaagatttccgatgctattttaaaaccgcagtatattccagacaactatcggctgaacgaagaaaaaattacggataccacatccgttttggaatatggaaatgacaaaaagcatttgattttccagcaaacaattgtgacaaatgagaaaatgatttttgacacaaattataattctgtggaacaaatcagaataaacggaatgactgtttttctatatcggtatacggatgagacattttgggcatatggggaatatggaaacagcgtatatgtgctggctggagatacaatccaaaaagaagaaattgaaaaaatatataaacactggatctggtaaaggagagagaaaatgatgaaaaagagatggattttacttatgatgtgtgcgtgcatttcaggacttggaggatgtggaaaacagacagttacagaaaaagctgaggagacagaaactgcagacagtatgaaggaggatacaacagaactctgcgcttatataaaggaaatcaatggaaatacactggtcatcgatcccgtggagtatatcagttccggggacagtgatcgactggcaagttacaaacacacggatgacgatatgcctgacggatattatatatacaataaggatgaaaaaacagaggaagtaacattgacagatcagacggagtactcctttttggattggacaagagaatttgggggaacagatgccgatattcgtgtagtaacaaaagataaaatgatttttgaaaaatatatggaaacttatacggatgcaaaaccgggaatgccgtttttcctgaaaatgaaaggaaatacggtgattcagattttggaaaaaccgatggcgtgatgtgacttgaccataagaggagcaaggtgtaaactgataaagttgatgtttattttattcgcaaaagaaaaaagagagagacggaaaacataacatccgctttcatctggaacaggaggaaccaatgcgaaacaataagaccgcggagctggtactgaccgctctgtttgcagcaatcattatcattatggcgtttacaccgctgggctacatcccacttgtggtgatcaatgcgaccatcatccacatccctgttattttaggagcgttattctgtggaccgaagaagggcggatttttaggatttatctttggtctgaccagctttatcaagaatacggttatgccgacatccctttcggcatttgtattttccccggtgctggcggccagcatggtaggcaccagcggaatcgtaaagagtgcatttatctgttttgtaccgcgtattcttgtaggaatcctgccatattttgtatatatcggagtaaagaaagcactttcttcccggcacaaaattctctgggcaagtgtgtttaatattctgatcggtgtgttcctgtttcttggtgcacgtgcgtttctgcttcatgtatttgacaagaagccattgtcagatatcgcattgtatgcagtaagtgcactggttggatggtttgtttttatggcactggaagtgtatacggtactgaaatccggcgcagtctgtgcatttgtctatgcgggtgtaacaggcgcaatggtcaatacgatactggttatgggcggaatttttgtgttatacaaagatgcatatgcaaaagccctgagtgtcgatgcaggagccgtgcttggaatcatcggtggtgtcatcagctttaacggagtcattgaagcgattgtggctgcaatcattgtagcagcacttggcatggtactaaataaattaaaaccaatccagaaataatatgttttaaaaaggcagccggaatgaaacacaggctgccttttttgttgtattctttggaaaaagcaatagtgcattcaacaggggtatgctaaaataaaaaaggtatgagtttattaaaggaggggaaaagtatgttttttaatgtgatggatgtaatttttccgattatgtttattgttgtagcaggttttattgtggttacaatcataaagggaatttcacaatggaatgacaataatcatgcaccgagactgacagtagaggcaaaggttgtagccaaacggacgaatataacgcatttcaatgatgggacagatacaactatggtacatacaaacacaacttattatgttacgtttgaggtggagagtggagatcgcatggaaatgaatgtgcgcggatctgaatatggaatgcttgcagaaggggatgttggaaaactgacatttcagggaacccgatatctgaattttgaacgttgttaactttgaagacagtttctttacgattctgccgcaagtgtgataaaatagcagaagatgtgattttttctgcaaaggagtaagagacaatgttaaaaggaaaatgtgtggtactcggtgtgaccggaagtatcgctgcctataaaatcgcctatctggcaagtgcgctcgtcaagcagcatgcggatgtgcatgtgatcatgacggaaaatgcaaccaattttattaatcctatcacgtttgagacgctcacaagcaacaagtgtctggtcgatacatttgaccggaatttccagttcaatgtcgagcatgtggcactggcaaagcgtgcagatatttttatggtggcgccggcttctgccaatgtgatcggcaagatggcaaacggaatcgcagatgatatgctgacaacaacgattcttgcggcaaaatgcccgaagtatgtttcccctgccatgaataccaatatgtttgaaaatccgatcgtacaggataacatcaaaaagctggagcattatgggtttcatatcattgatccggcgagtggttatcttgcctgcggggataccggagccggaaagatgccggagccggaaacactgttttcttatattatgaaagatcttgcctgcgaaaaggacatggttggaaagaaagtgatggtcacagcaggaccgacacaggagaagattgatccggtgcgttatattacgaatcactctaccggaaaaatgggctatgcaattgcggaaaactgcatgcgccgtggcgcggaagtgacgctgatcacgggaccggtggcaatcactccgccgccgtttgtaaaggtcgttccggttgtatctgcggcggatatggcagcagccgtaaaggagaccgcagagcaacaggatattattatcaaagcggcagctgtggcggattatcgtccggatcacccggtcgatgaaaaagtcaagaaaaaagacggggatgccactcttacgatggaacgcacggaagatatcctttcgtatctgggcgcgcacaaaaaaccgggacagtttctgtgtggattttccatggagacggaacatatgctggagaattcccgtgcaaaacttgcaaaaaagaatgcagatatgattgtggcgaataacctgaaggtagccggagccggatttggtacagataccaatgtggtgacgctgattacggcagatgactgcagggaactggaaataatgagcaaagcggatgtcgcatcagcgattgtgagtgaaattttaaagaaaatgtgttagtattaaaatatgacagacttagaagcctattataataaatttaatgaagagaagcgtctggacagccgacacggcagggtggaatttgtgacaagcatgcattatatccatcagtgtctggatgaaattgtgaaagaacgtgcaaaagaggaaattcatatccttgatatcggggcgggaaccggacgatacagcgtaccgctggcacaggaagggttcgatgtgacggccgtggaactggtaaagcataatctgggacgcctgaaacagaagggtgcaggagtgcatgcatatcagggaaatgcaatgaatctgaaaaaattttccgatgattcctttgacgtaaccctgttgtttgggccgatgtatcacctgcatgaggaaaaggacaagcttgctgcgctgcgggaggcggtgagggtgaccagacccggaggcaggattctcgtggcgtatattatgaatgaattttccgttatcacgtatgcgtttaaggaaaaacatattctggaggcgcttaaggagggaatgctcacagaggattatcactgtacttcaaaagccaatcctctgtattccatggttcgtctggaagatattgaagcattggaccggcaggtagaggtcaggcgccggcagatcatagcggcagacggtgcagcaaattatatgcgtccgtttttaaatgcgctgacggaagaagagtttgatgcgtttctgcagtatcatctggcaacctgtgaacggatggatcttatgggtgcaagcggtcacacggtggatattcttgtgaaagaggagtctgaaaacgtatgaaaaaatggatattgccaatcctaatggcaggatttttgctgacgggatgttcttctcctgcagcaacgtcatcggctttgccctcttctacggaaaaaatcacggagacacagatgacggaagaaccgggtacgctggaagaaacggaaaccgggactgcaactgaaacgcagcaggaaccggtgatacagacggtaaaaattacggcgacaggtgactgtacgcttggggcaacacagacgcatgggtatgcaggttcctttcatgaatactatgataaatacgggcaggattatttttttaaaaatgtcagaagtatttttgagcaggatgattttacactgatcaatctggaatgtgtgttgtcaaatgcgaccgagcgtgtggaaaaaacgtggaacttaaaaggaaaaccggagtatgttggtattatgacagacagttctgtggagggggcaagtctgggaaataatcatacgtttgattatgggcagcagggacttgatgataccagggaagtgttaaataaagcagggattatcttcggattcaatgatcatgtggatacctataccacgaaggatggtatcaaaatcggaattgtctccgcaagccagctgtccgctgatgaaaaacatgccaattatatccgggatgggattgcaaaacttcgggaagaaggagcggatctggtaattgcctgttgccactgggggatagagggggatcattatccgaatgattatcagcagaagctggcacaccaggtgattgactggggagcagatctgctggtcggtacacatcctcatgtattgcagggaatggaattatacaacggaaaaatgatctgctacagtcttggaaatttctgctttggggggaacaggaatccaaaagacaaagatacggcgatctatgaacagacctttacctttgtggatggggtactgcagacagatatatcagccgatatgataccatgcagcatttcttccacatcagaaagaaataattttcagcctgccatagcaaaaggcgacagaaaacagacgattattgatcatatgaatgagtattcggaaaagtacagtaaaatcggatttgacgcaaatggcagggtaatcatcagggaagagtagggggatactataattttatgtggcaagtaaataataatgataagaggaatcagcacatgaatgcaagtttttggaattatccgtcaaaacagaaaagctggccgatagacgaagaaatggaaagtctcggggaagtcattcatccactcgataatatcggtggatttgatgtacgtccgggattttatcagatgaatggtgcatatcagacagaggaaggggtaagttttaccgtaagctcccatggagctacgagctgtgtcctgctgttattccggccggcggcacaggaaccgtatgcaagaatccgcattccggaaagttataaaattggaaatacgtattctatccttgtttttggcttaaaagcagaggattttgagtatgcctatcagatggacggtcctgccgatcaggcgagagggttactgtttaacagaaaacatacgcttcttgatccatatgcgaaagctgttaccggtcagagaaactggggagaaaaaccggaaggcggaaaggattttgtctataaagcccgtgtggtgcaaagtgattttgactgggggcggtatcggaatctgaattacaaatttgaagatctggtgatctatgagatgcatgtcaggggatttaccaaagatgcgtcctccggtgtaaaaggtgggggaacatttgaaggtctgcgacagaaaattccgtatttgaaagatctgggaatcaatgcggtagaactcatgccgatttttgaatttgatgaaatggaaagtgcccgtgtggtggatggcgtgcagttgtacaattactggggctataatacggtttccttttttgccccgaatacaagttatgcatttcatcaggagcataatcatgagggtgatgaattaaagcgtctgatccgcgaactgaaagaaaatggaattgaagtcattcttgatgtggtattcaaccatacggcagagggaaatgaaaacggtccatgtttttgctttaaggggattgataacaatatttattatatgcttacaccggatggatattattacaatttcagcggctgtggcaatgtcttaaactgcaatcatccggtggtacggcggtttatcacagactgtctgcggcactgggcagtagagtaccgggtggatggattccggtttgatctggcatcgattctgggaagagatcagaatggtgcaccgatggagaatccgccgattctggaagcccttgcatttgactctattctgggggatatgaagctgatcgcagaagcctgggatgcgggtggcttgtatcaggttggaagttttccgtcctggaaccgctgggccgaatggaacggaagataccgtgatgatatgagaagctttttaaagggcgacagtggcgtcgcagggcgtgcaattacacgtatcaccggatcctccgacatgtatgatccggcaagccgcggatatagtgcatccgtcaattttctgacctgtcatgatgggttcacgttgtatgatctgtattcatataatgaaaagcataatgagaaaaacggatggaacaatacggacggggataacaacggcctgagctggaactgcggggtggaaggtgagacggatgatccggtggttatgggcctgcggcgcagactcgtgaagaatgcatttgccgcgttgttatgcagccgtggaccggctatgttttttgcaggggatgaattttgtaatacgcagtatggaaataacaacgcatactgccaggataatattatttcctggctggactggaacagactggaagaatttcaggagattcatgattttgcccgttttatgatccatttccgtgcaaagcatccgattctgcgaagggatacaaagccggcagtctgcgggttaccttccgtaagtatccataacggagagccgaaccggaattatacggactataatacacatttaattggaatcatgtatgcgggaagaaatgccgatgatacggatgatgatatgatcttttacggaatgaatgcgtattgggagcctttggagatgcgcctgccttcgttgccagagtcttatcattggaaacttgtagtaaatactttctgtgaataccaggatggggcagattttgaagcccagacacagggagatcagacacgtgtgcgtgtttcggaacgttctacggtaattttactggcagaacatgatttataaaaaaagagttgggcaccgctctggaaacagggcgtgctcaactctttttttcggtggtatcgagtctggttgtaatttcactggttccgatgaggtaatctgcagaaacattcagaatctgcacgatggctgcaagatccgcaacggtcggagaacgacgaccggtacggtatccgctgatcgtagacggcgaaacaaacattgcatttgccagctggatattggaaatattttgtttatacataatcagactcagacggtcaccaaaatctttgtatttatttttatcattcgttttcatacaaatgattttatagaaagttgatataaaaaacagagaaaacgcgtatcgcgttttaattcttaaataaatggaaaaatatttccaaaaaaataagaaattaaatccatccgccgtctaaggtgagaatctgtccattcaggtaactgcttgctgtggcaagagaatatgccagtgaagcaacttcttccggggatcccatacggccggcaggaatttcttcgatgagtgcagagcgttcttcctcggagaaacaacggttcatatccgtatcgattaccccacaggcgatggcatttacctggatattgctaggggcaagttctttgcccaaagcgcgtgtaagggaattgattccgcctttgcatgcagaataggcaacttcgcaggaagctccgacatttccccatacagaagaaatattgatgatatgtccggatttggcatgaaccatggaggggatgacctgtctgcatgtggaaaagacggatgtgaggtttgtcgcaactatccggttccagtcggtaatatccatgtcggtgagcagaccgatataagagatgccggcattgttgattaacacatcaatctggccgaaggtatccagtgttttttgcaccatgtcacagataaaagtatagtctcctacatcaccacggaagcaaagcacctgtatggagtaggttgtttcaagttttgtggcaagtgcctgcagcgtttcataagagttatggcagcaaagagccagatgatagccttcagcggcaaatcgacatgccagggctgcaccgattccacgggatgcacctgtaatcaaagcagtatgtttcattgttcttctccattctttttttgtattgtaccataaattaaaaaaattcactagacaaacaccggagaatgtgttactataattgggcagttgaaacggcgcgtggctcagcttggtagagcgctgcgttcgggacgcagaggtcgcaggttcaaatcctgtcgcgccgacgatacaaggattccggtacatgggtgagagaatccttggcaggggcaacctcagaggcttttagagagcttctggggttctttttttgccttcaaaagttttagaaaggctctatgtcaaaaaaactgtcgcacgaattttcgcgcgacagttttttcttattctaccgttacagattttgccaggttacgtggctgatccggatttaagccttttccaacggatgtgtaatatgcaatcagctggaaaattacaacagattcaaaaatcgtaaattcgtcggatacatccggaagattgatgtgtacatcacagatagaaggatctgtgatttctttgtctttggacaaaagaatgacataagcaccacgggcttttacttcccggatattggaaataactttgctgtatacatgtttctgggtagcagcggcaatgacaggaaccccttcactgaccagggcaatggttccgtgttttaattcaccagcagcataggcttcggcatggatataagaaatttcctttaattttaaagcaccttccatacaaagggtataatcgagtccacgaccgataaagaacgcgttgttggcattgatcatgcgtttggtcagctgttcaatatcaggagcctgtgcaagaacttcctcgatgtaatttggaatttcctgcagtgttccaacaaatgtacgtgcctcttcgacagaaatcttttgctgtgtcatggcaagtttgcatgcaagcaggtaaaaagaagcaacctgaacggtgtatgcttttgtacttgcaacagcgatttccggaccggcatgtgtatataatacatagctgctttcacgtgcaatgctggagccttttacatttacaatagacagtgttttctttgtatatttatttgcaaggcgaagagcttccaaagtatcaatggtttctccggactgggatacgacgatcaccatggatttttcattgattacaggttcttcataacggaactccgatgcgattgccacggtaaccggaatatgcaggcggttctggatcatggtttttcctaccattcccgcgtacattgcagtaccacaggcaacgatcgtaatgtcgcttacattttcaaagaaggaatccgcaatggcatcttccgaaaaatccggaagcatatctttgatacgtggggtaatggttcttgtgatggcagccggctgttcatgaatttctttgatcatgaaatgcggataaccatctttctgggctgcggtaacatcccagtttacttccatatattccggttctacggaatgaccgtctaaatcttctaacgtaatgccgtccgcagtcatagttaaaatatgatattccggcacgatgaaataacgcttgttgtatgcgataaaagcagtcagatcggatgcaataaaagcaccgtcatcacagtatgttgcaaccatagggctgacatttcttaccgcataaatttcacccggatgatccttgaacagaacgcagaaggcaaaggaaccttcaatttcggctactgctttgcgaagagcttcttttggatctccttcgtagagtttattgatcaatgcggcggcaacttcggtatccgtctcggaaatcagttcatccgtcagatcgtatttggtggcgagatcatgatagttctcgatgataccattgtggatcaatgcaacctgtccgaccttatgagggtgtgcattggcattggtaacgccaccatgggttgcccagcgggtgtggccgattccacacgtagaattgttatcatcatcgcagattgcacgaagatcttttacttttccgacagttttccgaagtgaaatttttccggtatctttaaagtacgcaattcccgcactgtcatatccacggtattcgagacttgcaagtcctgtcaataagacatcctgagcttttaatttacctgtaaatccaataattccacacataattgaaatctcctttttctcatataattttatgatcccgatattgttttcgttcatcagaatatttttcattgtgcattatgtggtaacacgtaagtgttatcacctatgccaattgcttcgcgtaagcaaattctcatgcaattggctccatcggggtacgaatcctttgttcggatgttaccatcctgtttgtaattcgtatgcgcagcccctttctgcgttcaggcatccgccgaatcttcgatcacctgaatcctcgttaacccttgtggtgcaggaaagctgtatcacagggtacatggcgctaaagtttttaacttttcgaaatctgtttctcctttctataacagacacccccatcttaacataaaccccggggttctcacaaccgaaaatatccacagagatttacagtaattgcataaatttttcacgttacttacaatcttaaaaaaatttatacatctttgcctctggtatgatatgattaattccaaatgaaaaacatacagggaggaatctatggacgaacagacaaaacaaaaacgaaaagatatcgtggggtgggtgatttacatagcagttcttcttgccattattatcacattccgttgttttttgatgatcgggcgggtgccatctgagagtatggaaccgacactgatggttcatgactggctcatcggagaccgtcatgcatatgaggaagaaaaaccacaacgcggcgatattgtcatgttttatcagaaagatgaaaatgaaaccatggtcaaacgtgtgatcggacttccgggggagacggtttcttttgtcggaggaaaagtatacatcaatggggaaccgctggatgaatcggcttatctggatgacactgttgaaacggattgtggaggagaagataaaacctttaccgttccggagggctcttatttcatgttgggggataatcgggaaatttccctggatgcgcgatattggaaacatacctacattacaacggatgacatgaagtcgaaggaaatccttatcatcccgtttcacaggcttccgtggttttaacccttttgtgtcttgacacctgacgggcatgtgagtatactctatgtaatatgttgaatgtaacaagaaatgtctgtatagaagggtatttcgtgaaaaggagtattttatgttaacgacaagagaactgcaggacgagatcatccgcctgaagaaagaaaaggatatctgtattctggcacatgcatatcagagtcatgatatctgggaggtggctgattatgtaggggattcctatgggctgagcgtgcaggctgccaaggcagcgcagagcactgtgctgatgtgcggagtccgttttatggcagagacggtcaagattctgtccccacagaaaagggtattgttatccaacagcaatgcgggatgtccgatggcagaacagatggatgtggaactgatttccggggtgaaaaagatgtatccggattataccgtggtagcgtatattaatacgacttccgagttaaaaacgatttgtgatgtctgtgtaacttcctcatcggcagttcagattgtaaagaatatagagaataaaaatattttgtttatcccggactgcaatctgggaaaatgggtggctgatcaggtgccggagaaaaatatcaaactgctgcaggggggatgtccaacgcatgtccgcatgtcgaaacgggatgtggaaaaagcgcgaaaggcacatccggacgcacttcttctggtacatccggaatgtctgccggaggtttccgaactggcggattatcggggaagtacaaccggaatcatggactatgcaaagaaaagtgatgcaaaggaattcattatcggaaccgagaacagtattgtgcagcatctgcagtttgcatgtccggacaagcagttttatccattatcaagagactgtgtctgccacaatatgaaactgaccacactcggagatgtgtaccagtgtgtaaagggtaccggcggagaggaaatcaagctggacgaagaagtgcgtataaaagcaaaacgctgtattgataccatgctggaacttggcaattaaagcaggtcagcctgcaaagatgcgcgccctgcggagtcaaagatgatgctgtgtctccgtgttctgaaaacaatttataaagaaagaaa

SEQ ID NO: 988 - DNA, 30180 bp, Unknown
  gut microbiota DNA sequence
ctgcaattacaaggcaatctctgattacagccttggtgctgctgaagatatcattgaaacacttttctggcttgaagaaagtgccacatctctcccggcacgtggaaaaggtacaagattcccagagtacacagctcccggcaacctgattcatctgactgcaatgacacctgcaaaatcttccgaggctgccagaccaacttacaacgaagatgattatgacagtacaggctcacctgtcgcattaacttttgaatatggattggtaaatgatttcctttcggaatggtgtgaaatgaaaacgaaattaaatagtggagagatttctcctaatgaatattttgagtggaaaataacatggcctcaggcgtaaatgaaactattcacgcacagctcactttagtaccattttagtaccacaagacaaaaaacaagctcgcaaatgcccattttactaggctttgcgagcttttgaaaattattcaaactcaatcgtcccaggcggcttactggtaatatcatagaagcagcggtttacccccttcacttcattgataatcctgctcataaccttctgtaacacctcgaacggtatattggcagcttccgctgtcatgaaatcgaccgtattgaccgcacgcagtgcaaccgcgtagtcatacgttctctcatcgcccatgacacccacgcttcgcatattggtgagcgcggcgaaatactggtttggcatccactccggtgcctctccatgctctttgcggtattcctctaccgcggcatccacttcctcacggtaaatgtaatcggcatcctgcacgatacgaaccttctctgcagttacctcaccgataatacggataccaagtcccggtcccgggaatggctgacggaagacaagtttctccgggatgccaagctccagacccgctttgcggacttcatctttgaagaggttgcgcagcggctcgatgatttccttgaaatccacataatccgggagaccgccgacgttgtggtgggacttgatcactgcggattctccgccaagtccggactctaccacatccgggtagatggttccctgtgccaggaaatccacggctccgatcttctttgcctcttcctcgaagacacggatgaattcctctccgataattttacgttttttctccggttctgtcacaccggcaagttttccataataacgctcctgcgcgttgacacggataaagttcaggtcaaactgtccgttcggaccgaaaacttcctcaacctcgtctccttcgttctttcggagcagaccgtgatcgacgaatacacaggtaagctgttttccgattgcacgggaaagaagtcctgctgcaacagaagaatccacacctccggataatgcaaggagaacctttccatcaccgactttttcacggatctctttgattgtatgctccacgaaagaatccatacgccagatgccggcacatccacagatatttcttacaaagttgtgaagcatcttgcttccctctacggtatgcagtacttccggatggaactggattgcataaagctttttctccggattttcatctgccgctaccggacagtcagcggtatgtgctactacctgaaatcccggtgccggtttggaaatataatcaaaatgactcatccagcagatggtagatccttctgccgaatccgttgccactccctcaaaaagcggagaggacttatccacgaacacttccgtttttccgtactcacgtaccggtgccttttctacttttccaccgaggatatgattcatcaactgcgcaccatagcacagaccgagaaccgggatgccaagttcaaataattctttcgtgtatgtcggggaatctgcctcatagcagctgttcgggccgccggtgaggataattccctttggattcattgccttgatctgttcgatgtcggtacggtaagaataaatctcacagtacacattgcactcgcggacgcggcgtgcaaccagctgattgtactgaccaccgaagtcaatgacgatgactttctcctgatccatattgtgtttcctcctgttttctaaaatgcatttttgcatttatgtggtgcatttttcaaaagtacaccatttttctaccattataataaagcccctgcgattttacaagtcacaacctcacgttttctcgtaaaatgcaatcacatccgcgtaaactttttcattttctttctcattcagtatttcatggcgcatatgcggataggtaattgtagaaatattggaaaaacctgcctgtttcagcgtgtccacactgtctttggcacctttttcataccctgtgcacggatcttcgctgccgcggatcatcagaatcggtaatgtctcatttacgtcccggtaatttgacacctgatgcatggcagttgtcagcatatacagatcgtgaaaagctgagacgctaaatccatgcccgcaatacggatcctgcagatatgcctgtaccacctgctcatcggaacagatccagtccgcttcggtttttgcatgttttacctgcttattaaaatttcccactgacagttgctgcaccagcttggaatgatacatcggtccacgcgcccttgtgagcagatttgtcaggaaaaatcctatgcggatgatctgtgttcccggataattcgggaatccgctcagtaccacctttgcgtaactgtgtgactgggtacaaagcagattccttgcaatgatggttcccatggaatgtgcaaaaatcatcaccttttccgtttgaaaccgctccctgatatatgctgtgatctgtacctgatccgacaacagataacggtcaccgtctttttctttaaagaaccccagctttggagcatgttccccatgcccccgcatgtccgatgtcaccaccgtaaatcccacctgccacagctgttcagcgaaagcctcataacgctccttatgttcctccatcccatgaatgatctgaatgtatccccgcggatgctcacttgcaaataccgccagactcagcgcgtaaccgtcggacgctttcaatactatattttccatttatatcctcttctgcgttcgtacttttaaaaccagtccacatctgttccatgttccaactgttccggtgtcatcaaagacacggcatcaataaaccagttgcgaaatgtcatcgtccctctcttttgtgcggtcgtttcttttgccgcaagttctcctgcaatgccagtaaacgcacagcatgccactgcactctccaccgaattttccgcacttaaaaaagcgccaagcatcacggtggacatacagccgcttcccgtaatccttgccatcatcgggcttccattatgacaccggtagacgcagcttccatccgtgatcagatcagtttctccggatgcgacaagaatcatctgattttcctttgcatattgcttcatcagctccggcaaatccgtttcttctgcttccgccagcgcatcctcggctgcatccaccccggtaaccgttccacagttgtgcagcaatgcctgtatttccgaataatttccccggatacaggtcggatggattattttcatcaactccagacatttttcacgccgataggaagaccccgacaccccgaccggatcaatcacgatcggatgtcccatcgcatgcgcccgctttccggcagtcttcatcgcctcataatccgagatggccccgaaattacagatcagtgacgctgtacctgccgtgatctcttccacctcacagggatggtgtgccatcgtcggtgacgcacctgccgccagaaggatattcgcacaatcgttgaccgtcacggcatttgtgatacagtggataatcggacgtttctgttgtattttctcataaatttccaccactttttccccggaaaatttcatcacagtttctcccgtctttgtatttcaccgtccagaattcctgcctttttcattggaatggtcacgataattgcaatgatcgtaccaccacaggtactgatcaaaaacggcactacaaatgtaaacaatgccgctgctttattccccataatcagatacgcaatcggataagaaagcattccaccgatgataccggttccaaacacttctcccacgtatgcaaacggaagctttttcccatactggtaaagcagtcctgcaagcagtgcaccacacatacttcccggaaatgccagtgggctgccaagccctgtcagattacggatcaatgccgccataaaagcctgtgccagcccccaccatggtccgaccgttaccgcgcacagtacattcaccagatgctgtaccggcgcacattttgagcccaataccgggaaagaaaacatactcccgaccacagccaccgccgtgaaaagtgccgtcaatgtcaatttttttatctgcagatgattcttcattttacttttttactcctcttttgttccctttatatgatctgttctacaagttctccaagatgccgggtgcctgtctcaatatcctcgcaggcaaaaatgccgctgacaactgcgacacccgcgatgcctctgccttttaactgcaaaacattctctgccgtaattcccccgattgccacaaccggaatctttacgctgtgacagatttcttccagcagttcatgtttcatcggaatggcatcctttttggttgtagagccaaacacagcaccacttcccagataatcagcacctcccgcttctgcggctttcgcctgttccacggtttttgccgtcacaccaatgattttatccggtccgagaatctcacgcgcgtgcgccagttccatatcggactgtccgatatgaaccccgtccgcgccgacttttgccgccagttccacatcatcatccagaatgagtttcaccccgtaacgatggcaaagttccagcaattcttctgcctccttctgcacatccgcttccggaagttccttctcacgcagctgtaccagagtggcgccaccttccagtgctttctctacctgctcatataatgtttcattgcccagccaggtgcggtcggtcaccgcataaaggcggagctgttcttttttcatattattcactgttttttcctcctgcatgttatcccattataacacgcacgacaggagaaaatctatactgcatgcaaatgtgcatatttttcctttgttgccattcctccgcggatatgacgttcggatttattcacgtcaataatcttgcgggtttctgccgcaagtgccggattcacctggcacagccggtccgtgatatccttgtgaacggtcgattttgaaattccgtaatgtttggcagcctgccgcacagttgccttatgttcaatgatatagtttgcgatttccacggctctttcttcaatataagctttcaaaaaaatacccctgcattcctgtgtttgtacagtttatgcaaggatatgtttgcttattacttactttctgacttacttcccacaaagactcttctgtcacaacctgtcccacaacagttccatcgggtttgactccaaaataaagtttccttttcaataccaagattcaaatcaacacctgccttcaacgcatataattaaattatatactgcttacaatgatatgaggtcatataaagcaaatattcttgtctatgtcccatgacgaactgaatagaggacatatgccaaaaaaatagccgtccatgtcccatgacgaactaaatagaggacatatgataaaaaagtgctcatttatgtcccattaaacaggtcctgtgggactttttcatgcgctttttatacatatgtccttttgccaacttctcccgggatttttcaatgcactttttctacatatgtccctccggcaactttcaccgcgactttcaagcttactttttctctatatgtccccaaaacacaaagaaacgcacaagaaaaaggaatgttcccacacagaaacattccctctttcattatgtatttatttttccagttttgtcagttcgtcgctgtccacatccgccgcatgaccgccctcactatggcttgctgatccgttctcaaaccaccatgccacacctgcggccaacacaacaactgctactacaactacgataatgactttttctaacatgaaattttcctcctgaactctttgaaaatggtcgcttatttcaaagagtcagaagctttttccccatcctgccagtgtatgtatgccatgatccacgcatggctgcgcacaaatatgttttcgatacggcaggatgccagataaatccgggtagcattcccggcaaatccgcttgcaagtcctgcccacaaaatgacgttgcgttctgcattcagccgcgtgatccgtgcactgacggtcagacgcgcctgttcggactgtgtcagttcggaacgcccgaggatatcaaggaaggaaccctgctgccgctccatcgtatgtaccgcaagatggtccggctccgcctgcgtgatatcgtgcatgttttgtacaccatagccctgctgcaaagcgaaaaaacatatcactatcgccaaaaagatgcctatccactggtcaactccttgggcaatttctgatctgccccatcgcatccggcgctttcgtatccgcatgattccctcctttcccggtgcctgcccgtgttatgtaatcgctgctactttgtcaggccggcttttttccgaagcatggaatacagccatttgccctcatcactcaaatcgcttttcttaaaaccgctgacttttgaacaactgcttttaataatcgaagaagattcctgtttgtttgacagattccatgcaatgtagctgacaccatattcatccatcgtctgtacccagcggtctgcctcttttttgtcaatggctccgtttccggaagcatcacagattccatattccgtgacaaataccggaagtcctttgttgatggctgcggtcattttattgcgcagatctgctttgtgtgtggctgcataaaaatgcagcgcatacatgatattatcccccttgatcggatctgctgccgcctgatccacatcctgtgaccaggtcggtgttcctacaacgatcaccgcctttttgtcatttttgcgaatggtggaaatgacactcctggcataggatttgatctctttccagcttgttccgttattcggctcattgcagatctcataaatcacattgttgtaacccttaaattccctggacatttccctgaaaaaggcctttgcttctttcttatgggaattcggatttccatcgcttaagatatgccagtccacgatcacatacattttatgtttctttgccagtctgactccctttttaatcagtttctttaagtcactgcggttctttgcatctccactgcagtatccgttatactcttcggtatacatggctaggcgcacgacatttgctccccatttatcatgcagctgggcaaaacacttgtcattgacgtactgcggataccagctcaatccatgtgtgctgactccgcgaagctgtacttcatgcccctttttgtccacaagttttgttcctttgacgtgcagcctgcctgccgatgcgtcataatacgttgttgtttttgcctctgctatttgcagtccccctgtcaaacacaatcccagcgcaagcacacataccagtgcaaacccacgcaggatttttatttttttattaaaaaaatacatgttccactccacccttctccgacgggaacaggcggctccacgttccattgaaccgctgcaacattcttaatcaatcgctgtaaccttgtaatctttctcttctactgttttctttaatacatcatctgccacttccgaggacaaggtcacaacagcagtgccagcctcatggctgacttctgcggatgtcacctccggaagtgcctcaagtgctttctttaccgttgcctcacagtgtccacacatcattccttcaatatgcattgtctttgtcattactttttcctcactttcgcttgtttttatttctaccggttctgctgccggtgcagcatctttatttgcttttccgtgtacggaaaacaggttcagccgtaatgcgttggtcacgacacaaaagctggataagctcatagctgccgcgccaaacattggatttaatttccacccaaatataggataccacactccggctgcaagtggaatccctattacattataaaagaatgcccagaacagattttcatggatgttccgcagcgttgcccggcttaggcggatggccgccggaacatcccgcagacggctcttaaccaggacaacggatgccgcatcgattgccacatcggttccggcaccgatggcgattccggtatctgctcgtgtcagtgccggggcatcgttgattccgtctccgaccatggctactttgccctgttccttcagcttacggatctctgcctctttgccttccggcagtacaccggctatgacttcgtccactcctgcctgtgcaccgatggcttttgctgtgcgctcgttatctccggtcagcataatgacacggattcccatgtcacgcaattcggccaccgcctgggggctgtcctctttgagcgtgtctgctacggcaatcagaccggcacaggtatgattttgggcaaaaagcaacggtgtttttccctcttctgccagcttttgggcctgatcgagcagggtggaatctactgttacgttctctttcatgtaagaaacgctgccaccgagcagcagatcttccccacgcaccgcggaaagaccatttcccggaagtgcctgaaaatcatgtaccgccgtctgggaaatccccgtcgctttggcatgctccataactgctttggccagcggatgttcactcgaactctccagatctgcagcaagctgcatgagatcacgcttcgtatagccttctgccggtaaaatatcggtcacgcgcggctctcctgttgtgatcgttcccgtcttatccagtgctacgatctgtgtttttccagcattttcaagtgccaccgcatttttgaacaggattccgtttttagcgcccatcccatttccgaccatgatcgctaccggggttgcaagtccaagcgcacacggacaactgatgacgagcacggaaataccgcgcgctaatgcaaatccgatatcttttccggcaagcagccataccataatggtgattactgcaatggtgataacggtcggaacaaaaacaccggatactttatccgcaatttttgcaattggggctttggtcgccgctgcatccgataccattttaatgatctgggaaagcgtcgtatcctcgcccacacgggttgcctcgcagcgcaaaaatccggactggttcgtggttgccgcactgacagaggaacctttctgtttatcgacgggaatactctcgccggtgagtgctgcctcgttgaccgcactgcttccctctaggacaatcccatcgaccggaatgttttcgcccggacgcacgacaaaggtatccccctgccgcacttcggtgatcgacacgataacttccttcccatcccgcactacggtcgcagtcttcggtgccagccgcatcaggctctttaaggcatcggtcgtctttcctttggcatgggattcaagcatttttccgacggtgatgagtgtcagaatcatggccgcggactcgaaataaaattcatgcatatatcccatgactgcatccatatcgccgcgcacctgcgctccggtcatggcaaacagggcatacgtactgtatccaaacgatgctccggcgccgagtgccaccagtgtatccatatttggtgcgccgtggagcaggctggtaaaaccgctcacaaagaacttctggttgatcaccatgatgatgatggttaaaagcatctgcaacattcccattgccacatgattgtctttcatggcagccggtaccggccagccccacatcatatgtcccatggaaaaatacatcagcacgacaagaaagatgaccgatgcgatcagacgcttgcgcagtttcggtgtctcgtggtcttttaatgcttcttcctcttctgctgcggtctgttctttttttgcgcctttgggtgctgcgccgtatccggctgcgacaactgcatttacgatttcctgatcggttgccgtgccttccactcccatggagttggtcagcaggctgacagagcaggaagtcacacccggcactttggagacggctttttccacgcgggcggagcatgccgcacagctcatgccggtcacttcatattgcttcatagttgcctcctacatttcttacttcattaatttttgtaacatcgttactaattcgtctactttatcgtcctcgccgtttcggatgccatctgcgacgcaggtacggatatgttgtgccagcaggactttattaaaactgttgagtgccgcattggcagccgctacctgtgtgatgatatccgggcagtaacagtctttttctaccatgcctttgatgccgcggatctgtccttcaatgcggctcaggcgattgatcatatctttccgttccttctcggaacgctcttttttcttacagcattcacaagtatgttctttttccattcggattatgtctcctctctctccgataccctgtatgggtatccttctgcatcgcattatataccccctgtgggtattatgcaagaattatttttctcaataaaaatgagtgtcttccggtttttggaaaacactcatgtattatttattattcctctatggatacaaaaggaaattcttttgtgagatttcgatccatctccatcatatgcagaagacggcttgctgcacctgacggatgattgattccagattcccatgcctccacagtcttacaggaaacaccaagataacttgcaaatgtcttttgcgacattccggtttcgttacgaatcttctttacttcgctggcattgtattccttaacaggaacaactgtcacgacacggcgcggaagttttttttctttactttttgcatcctcaatggcttcctgtaatccagccacaatactttcatatacatcgctcaattatttcttctcctataacttcaatttcaattgttcaattaaacttttgataccattacgttcagcttgcgacagattttctttttcatttttagaatacacggtaatcaaataaataacctcttgaaccacaaaatccacatagcaaacacgggcactgccacttttcccttcatttgcaaaaggaattctgatctttcgaagtcctcctgttccctttattaccggatgtaaatcagaattttccagcaattctaattccagctttcttaaatcttcatccttaaacccaagtttatcccaattcctggaaaattcgcgtgtctgtataaatgttctgaccatcttttctcctttacattaccctattcaatagtagtatgtcaagttatcatgtaacccttcattctgttttttaaatttcatggagtcgtgggagaatcccccgtgatttgttcctgttgacatttactaatataatattcagaaacaatataactttatgaaataacattatcaaacacgtttttacctgtcaagaacaatttctattattttctccaaaagtgtggtatgctctgtcatagattatatttaaatgaggaagaaaacattgaaaaaattagtacaaagattattattcggaatcggcatcctatcccttggcatcacgttcaccggttgtcatgccagccattcacagacggattcacaaaaaactatttccagacagacagaaccgcaggccggaccaacagaaacggaaacttcttccacgctttctctgattgacgcttccggcatgacattagaaagccgcatccacacatcggacggttacacaagaaccaaagaagccgacggaagtcttgcagagtttttgcgaaactatgccatggagcctgatcaaagtcccgttctattatatgacggcagtaaaaaacgcaatcaaaaggctcatgttgccgtatttgatctcccacttgaacatgaggatctccagcaatgcgcggattccgccatccgggtatatgcagaatatttttggagtacaaagcaatacgatcgcattgcttttcattttacgaatggatttgacgcccagtatacgaagtgggcagacggttaccgtatccgtgtaaacggaaataatgtaagctggatcaaaagtgcacagccggacacttcctacgacagtttgaaagactatctgcgtatcgttttttcttatgccggtaccgcctccatggataccgaagcacagccgatcccgctatctgatctgcaggtgggagatgtgtttttaaaaggcggaaatccggggcatgttgtgatggtcgttgatctgtgcgaaaatgcagacggcaaaaaagccttcctgcttgcacagggatatatgccggcacaacaatttcatgtattaaaaaatccggcgcacgaagatgacccatggtattatgaagatgaagtcacctatccgtttcacacgccggaatataccttccagaagggaagcttaaaacgattaaattatgggattacccacactgctcctgaataagcctgtggatttcctctgtgtctttatccagtgccacttccagttccccatacagcagattctctgccagtttaaaataacgcccatccaccgccgtaacttttctgccctgccggacacgctcttctttccggtcgcagatcagtttgatgatccccaccagacgctccggatcattgctggtgatagtacagttttttagaatctgtatctgaaaaatccagatgcaccagatcctttacctcacatactccgtttgcagctttgacaataaattctcctatctgatacaagataattcccccttttccctgtatttctattgtaccacaaggaaaagagggcattcaaaggtcgaattcaacgaaaatttctcattatgaggttggggacgttgcacaatttttcaaaatctgtctcacttttgaagctgctgcaacacgggctttctttcccttatcgatctgcgtaagtacctctgaccacgcatcatacaaccgatctaagtcaccattctttgcatttttccactgtgtttcatcggactgtaaattttccagatacccttcaaactcagacaccatctgttgaagatcatgttccttccatgatgccccataacttgttgttatatacgcgtttacagcctcacggcaatacccaaacgccaccccgatcctaaaatctttttcgtccggctcacatgtttgtaaatataaaatctcctcctgtatgtgtcccagaataccctgaaacatctgatcctctgtcgtttggttccatacaatctgggcgtctttgttccgtatcaccctgtactgataaacatttgctgatacggatactatgcataccgcaattgtgattatcaacgcaatttttttcttcatcttatccctcccaccaaatgaaaatcttccattttgatatgcccttgctatcacataggatggttcataaaatgcactacaattataattatcatatttcctcttccagtgcatagtcttttatccagtcatcttctacttttagcggattttcacagtgcaatacacccgcacaactgagaagatggtaaatctttacagccccaatatcaacaaaatttaaaagccggtggattttactcttgcactgtcaagtcagcactggtaccagttttctgcattatcatatcttcccgatgtatcgaccgctgcacattcttccaatatctgtctcacttttgaagctgctgcaacacgggctttctttcccttatcaatctgcgtaagtacctctgaccacgcatcatgcaaccgatctaagtcaccactctttgcatttttccacagtgtttcatcggactgtaaattttccagataatctctaaactcagccaccatatgatgaacatcatgttcctttccagatactccataacttgtgcttggatacatattgaatgcatccaggcaataccccaacgttctcccgatctctgtgtctttttctccggattcacacttgcttaatcgaatcatctgatcccctatgtatgccagttccccctgaaacatctgatccacaaccttttggttccatgttatagacgcgtttttattctgtatcaccctgtactgataaacatttgctgatacggatactatacataccgcaattgtgattaccaacgcaatttttttcttcatcttatccctcccaccaaatgaaaatcttccattttgatatgcccttgctatcacataggatggttcataaaatgcactacaattataattatcatatttcctcttccagtgcatagtcttttatccagtcatcttctacttttagcggattttcacaaaatctggtaatactgtagcatttttcaaacagaaaatcaatcgttttcctcaccttcaccgcaaccaaaaatttctcattatgaggttggggacgttgcacaatttttataatctcaaatcctccatggtactttcatcctttaagataatttttactattctttttgaactacagaatacatccatccgtaattcgaataatgcgatcacatcgatgtgccacctcgtcatcatgcgttactataataattgttttaccagttctgtgaatttttgcaatctcatccataatcttaatgctgttttcactgtcaagagcccctgtaggttcatcacacaacagtagttccgtatctgcaataagagcccttgcaatcgcacaacgctgttgttgacctcccgagagttctgatggatattttcgaagaagatcagatattcccacacgctctgcggcatcttcaataatatgtttccttttctttaccgaccttgccaaaagtggtacttctaagttttcgtaaactgaatatctttcaattaatgcaaaattctgaaacacgaaacttacatatttttttctaaatccatgtaaatcttttttactcaatttagatacaggtatatcgttatacaaataggaaccacctgtcacatcatccatggctcctattatatgtaataatgtacttttcccagaaccgcttgcccccataattgcacacaattcattatcttgtattttcaaatttacattttttaatgcatgtgtttcatttccctttccaaaatacgttttctcaatatgcgataagcggatcattacaagcccccctcttttacaatcatctgtggtgaatatttctttataaggataactggcaaaatggatagaataagtacaagtataagcatttcttcaactaaaatttttataatatgagcaaagaaaatattctgtatcatctgatatgtttcataattattcacaaataatcttgtaaacatgacataaattcctgctcccgcaattatcaacgctataaagcttttcaataaattttccattatataaataatgactaaatccttttctgaaaatccacatatatataagacaccatactgttttttatttactataaaagaaagcgcacacatgctcaaatttataatgattgttccaatcaaaatgacgccaaacattctggaaaatatcattctgatcttttcgttttctatttgggcattttttaaataactatttaaagatgagagctgtatctgtattccatttttatcagccagtttttttaactcagatttcatattatctggctttttatacgattcatatatccaaaatccggaagatggatatacatccccgaaaactaacacgcggttatccatattataaactgccacggtagttcctgctgctgctccagatgctatttccccggaaataaaattctggtgtttttttaaaattccatccactacatatacatcatccttcccatcctcctgttttaccacatattgtgttccaaccttaacttttttaaaattatatcccaaatacaagtgatatatatttttatttatgtctgtcatttctgcttttttataaaattctaaattgcataacccaaggaccgtctgatctgcccatatccatgttaaatttccctgttcatttccctgtaatctggctaattccggaagtctgtctgtttctaatgaagaaattgatccgataaactttaccacttttttatccatcgcttcatttataaaatcctgtgctttctgtgaataaaaatctccattttcaacatataacaatccaatattatcaatagttcccgtcaaaacctgctcacactgcttttgagaataactaaaaatattattataaaagcttattacccctataagaaaaatactcatggtaataaaaacaactaatataatagaaattttcttattcaggcgaatttgatcccatgcaataattatccatttcataacacaccattccaatccttttcgtcttatccgtctacaagcttttttgctctatgtgtcacataaaacaagaataatatatatacacatccgatttccactacgattatctcaatccatttttctgttaccatatacgtgtaacgataaaagaaatgataaattacagctattattattccaccaataacagctcccatatatacaaatgacaattctctaaaaatattttttaaaattttaaaatgatcatatccaaatattctacaaattttccattccttttttctggtatatatccataattcagaaagtgcatacacacaaaggctaccaaatattacaattgcaagagaagaataaagcatcattttattttgaaataactgtaaatagttttcccttgtctccatttgatcctgatttttatttacttccatacaatgagaaattttttgaatacattcattgctatatttgtgtgaaaatactaaatatatgttttcaaattttgtttctctttgatttattgcgtgtatgatcgtttttttcaaatgttctgagattgttctccaatcaatttttattgtgttttcttcaaacataaaattcgattttaaatcataatttttctcatgatttaaccacaatttcacttctttccgttcaaaaagatctccatccttcatatatattcccgtcatatacgcatttgcatcgcattcttttaaaatatgactcagttggtttaattgatgctctgtgatttgcttttcatttacaacataaatctcttcgggtgtcctgttttctatatatccacttaccagtaattgtgtacaaataaacatcataaacaaaaacaaactcatgcatagcattaaaaggccattgtctatggataaatattttttcattttatcccccctgttaaaaaagattcctacagggaaagtcttccctgcaggaatccatattaatctgtagcatgaatttcataggtagatccttcaaaatccattgctgcatatccatatgtgtttccactccccgcacttacaaatccaacatattctgttgcatatgcattatactttgcacttttaacagacttattattgctaccagcaaacactggaacggtcatagcacataaagcaattgccatcatacatgcggatcccttcctaccaagttttttcattattatagcttttcctttactattaaatcctatataatttttctttaaattacaattatacatgtattattgcattggtagcgtatcataggcattttattttgtcaaccaatattttgtactaaataatatttacttttcgtatataacatgctataattccatatatcttggaggtgttatatggcatacaaaaatactctccttacgggtatcacagactttctagtactatcaattttaaaaataaagggggattgttatgcatatgaaataagtaaatatattacaagtgaatcaaataagctactctctatttcccctaataccatatataccgtcatgtataaactggaaaatgaacacatgatcagcgaatattcggttcttgtagggaaaaagcgtacacgtgtttattatcatattgaagctgatggagaaacctatctggaagaattgcatggcgactataagaacatgatatctgctgtatcttcaatttttgattcgctggagaaagaaggcaaacaacatgactaaattatgcaggcaatacatatatcaggtaaaactattacttccaacagtcggaaaagcagaaaaaaaatatttggctacgctggcaaataatctggaagatttttgtaaagatacttctcctgaaacaatccatgacttgtacaaagacttcggcacacctgtagataccgtaaattcttatatttcaacactcactgctgagaatttaataaaacgaattcaaataggtaagtatatacgaggaggtatcataaccctaattataatactagctgtcatagcttctatttttggaattacttcctatcgaagttttcaagtatttaaacaagaagccatttattttactaacacgaatattgaataaggagaaaagtttatatgaaacgaaaattatattatgcttaacttctgctctgtttttattatgttcaaccccggtttcggctaaagctaatattattacagacacttatcctaatacaccatataaacagtcataactgatgctgttctttcacctaatataataacaaacttcgatcgagcatcccataatattacaaagactaaaacgacttatatgcgcaactcttccggaacagtattatggagtgtttctagtaccgcaacatttacctatgatggcacaacctctcgctgcattagttgttcaccaagcgcaactgcgcctgctacaacttggtcaattaaatccatatcatcttccaaaaacgggaactctgccactgcatatgcaacagcaacacattcgtcacctagttcttcaaaagacttcacacaaagtgttactatttcatgtagtaaaaatggcactatttcctaagttttaaagcccctgcacacaacaggggcttcttttttcacatccgtaaatagtccacttacaaattttcctctccttttctccgcccggtggcggaacaaggtcatacacattctctcttacgcctctttgttattctttaagataagtctcttatgcttgctggaataggtccagtactttgatgacaattttggacagtttgctgacgtaatggaagaaactttctttgcctttgactgatatggtacccagcttgtatactcgcgtccactcttctttccggaaccggtataataattatccgatacggtattttcccctgatacataaccggcgatctcaccagccatggcatattttccttttgccgtaacttttcctacgttgtaattgcagcttccgtcgcggaattctccgacaacaccacctgcataaccttttccggtaaggctgaccgttcctgtattataacagtttttaatcttcgttccacagtaacttacaccgccaacattggtaaatccgtttttcgtattgacggtaatctttccggtattgtaacattcgctcattgacgctgcaaatcctacacccgcaacttcattatctccttcatagtctcttccagagcagacaccggtaaaggaaaccgcccccttgttatagcactgtttaatttttacagcggccgcttcgataccacacactttgactactgcgcgcgaggtctttcctccctgatttgtcacagaaattttaccggtattgccacatcccttagcctgcccataacacgatccggcaacaccgcaagcctcaaattcaagcccgagtcctgcatctccctttgctgtattcttaattgtaagatttccggtattgacacacttttctattttcttcgtgatcatggcaataccatataccgaaaacgaagtatcctcattccatgctcctgtcaatgtgatattgcccttattccggcaattcctgaaattggaattttcatctccccaggagattccggcaaaaaaacctggcagcgcatccgttactttaatatctgcattaactttactggtacaatcggtaaaatcacaggattgtgcgctatcgacaattccggcaccaccgattgtcgcttttccggatactgtgatattggaaaacctgcacttttctgcctgatataccagggctgctcccagttcttttccctgaatcgtcacatttgtcataacaatgtttttaaacgttgcattttttgcattgttgaacagtcccattcccgtatagttcttaatcgtatgtcctttgccatccagggaacccatgaagcactcctcgtgctgcacctttgtatcataatcataataattcggaaacagattcagattccccttaattgtgatatctttcgccagataataatttccatccggattctcctgcattgcaaccagatcctgctcggaactgattgcgactgcctgcgctgcataaacggtttcggttgctgcgcccgtatgcagatccgccgggctactggtacatgccaaagccattgccatcacaaaaactgccatttttttcatatgcattacctcttttatatgcgattatttaacattaattccacagtgtcgtaaatctacaaccgacacattcttaactttgaatgtatatttatgaatcccttttttaactactttatttgccggatatctatactgatagagtaatttccccggataagaagcatatgcataaaacggataagccagatctgctcccatcgtatttacagtatatccctttacaataatggtatttccactgtaggaaagagattgggttacaaacttgatttcatcttcttcatagtcgctcagcttggtgctgaccttcaaggaatatgtatttgcctttggagacactgccttactcgtctttgcatcatttttgttttcgatcatttcgactttcgccttatattttgccgaacctgccccttttgccttataagtaaatgtgtatttacttgtggcagcacttgtaaaagtcttgatcttttttgagcctttataaacataaattttggaaacaccacggacttctgcaccgccattattgacatccacctgaatgccagcctgatccgcagacatcttcgtcacttcaatcttcggctctttttttacgactgttttatacaccggttcatccgtaacggtgattcttgctataaccttaaggcgtggcagcgttttcacattcttgttttcttcttttatatagccatactgtacggatacctcttcgccaggctttgcggtctgtcctgtaataacggctgattcactccgattgatcgtctgactcattagtgacggtccaaaatcagcaaaccaggttagtgtaaccgggctttccgtagtcacatacatacctacccggataactttatccgtgtcattttttacaacaaatgtatccggtttctgtccgatataaatgtatccggtagtatttgcttcaccaaatattacactgccactttttgcttctgtaagtgtgtaagttaccttatttgcgtccagatccatttcgaagttctttgcaaaaacaggctctgcatgacagattaccatgaccagcaaaagcatacatgctgctatccccaaatacagcagccttcttccttccatttgtgtttccttaaatttttccaccataaccagtcctcctttgtcgtccatttactttaaaattatttatatgcatagtagataaattttgcaagttccacacgcgtaacggcatcgtccggtctgaatttatgatcaccattgtctttgatgatgcccttggactcggcccatgctaccgcatccgcataaaatacccagtccttgtagtccgtaaatgttgatttctgggatgctttcggtgcaccgatgctctgccatacataatacagtgcatagccacgctggtaagcatattttccttcaaagattccatactcaatcagccccttatccactgcccacaatgcagctttatagtaactgtccgtactcttgacatccggaaaatgatttaatgctttcggtgtcggagatccgtttgccttgtacaaagcgttaaatacatcacccttggtgcagattgccttggaataaaattcgttcttgctggtaggctccatgatcttgttttttacaacccatgcaactgccttggcatcggcagcatccacatcggtgtacgaggaggtggaagatgcatttttaatcttgatcttcacggtctttatcgcattcagattgatcgtatagccgccctttacttttttcatatagtttgtatcaagtggcagatacgatttcacacctgcctgatccgtacagatcagatattcgccagccattgcctcctcatctgcaaaagtggtctttccggtgcttgttgtgtaggacttgatcttcttactggaagatgcaaagatctgcactgcctctgtctcataagttccaacgcccagatactgataattttcccgtaaaatatttgccttatgactggcactgttcatccatccacgcatcgcaagctgtgccgtaacagtttttgtacatttgtacatattctcgccgagtccggtattcttaaaagaagacggaacggcagtcttgtagctggttccatttggtctggtatgtgctggctgtgtattgttgacattttccttggcacggactgcggttgctttttgcagtgctgccggcatggtaagaagctttttcccttcctttgcacgctcaatattggtcagccgcaaaatattccattcatcctcagaaacggcaattcctttttccggccggttgtttcccaatgtcggaatcacttcattgatataaagttcccttgtctttccatccagtgacagattcagataggctgtaacgcctcccttactttcataagttgcatctaccttgcggaacgatttccactctgctttggttccgttttttgctgcagcagtaattactttcatgacctgtgctttggttgttgtattggtcatattcattttgccggctgctgaactcattgccccccagtcttcctcgagtttttcctctgtcgtacccacattgtctgcttttacggtcatctgcggtaggatgcagatcatcataataagtaccagtgccagactgcacaaattttttcctatttgcaggattatttttttctttgctttcatatacattcctcctatgcttctttgttgttctttaagatcagccttttatgtttgtttgagtatgtccagtatttggaagaaagcttcgagcagtttccgaatgtgatcgaagatactttttttgctttggactgatatggtttccaggatgtgctctccgatccgctttttttgccggaaccggtataataattatcatagaccgtcacaccgtccaagtagctgtatccggcatttccggcaatctcacctttgtaaagcgttttgccttttcctgaaattttaccggtattataattgctgtaaccatcatagaactctgccgcgataccaccgaccagaccatttccggtcaggcttaccgctccggtattataacaatttttaagttttcttccggcatagcttacaccacccacacaagccgttccgcttgtcagcttaactgtaatttttccagtattatagcattcacttgttccatatccggtgccaacgccctgaacccagatcgctttatcaagcgagtaatccgtacaggcacctttataggaaatatttcccgtgttatagcagcggctggctgctttcgctgacgaactgaacacaccggctatcgttgcccttgtcgttgattttttaccgcctttatttgtcactgagatatttccggtattgctgcatcctgtaatcttttttctacactcccctataacaccacaagcggttaaagccggtccatattccggatcatttttttctgtgtttacaatcgtaatattgccggaattggaacagttttccatgctttttgcataacttgtaataccatataacttatagcttagatcatcaacagactcactggtcactttcaaatttcctttgttcttacaattcttgaaagtactgccagcacttccctggctgattcctgcaaaactgatccaaatttccttatcttctgcttcaatattggcatcgaccttgctggtacaatcggtaaaattacagttctcatcatgaagtacaattcctgcgccggctgtctttgtactgccggatactgtaatattggtaaatgtacattttgtcgcactatataccaaagctgcggcactctcagttccttctatcgtaacatttgtcatgataatgtttttaaaggttgcattttttgcattatcaaacaacccgattcccgcataatttttgatcttatgccccttaccgtccagcgttcccataaaactgtccacacggtaatcaccattatcgtctttgtaatccgggaacatattcagttttttcgtaatcgtaatatcctttgccagataatattttcccttcgggttattctgcatggcgatcagatcctgctctgaattgatcgcggtctcctgtgccgcgtatacggtctctgttcctgtctgtacatgcagattagccggaacattggtacataccaatgccagcgccatcacaaaagctgtcatttttttcataagcatttcctccgttgtgtccatttttcagactatctggcacatctggtctgatgtgcattcactccgggaatatagtaccacattttaaaaaagttctgctgttaattgcgcgaattacagttatttcgacatgaacgattttaaaatgccgtcatttacggtttattgttatgaaaaaacagggaacacctctgctttgtgcagggtgttccccgtttttctctataacagccacttcatctctgcaaaaaattcccgcagcatattgttcggcagatattttggtgtggaatccgccgcaattccacagacatcggaaagtccgtacttttttgcaatctgtaaggcgcggaatacatgaaaattgctggtcacaatgccaacggatgcaccctctttcatcagctttttactgttcgtgatattctgcccggttgtctgcgattgatcctctgtcaaaatccgcgcagtatcaatgcctttttcccgcagatactgtgccattccctctgcttcgggccacggctcattgcttccctgtcctccggaaacaatgcagaccgtgtccgggttttcattcagatattccacagccttatccagacgatatttaagaaccggactcggaccatcctttctcacctgtgcgccaagtacgataatatagtcgagcccccctcgtccatccgcgtgcatctggctgatcacacagccctctacgatacaaaacacaagcagtccgatacagacaatcattcctgcaaagatttttaccggatgcggcacctttttccacacttccatgtacacggaaattccaaacaaaaacaccacgatcccgatgccaatccatataaggaaaaaagcggtgccggaaccggtcgcatgaaccattaccgcataaatcacactcaggattccaagcagtaaacatatccaaaatatcatcatattctttttcatttctccatcccttttcactccgctaataccggatatgaaagccattttcctgttcatccggtggtatgttttgccgatccatcccggtaatatcaatatatctgtcctgtttcaactgctggatcatctgatcaatctctccggcaagcccctgtagttcggcactgaccgatccatcatattcatttcttacccatccggtcacaccatagtactgggccagatgcgacagacggtagcgaaaccctaccccctgcacatatccggtgaaacagatgtgttctcttcgtttactgtctgacataatttcccctaacgataactctgatacaatttttcaaatgcagaaaacgaccgttcaatcatatcgtaatcgacacagtaagacacacgcgcatatcccgggcagccaaatccggtcgcggatacgatcagaagatcctgctcttttgcacgctcacagaatgcgtctgcgtccggctccaatgctttcacaaacatgtaaaaagcgccctgtggcttaaaacattcatagccgatctttgtcaggccatcgtagagcagatcgcggtttttcctatataattcgatatccccggtgttgccgacacaggatgcaatcactttctggaacatgctcggtgcacagacataacccagcgcacgcccggctcctgcaattgccgcatagaccgtcttactctcggtcacttcatctggaacgatcacgtagccgatacgctcgcccggcagtgacagagatttgctgtaggaatagcataccagagtgtttgcataatattttgtcacatacggtacttccacgccatcgtatgcgatctcgcggtacggttcgtccgcaagaataaagatcggtgtgccgttttcttcggatttctttgtcagaagtgcggcaagtttccggattgtctctttcgaatagacagctccggacgggttgttcggggagttgatgatcacgcctttggtgtgtgcgctgatggctttttctaaggcttcaaaatcaatctggaaatcgctggtgtgaggcggtaccacaacaagtttcgctccgttggcttccacaaacacacggtactccgggaaaaacggtgcgatcgtgatgaattcatcttccggtgaagtggtaagtgcacggaaacatacggacaaagatgcggcagctcccatggtcaggtaaaaattgtctgccgaaaacgcagtctcatacgtcttgttcaggtaatctgcgattgcctgtctcgtctcgatatctccctgtgcagaagtatatccgtgtaaggaaatggaatcgagtttgtgtgtcaggtcacggatggtctcattgacgcagtccggtgccggtacggtcgggtttccaagggaaaaatcatagacattttccgctcccacaactgctgcgcgctgcttgccatactcaaataattcacggattgccgaacgctggcttcctaattgatacatatcttctgctacgaacattttattttcctcctcatataatcaggtgtctttattaaaattcaaggcttttcaaccttttatatctcctgtttttcaagttatcgcttctgacttgccagataattttcatactccagccggctcagccgctcgatctcctcgcggagattgtccgccgacatgcgaagcgccccctgactcatgaccgtaagctgctccagcccgtcatttgttgcaaccgtgacacggtacttgtgcccgatctcatgcacggtgcgctcgataaatgcatccgcggtctcatcggttttcgtgtagaccacatccagattgtgatatttgcttttggcacccggatgttccttgcgcttataggcatcaaacaccaccagcaccggacagctcttgtatccctgataattgcttaaaatatccaaaagcttgtcccttgcggaatcaatattgacacgagaaagttcgtttaagtctttccatgcaaaaataatattgtaaccgtccacaatcagatattcttcctgcggtcccttcgccggatagatcggattgccttttttatcatattttaccacattcggcttcggcgcatcggatttctttttcagccacttgcgccgttcctgatcttccatatcttcgcggctcatgccaaactcgcgagcataaatctgctgcagctcctgatctaactcccagccggtcttgccggaagactgctgccggtgcaccgggccaaaactctgcccgttggtctcataactgcgcccgtccgcaggtgtctgggtttcctcctccggcacaaactgccgcggcagatgcatataattatccacctgatcccacggcacgataaatccggcaccatgcgcacagaataccgatccggtcggatttgccgtatctgcttcactgtcgtatccggtttccgcgatcacttcctcactgttgtgacagacatcataaccggaaagttccagtgtcagatgcccgagtccgcgggtatacgcatgcacctcactgctgtagtcctgcattgttgcgaccggaaccgtgccctgcagcacggcgtagtccatgccgtttccggtgccaaattccggcgaatcaaacttgcctgcacgctgctttaagtcggtcatggcacggccaaccatctcctgcggtacttcaagcgtaaacgcatacactggttctaacagcacgctttccgtactctttaacccctgccggatcgcgcggtaagttgcctgccggaaatcaccgccctcggtgtgtttgatatgggcacgtccgcttaaaatcgtgattttcacatcggtgagtgccgatccggtcagtacccctggatgctcccgctccatgatatgtgtggcaatcagcctctgccagttaaggtcgagcacgtcttcactgcacgcactcgccacctcgatgccgctgcccggttcgcccggctccagcagcagatgcacttccgcatagtggcgcagtggctcaaaatgtcccacaccctccaccggctttgcgatcgtctccttatatacaatgttgccctgtccaaagacaaccacaacaccaaaccgctctttgatcaactgcgtcagaacttcgatctgcacctgccccatcatctgcgcatggatttcctgcagctgctcattccagaggatatgaagctgtggatcttcctcctcaagctgctttaatttttccatcatctccacggcattcacttcatccggcagataaatccggtagttaagcaccggctcgagtaccggcacactgctctcctgctgcgcgccgagtccctgtcccggtacggttgtagtaagtccggtcacagcacagacttccccggcctccaccgcctccgcggtctcaaatttttctccggaatacagacggatctggtcaactttttcctccagaccatcataggaaatccggtctttgacatgcagcgtgcctccggtcactttcagataggtcagccgcgctccttttgcatctctgccgatcttgtatacacgggcagaaaattcgtcttcatactccggtgccctgtggtattttgcaaagcctgcaagcagttctttcacaccctccactttgagtgccgagccatagtaacacggaaacagatcgcggtttgccaccgcattcgccagatgctcctctgcaatgctgccctgctccatatactcatccagaagtgcttcgcttcccatcgcagcttcctcaaaaaatgcttctccgctgtcctgtgtaaaatccacacatccatcggacagttcggtttttaactgctgctgcacgacttccttgtccgcccccggcagatccatcttgttgacaaacaaaaaggtcggaatgttatagtgccgcaggagccgccagagtgtccgcgtgtgtccctgcacgccatcggttccgctgataacaaggattgcatagtcgagcacctgtaacgtgcgctccatctccgcggaaaaatccacatgccccggcgtatccagaattgtcagacctattgtctgttcactatgcgaactttcattcgtcatttgcagccgaagccgcgcctgcttggaaaaaattgttattccacgcgcccgctcctgcgcatccgtatccagaaatgcatcctgatgatccacacgccccagcgcacggatctgcccggtggcatataacagtgcctccgacaatgtggtctttccgg

SEQ ID NO: 989 - DNA, 180 bp, Unknown
  gut microbiota DNA sequence
aaataacaacaacgaacattgataactgaacagtgaaaaaccttgaaagattttgagaataattcaagaacgcttctataaagaagcaaccttaaaacagtaaattggaacattgtttctgattaaaagccagatttaattctggcaggacaaaactttttaacatgagagtttgatcct

SEQ ID NO: 990 - DNA, 2069 bp, Unknown
  gut microbiota DNA sequence
tggaggtttacacaaactttgggatactcccggtacttattacgctagcgtaagacttaattgttcaggtcttgctcgtaaatcttcaattctactagcaacttttttagataactcattcgcaacattttgcaaaaattcaatacatttactctgattccacatattcaaatctacatcattttgatagttttggataacaatcggtattatctccgtatataacaacaaaataatttttgcaacacgttcataatatgtattattttgaattaattctcctgtatatctgtcctctgataaaaaaaccgtatttctattatttaatgtaacccctatatttgtgtgtgttctatatgcaaagtctatattaatctgatttaaattcttactttcaatcaaaaaagaaagtgtgctaataatattcattactgattcaccctctgcactaatagttgtcaaagaatcttctgtgtcgcctttaaatccccttattgtgcttattgtcaaattttctaaaaactcacttcctccctcaagaacattttctccactatagattttacttatcatccatacaaacttatccgctgtaaaaggtaaactactttttataacttctccttttccagtataaaacaacatctttcttattaatgttagtgctccagaatttttgtctataatgtattttacctttccatttatctcatatagtataataaagcctgtctttttcgaaactgaatcatcatctaatcctaatcctgctggaatctgatcaacagaaaatgtaaataaattatatttaaccttttttccattgaatacttctgttttattatgctcaaattgtttttcaatcgaccaatttacatatcctgttgacgtatcagattgttcatcattatgaaccgataaaagaagattttctattttttctaaatcagctcctgtttcatctgtccatcttgtaatttgcataaatctactctccattctgcacttttatacaatttgtttgaaatttcactcccaaacatttattcatttgaggcttaagaataattgataaactactatcttctgtagatctaataaatgaaattttatttttatactcagctatttgttctacaattcccgtctcaggtaacaaactctgaaactcccaatttaattggttttgggaataattcaaaacaatatccgatgtgcttgcttgtgatgataaccattctggtaattttaaacttattttacactttctcaattttttgagattaccttttaactcgacgtagcaatttacgcttgcaacacccataccttcactatcacacattattgacggattattatttatgtccttatcaatatcagatacataaaaaatacattttacagtagcttgttttcgttctatccaactttctatcaaaccatatatagtttccgaaatagctaaatatactgtcaatcctacttcatatcgataatcctctggcacaaatacaacatattcaaatagattaaaatagttcaacgatataacagctacaatcggtataattaacgattttaaaattaactttactatggtgggaactctcactttatgcacccctccataatacttgatattttattagaaatagcatcatactgattttctgaaatcgtaattattccgttcacctgtatagaaaaaagtgctccatttccagtcagtaatctatagtttactttttttatttcaatagaatcattttggctcaaaaaagatagtttattctttaatatctcccagtatccagcattttgtttcatagaggaaagaattgtttgtatttcagattcaagttcattatcatcaatcataaaattaattgatgtaatttccactctattgttcagtaaaaaacactgcataatttctatcataatatcagaggtaacaatacactgattatagccttctttttgcttgtcttgaataaatgcataataattctgattaacatcatattctgcacattctaccttcccggaggcattattcctaaaca

SEQ ID NO: 991 - DNA, 65720 bp, Unknown
  gut microbiota DNA sequence
caaataatgtatgtattataattgcatctcatccaccttacaaattccagtccattcccatccggaagattcacatcacaaatggtaacatccacattatgatcacttgcaattcttttcgcttttttcactgattctgctgaaaaaacctcgtatccggattttttcagtgagaatgtaattccacgatttaaattttcatcatcttcaaccacgagtatacctggcatagcatgtgcacctctctttattaactatttttcctcttcgttacatatttgttctgcctcaatatcctcggtaatgactttccctgtaatatccctataggcttcttttattccatttttgaacgcccacttaattataaaatatagttctccgcagacccttgaaaacattggatttatcgcaggtgagcttttccttattgtttcccttgtgttatatcgtcccatcggtgtttcgaactctgatgcggttttggaatctcgatttatcttttaccgatacttttatggctgataaatattctaaattcggtcctgcaccaagaactccttcctctatgcagcgttcttatctgctttccattgactttaaagttacctcgataacagaatgggctgcccagcttaaaatcaatcccctttatgccatcctcagtgggtttgaacctggtaatactcccggggttggcactttttatgattttataaaccgcttgtggaactctgatgatgaccatatgtcaccacatatccatcctcttaaaaccaaggttaagaagcctaaaacaaaaggcacgaaagctgattctgtatccacaggacttattcatccggattctttggctctagccggtgatggaactcctgttgtaacttcacacagagaacggaaaagcgtatctgtaaatgcaaagacaatggcattactgactgcaaatgtgaccgctacttttcccagcctgattgtgatatcggctgggattcttcccgtgactgttattatcatggctatgatctgtacatgcttgttgattctcaaagtgacttaccggtatttcctcatttttgctgtgcttccaaacatgattcacatggattcctgcacgcttttttcaggatgaaattcaaatgtcctaaaatcagtcataaaaatggctgtatctcctgtacctgcgaaactccctgttctgatgcaaaatacggacgcacggttcatttggtcatgaaagatactccaagattattcaacaatccgccaaggagcagtaaggaatggaagctggaatacaatgcaaggacttctgctgagcgttctaacaaacgcgagaaattagactttaaattagaagacggcagacaccgctcaactaagatgtggtactgccgcctctatcacatcctgatgttacagcatctggatgcatgggatttgccgtttgaatccaccctgagaaagttaattttgaacgtagcataatcctacagatatcatacctcattttttggcatagcaacagtcctatgtctattttttgtacccattttttctattccgaataatatttgcttgtcaaagttcaatgccagaatttcgctggcatgatcaatcagaattccgagagatcatataattctaatctgaccagaatttaggtttacactgtcttctcgtatgttagatatttcatactctctggcgcctgtagcaaaaaggacttccacaactgctatatccctcaatttgtatttataacctgttaaaccattctcctttaggcaatcatacatgtaatttaataacatctctatttcttctcgcggtattaccctcggaagagtcaaggtttctttaaatttaactttaatcttcctaaaaggattgcgcgatataatctcttcttcctccaaataattataaaaggcctttaaagatgcgattttcctctttaccgtcttctgcttatattttttatgtaattcagtaatatactcttctatcttttctctatccggctcatcacaacaaataaatgcaaagtactgacgtaaatcaatccgatatgctttgagcgttttcttatcaagttcttttctgtattcacaatattccaaatatggcaccaatttatcctgtatcctcatttcataaaacctccattgtctttattatataaacaacatactatcgttttcagtactattttcaatagaaagttcttccaaaataagaaaagtcaaggtgtgatactttctaacagaaatctgctaattttctatactatatcaaatgcagaaaaccctgcgagaacatttctgatcctacgcggggtttttcactcattataaaatttctacttttcttctgctaccaatcgtgcatatttttacggataaatattcagcagttcttccggagaaaacaatgtaatcccaaaggaaagaaaatcctttttattcctcgtcacaatcgcatcacactgattagccttcgcacaggttgcaagcaggcagtcttcaaaatcagatgctctctgcaaataagcattcaacacatcttcgttcgtcactgttagcacttttgctatgtccaaaacggagccaagcgccttataagccagatcaacgctgtgcaactggcgacgaatcagataaaaaatatctgttgcactggatgcggaaagaaatccttgaacccttttattctcgcacagatccagaacagcctttgaatccttaaaaaagggttccctctctgccagtacatccagaaaaatattagtatcaatcatcaaccgcatatttagcaagcctctcttctctcagcatctttgcatcatagtcatctgccagtttcccggcaagcattccgctgatagattccactgcggaaacattcggatttaccatttttgcaactgtttttccgttccgggtaataaaaatatcctcagaacgcaacatatcaagatatttaccaaaattggttttaaattccgtagccgttacgatcatctgaaaacctcccttgccttttgatatttatattatactcgattcttgcagttttatcaattcatatcgctcggtttttcgcatatttttgtataaatcgtgcgattatacttaaaacattcttctgtccctataaccgcaaaagattcctgccagatatattcactgccttatcgtgtagatatcatctactagaaattctactcttttttatctgtattaatcttattatgggagcctttcgttaatctgtgaattgcacggaatacaatatctccattttttcccaaaatatcactttttattggaatcgtaacaggattgcaaccattcactctgatatccatttcggtaaaagatacaggtttctgtcaggatttcaccactctgtataaccggccttcctaccatacatgataacaaccgcttgacagattcaggttctccagccatgcctgctgctttatttccggtgtaatcggatatgagatttctctctccagatcatcctcatgtgaatttttaaataaataatttgttgtcacatcaaaataaacctctacttttttgaacaggtccactctttcattgctataacatacaagcagaggtattaattcgtagaaggtttcccttctatgaatcaatacccctgcaatgcttcctcattccaagcaaagagctagcaaccatatttttaatacgaaatgttggtgctttaatcattcatcagataacgacatttctttttgtaccatatataaccgatagtataatccatgatgcctaagaagttcttcatgtatacctatatcctcaatttctccattttctaatacaattatcttatctgctctttctaacatgcaattaaatctatgaattatcaaaattgcaattttatcccgcatttcctcccatatcatatttagcacggcttgttccgaagcaatgtcaagagatgcattgggttcatcaaaaatatacacttccgctggcttaaacaaggttctacccaatgccaatttctgccactggccaatagatatttgtatcccatcagtaaactgatagcctaacggttgttcaatattatctttaaaatcttccaaggttactttatccagtattttataaagttcacgatcattttccacgcgattatcaccatatcttatattatctcgaatgctactctcatactttatgtaattctgaaacattactgcaaccttttttcgatatacttccaaatttatatcttttagattaattttatttatatatatctctccttcatagtcactatatatacccattattatttttatcaatgtagattttcctgaaccattataaccaagcaaaacagtaaattctcctttacaaagttctaaactgatatttctaagaacatactgctctttttcctggtaacggtatgacacattcttcaattcaattttgtcaattttatcaattataatacctttctcatgagtatcttccgactgtatatcaaaaaacaatcttatttgttcaatcatagcactatttttataaatataagatatttgcgtaaaaactgacataatgttttcttttaaactatcaatagaattattgtataaaatgaaatccccaataagaagatatccattaaaagtctggattaatatgtacatcattaccagacaatcaactatgctatcaaatatgttaatgatactatatgtccgggttcttttattatgcagcctgataaaatcaaaattgtatttttcctttattttctcaaatttttttataaaatatgcaaaaagttgatacaattttatctctttgaaattttctgaatttgtcagtaaaaatgaaatatacgatgattttctttccatttcagtgtttctgatactgacattatattcttctaaattatattttcgctcgtaaaaatatcgaattacaggcaatactattattaccgaaaatataaaaatattgtaattggcaataattgcaatataagaaatcgtactgatcaatactgaaataaatgcaaaaagtatttttatggttcccaatatcccggcatttccatcataacgggttcggttaatcagatcatatgtttttgaattttcaaagtccttactatccagcatagctattttttttaaaatctttgcctgtaaataagccccaaactcaagttccaaattctctattgccaatttcaaataattaaggcttattccgcaaaacagccggaataaaatcataatcactaattttatgataagcaactctatcccagccgttttgtattggagaatatttatgatttgctgtatcaataccagagaaacaattggtaaaataccgcttataacagcttgaaaccaaaaaaggcctatgtactttttttggaatttgtataattctgttattgaccatattatattttctataatgttttttcccttttttagcttcatatttatataactgctataccagtatcaacctattttattttcatgttgcctactgccttagctaaaccttccttatccttttcaaataaatgataataatctataaacatttctcgaacaagtttccgggatgtttcacaaagctttcctgttttatagggtatttcactatcaacagcaattgcattatcataacagatactgcacatatttcttgcccaacagttactgcatttattcctataataattcgcatagtcttcgatataaaacttataacttttatcataatcaaatcccgtttcacagtttcccagaaatgggagatttcccactttttcacatgttttaaaattaccatctacagttacatacatccttctctttcctggaatacaattcccatgtaaaaagccagaatcaattacccctttctctgtcctagccctatttgccactctgtacaattccaaatctataagtcggaaaaactcagaatcttccttctttttcaaaaaatcttccgctgccactgcctccaaaggactgattttagatttttgctgttctagtggttctaaagtttcttcaatcttcatatctccgagatccacataagaataattgcatatgattgttctcggtatttttagtgtctcgtagaagaaatgatatatatcatgtaatttctcctttgtataaggcggaaccattacacaatttatcatcaatattcttttcttttctaaatcataaaacttttccaacaatagtttaaaattctgtattgctttgtcataagtaccttttccatttgtatccaaacgatacttatcatgtatatcctgaggtccatctaaactacacatgatttctatattttccaaagatataaagaagtccagcatttcctgtgtcagtaatgtcaaattcgttgtaaaactaaatgacattttcacatctggatatgcctttttcgcatactcaatacatttttttaataatggaaaattcataagcggttcaccgccataaaaactcaacgcaaattcttcgtctttatatccattaagtattaaatcaatacttttctttgcagtctcaaaagtcatacacttgccggaatatccccggaaatttcgatgatgctcactgtaaatgcaatattcacaacgaagattacacgcctccgttaattctaatacaatttgtctgcaatgtccttctaccaattcctggtattcttcccgagtcggtacagaaaaagtccaatcatagtcagcaaacaaattctcttcatctaaaaaatctttaaattctgtattaatttccttggctttctccaaactcagggtaccgtccagtaccttttcaataaaatccctttcctcagtgctgcaggtaatcacctttccagtaccagcatcaaagtaataatgggaattcggagatgtctcaaataacataccgtatttttgattatccatagtattccttccttaatctataattaagagtaatcagattatcttttatataatgatataagggtcaaaaggtataagcgcaaataattgttttaattgtttttgaattataaacaattaagtgataaataccaatggaatcacttgaatttcattgtgcaattttaaaacaattgacacaattaatattaaaatgaccttttgaccctcgaatcatataatcttataaatttgtttcttaaatcggggagagaaattgagaattcaatttctctccccttcccttatgtaatattacataaagttttacgcaacatcagcgttatgatggtttgcgttaaaggttgcatctccgtggcctgtacaatcacaattgcagttatagaacggatcccacaatcctcttgtgctcttccaaccttctgagcatacacaaccagctcttggggttaccccatttggaacttcattaacaactttcattacaagtcctccttccatttatttctgattccctatacatcacatatttccattaactacttacggattgcgcacctccgtttttgcatccaatatccatatacaacgcaagggatattcagacaattttcagagctgccacctcaatacccgaattctgcatgagtgtgtaatcaaaatttttcctcaaaatttttgtattccatatttggaaaagtttttgtacacaagtggcagcaatataatagccagaatgccataaatagacatgacaaacggtatttgtcgaacaacaataggtcctatttgaaaaatgatcggtacttttgcatactctataatattcataaatacgcttggcatgatattaaaaaatgtttcaaaaaccggtacagcacgccctataaacggcatcatacaatataaaaagaaaggaatacaaattgccaaatttgccgaatgcatttttacagttaccagcattgttatcgccgctgaaaacaaactagcaatatatccacacagtaatattaaaaagtaatactcaccatatgtcatactataaatgctatacggctgatctatctgataaggtgtcaagaacccacttgtacccataaccccaaaggaaacaattgacagtattcccattccagtccaataaacaactgttgtcataacaatacctgtcaaaagtttattcctagttgctttagatctcccgtattttgtagaaaaaaacacagcttcggctttggtacgaaattcatcggcaaatatgcccgcagccaaaaaaccaattacaactgcaagtatgattccatatgtctgagcatacatagccattgtatcccaagaatcttttgccgcataatcaagcggcatttctatctcttcgtactttcttttcaagaactcttgctgctttgagctttttccgtaagactgaaccattttttggatattttcctcatacgttgaataaaagttctctaactcctcatcagacagacgatataacacattttgatcataaccagaatctggtgtaataacataaattataaaagataaaatatcatcatacgactgcgccgttttcccatactccgcatccggtatatcttcgggataaatttgttctagggttttccggttctctacgacctctttgattttttctaccgtcaatttacctttccacttatttctatcagcagcaagcctacgtcccgctgtaataccggtataaagttttccttctgcatcccgataacgcatactaccgacagccaggcaactaataatactagcaagaaaaaccataacgataaggataattttattgattttcttgtgaaaaaacttttttaattcatatttcatcatcataatcttcacctgctttctctccaaaatataaaagaaatgcatcttcaagggtagcatcctgccttattgcatttcttacaggtgctgttttagaaataatacgcaattctgctccctccggaatagtttttatattccctaccagataattctgtaaataccaattaacttcattctttggaactacgcactggaaaacagattcatccatagatcggaccaaatcttccgtactccccgtataaaagaatttcccgcctttcattaaaatgatttcatttgctataaactccacatctgaaacaatatgtgttgaaagtaataccagacggttttctgataattcacttattaaatttcggaagcgcactctttcgtttggatcaagccctgccgttggctcatcaagcactaatattttgggattattcagcatagcctgtgcaattcccacacgtcttatcattccaccagataaagtcctcattcttcgtttcttatatttagacaatgcaacttgccgtaatagctgatcgattctctgttttgcgacactttggcgtatccctttaatagacgcaatatacatcaaataatcataaatactcatatccggataatatccaaattcctgcggaagataacctaatattcctcggtatgtctctcctaattcaaaaatatcctttccattccatctaatttttccttctgttggcctaatgatagtacataacattctcatcagggttgtttttcccgccccattgactcctaaaagaccatatacccctttcttcatagtataatttacgcaatctactgcacgaaaagacgaaaactcttttgacactttatcaaattctaatcccattcgttcgatcctcccaaaccaattcataatcttgctgcgattttcgtacacaaaagaccagatatccaaaggatatcagaatcagaaccaaccaaagcggttctacaattgcataatagataacatcattcgcaacaatcatagaccatacaataacaaatgccatacttaaacatactgaaacatattccatatcaaacccttttttacataacaagtggaagcaaactccacttgaaatattaaagggtatcagaaaattgatagcaatactgcttaatggaatttgtatggtagcaaatacaagtataaaaaatacagtaaccatcatcatatccacaatcgcaaacaacaataatcttgctgcgcatatctgtcttaaagaatagtaggacgccttctctatttcaaaggctgaaaatcttcggtttttccaaatttctggaataataagaatagaaaatagtactgaaaaagctcccataatcctccctatgcttttcatactttccaaatcatttaataaaatccataatataaacaatgttccgccttgtaaaacccaccactttttctttatgaatttacattgttcatataagaattcaaaataagaagaacatatacgttgctggcatatatttatttttttacattgactaactacattctgaaccgctggctctctaacataatgatcttgtataagctttttatagttttttatttttttcttatataatttcattttcactactctcccagatattctgccaataatttttttgccttacttactcgatactttacaagcgatagttttatatctaatatttgagcaatctctttctgctttagtccttgaaagaaaaaaagtattgctgtatctttaatttcgtccggaagatattgtacagctttttctatatccaaccggatttcaactcccttcatactttcttctattatttctggaaattgttcaaccagaatttctttcttcttaatgtaaaagttttttattatatttcctgcaattcggtacagataatttttagtttttccatattctttatatgtttctaaagatgcaaaaaaatgtaaaaatgtttcctgggttaaatcttctgcataatttctatcatgggtgtgcaaaaggcaatactgatatatggatgaataatatttttttatcaactgttcactggcatcactttttccattttttattttctgtaataataagaaatccggttccgtccccggtttcatccatcccttcctcccttcatatgtgtttctatatagtataacaatcaacggcaataaaaagttagtctggaatcatattttttattaccatttaattactccatatactcttccaaacacatcccagtttctttcatttcgtttgcagcatcttttccaacataacgataatgccatggttcattattaattccagtaatttctactttatcagaaggatatcttttgataaatccatacctatatgcattttcatcaagccatttataaactgattcagatgaacatttcgtagtgtccgcattaatatcaatacttaatcctaattgatgctcactcgtacctggttttgcaacatatttctctgcaaggtttcttgcttcctttttcgaatatccctcctccatataagacataattttttcatccataatttcctgttgttcttcttgtgtccgatatccttctcttacaaataatgccaagccattagctcttgctgcgttaaacatatcctgcaaatctggatatattcttgaatctactttttctccattcgataattctgtaagttctatatcataattatctggaatacgataattcttattaacgagaattagattccaaccttgagaagtatctgcttcgcttgtactgaaaaatttccacttagcatttccacttagcaaccagatcttaccttgttttataacgttaatgctacttcccaatgctatagataccaacataagaaataagctcaaaaatacaattctttttaaaggacttttccgatgtcttttcatttgattttcctcgtctcaaatttatcttctattttatataacaaatgaagttcccaaaaagttagcaatctctagtattttatcaaatttaatttttacaaactaaatcttgatatcatttttcgtattattgattctcatttcatatgttcaaaatcctttttctactatatagctttcatttattggtctacagcgcatgattctctgctatgctgaattttaatcccatgaatcttttaaattgcttttggataccgaaccggcttttcggagcattggtttttcatgactcttctccacaacgtatttaaatctaataataaggaacccacccccaaaaagaagtcaggttcctgtccaacactactcagtatattttcctgtaaatattcgctaatttaaaatccattcatttaccttttcaacaatttcctgccgcctctcaaaatgcagataatgccctccatccaggcgtattacttcactcctccccgtctctgttataacctctttatgtaatggttcccacaaatccataatttcacagtttgatctggatataaactgtaataccggcaaatcttccggaaatttcatatctcttacagtttccaaggtttcctccatatgcttcaactcgttcataacatctttattatacatgtagtccatgcttaaaatccgatacacttccaattgtttttcagaatatccataggacagatccgcatagattgctttttctgaatgagcaacagattgtaaacgagtaataccagttatatttttcactttttgcaaataggcagacaatttattcagtgctatcatattaataggaaacggctcctcatccgattgctttggcacagacgggtcaattccgataaatccctgtacctcctgcggatatacattagcccagtacaaagaatataggccggaaagagaatgcgccattaaataatattgattgtagtcaagttcttttacgcattcatgcagttcttctactattgtatcaatgtttctctctgtgccagccacatcagataacccataaccaaacggctctattgtaataactatatattcttttgataattgttctgccaatggtaaaaactctaatacaggtgaagggctgccccatcctggtaacaagataatcgttgtttcattttcttctccatttatatccacaaccatattcttgcccgccacttctacggattgtccatacgcatctttaactttacctgcttcatttctcttgcaggcataattccataccactattactgccaaaataagaataagcaccagcaatatccattttatgactttgaaaataatttttctcataaatgcctctattataagtaaaatataattatattaaaagctgatcgtaccgccagtaatctgaagagtaccagacgactgattcgttacatagaatctgtaataccccgtaaacggaatcgtaaacgaggtactatgagagctgccgatcccactataggttctggtttttataccgctattattgatatatcccatctgcacggagccggaagtgcttaacttaacagtaaaattaacagttgttccgcccaagacgtaaaacatactcccgctactatccagaaatgatattattcttccgcttcctatacttgtctgcggtacccccattctaatgccttgttctccattttcctctacccatacagtttctaatattggtatcatatgcgaattttcttcagacgcttccactctgtttggcatcgccatacagagtatcattgctacaccaacaagtattctccaatttttctttccttccatattctcttattcctgtgtcttctttatatttatagaaccattcgttatgataatacggtcactggatgcatttctcaaacagatatagtaatttccttcttctaacaaaagctgtatattgttacttatactgtctgttacttggcaccacttcactctgccttcatagacatatcccacttccagggtgccggccatctccactcccttcttgtcaactcttttctgttggaaattcagttgtaatgaagtatcatagtctacataccatccgccattatcaacaccgacaaaaatcagcattgcgccgttatcaacataacactccggtatcttattctcttcatcaacagatacctctgcaatatactttgcaataggagtgccattttcatagagattttccgataaaatcaaatccgtatgtaaatcaaactttgctttataatcagatggttctatagatagctatataccagattgtgtgcgatgttaatgctgccatgatttgagcaagtaacatttcgccactgatgcacgctgtcacaattttcaatacatacacatataagctgtaatatggctgtccaatcaaacaatcctgtgtttcacctttatatttcgaagctaactcatccggggttcccagttccgttagaacaactttgatatcacgctcagttggaataacatcctcacatcgttcctccaacatatcttgtatgatcgtctctaattccgccgccacgtcttttttcatggcagatttcatatgtttcgtaactgcataaatgtatctgtcgatcaaatcattttttaccatctattcttcccccattaaaacattgattgactgagaaaactttttccagtgctctttaatctttttataaaccagcttcccatcttctgtgatgatataatactttcttggcttcgttgcctcagtttcccattcactttttagcagaccttgactctctagtcttctcagtagaggatataatgtattgccttctatcgaaatacctttcccttctaattcctttaccaacgaatatccatacattggtttatttaattgtgctaacactaccatgatgagtgtgcctcttctaaattctaaaattaatcctgaaacaatttcatcacaattcatccaatgccctcccttccgtattctttatttaaatccactgtgtttattgcactatattgtgtgccgcacactatatgctttacaaagtatactgtgtatcgcacattatgtcaataagtttatcctttgcattttaaggtatggttgcatgggcaaaagaaaatgtagcttcttccggattttctggcaagccaatcggctccctgttataataccatcaatacgcatatactatctatatctctatacgcattgaataagacaacttatttataataatgtcttgtgtacaagacgatattgatatataattatctcatatagaaagaggtgacatatattatgaatcgagatactttaaaacaaatcatgattgatcaaaaagatatttatctcaacaatccattaataacaagacaatattttctagaagccaatgtcaactattgctttgttggtatcagaagaaccggaaagtcatatatgatgtatcaacaaataaaacaattagaagccgatggaattcccctatcccaaattatttatgtaaattttgaagatgagcgtcttttggaaatgactgctgaagatttaaatctcattttagaaattggattagaaatatccgaaactgatatcaagccatatttatttttagacgagattcaaaatattaacgggtgggagaagttcgttcgcagaattgcagatatgaagtatcgaatcaatattaccggcagtaatagtaaaatgctaagcagcgaaatagcttccactttaggcgggcgttttgttattatgaatatttatccatattctttctctgaatatcttattgcaaataatatgacaaagaattacctggatgttattagcaccaaagacagggcagatgtccaaaatcaatataacaaatatgtaacctatggagcatttccagaattagttgagataagaaataaacgagcttttttaaacagcatctatcaaactgtgtatctcggtgatattataaccagaaataaaatcaccaatgattttgcaataaggctaatcctaaagaaaattgcagaatctgtcacaaaacctttatcgtataaccgactgactaatatattaaaaagtagtggaatgtctatcggtaaacaaaccgtaataaactatgtcagctatatgacagactcctacctgctctttactctgcaaaactatgccgccaaacttgtagaaaaagagacttctcctaagtattactttatggataccggacttctaggacttatgctgctagactgcaaatctgctcagctggaaaatcttgttgcaatcgaactgatacgacgttatggtaccgaaaatgtctatttctttgagaataatgtagaaattgacttttatataccattagacaatcttgctattcaggtcagtatgcaggttctggataacatagatacaagagaacgtgaaaccagagcctttgtgaagctaaataattttatccccaacgccaaatgtattctcattactaatagcgaagaggcggtgattgattgcgatgggatcaatattgaggtaattcctatttggaaatggttgttggataactaatcgagtaggaggctgtgattaaccaccgtcctctcacagcaccgtacgtaccgttcggtatacggtgctttcaatagttgacgtgcacggactggtaagctgtggctaaaaatcttcattttaaccttactcctttacaatactgttttatttctcagacagcatcctctccagctttttctttccggtctcatagtctgtaaacactattccctccatgccaagctttctgccaccctcgatattctccagtctgtcatctatgaacacacattcttccggattcagattatatttgtcaaacagacactgatagataccggcatcaggctttatcattccaaccatagctgaaatgactttgccgtcaacaagtgacacaaaactaagttcattgtgtgtatgaagctcgaaatattcctttggataattcgataacaaatacactttatagcctctgctctttaactccttaatccagtctgctgcatagtcgaatgcctttacaacaaaagcctttccctctttaaaaaatctcctgatatccgcctcatactgtggagccaccttaaccatctcattaattatctcgttctcaggaattacaccacggtccagctcaacccagacagggttttcatatgttgcatgggctaaagctgctattttattttcttcaatgccaatctcacgcattgcctcgtccggctggaacctgacaagcacgtttcctatatcaaatattatgtttttaatcatttattttttctcctacaaccctgcacctcttcctgcaaaaagcaataccatatgctaaaatatcacacctgccctcatcgcgcagagcctcatcatacctcttctccttaatctgcgccatagcagcctcacacgctgcatcaaggcttatcatctcttttgcatatttcacttcaataacgatacctgcatccgggtcctccggcttgattaaaatatcactgaaaccgtctcccgactcacgatttgacttaataagccagcccggattgcttccgcgaagcagaccgaggagcagaccgtgatagaagttctccttcctatcatcagaagccttggtatcaagtatacttatcatgcggctcatcacgatgttaagctgtcttgcaatctgcttctcatctttatcaaggatggctctggataaaagcttcatggtatcatcatcttttgcgacaacagccttgaaccactcctgaatctggagaacaaacacttcacgcacctctttatttggaatcaccagcttgtaagcatagctcccgttgtcaggcagcctgacctcaccagccttagtcaggtagcctgttgtaaaaagtacgctccacagattatctatagtattgtcaatctcatcataggtcaagtcaaggcggagctgtttctcaacaaaaccacctgccacgagcttttctatctcatctctcgtagtctggtccgccttgtccacaaagcgcttcaccatgtcattgccactgctgttaatccagaatgcactcggcctggctgatgggtcccaaaccagcttcttggcaaaattgattacatcccacggacaataaatgtcggtattaccgaaatgatagccatcataccactcctttacatcagggtatcgctcagacctgtcataatctaaaagcagcttcctgacctcatcatcagtaaaaccaaactgttcatcatgcgcgatatctacaatggaattgatttcaaaattgttgagacctgtaaaaatactctccttggatacacgtagacagcctgtaagtacggcaaactgcagaaactcattagtcttgagtgcctgtccaaaaagccctctgatgagtgaaaccatctctttatagtaaccattctggaatgccttatccagaggtacatcatattcatcaattaatattacagtcttttgtccaaaatgcttatataataattgagataaaatctgcagactcgatacaagcactttttcatccattgcattcgttccatccttcaatgcaataatcgccttgtagcgctttttttcattttctgacaaatattcactatcttctaaaaagccgaatctttctgcctctattccaatgagctcagtaatacgatatctagcatcctcatatttcaatccctccacgctctttaatgacagaaatataacaggatattttcccatatgttcttcgcaaagtgccttattttgcgcaatatataagccatcaaacaatgactcatccgcaccggtttcaaaaaaggctttaagcatactcatgttcagagttttaccgaaacgacgtggtctcgtaaaaagagtgacctctccaccggtttcaaccaattgctctatgagctttgtcttgtcaatataataaaatttgttccttctgattttttcaaaactatcaattcctaccggcagttttaaagtgcatgccatatgaacctccacaaaacgtatcaatccgctatacttagctatagtatagcggattgatgggcaaattacaattattattaccgttgcggcttttccgtattaataccaaacttgcttgaaatcgtcggagagacagggattgacaataaatctttctgattgccagcaagggaggaatatataatctgtttttcgtcctttccattttattccagataggcggttgtgttgataaattattatatctcctaaaattatcctttaaaacgggaaacacaggctgtgcccaccgttatttttcttgcaatctttaccaaatagggtataataatctgaatagttgcatcttttattaagggggttttacaatgttaagcatttttatgaaaaaactgaccgtcaacgaggccaaaaataaagtaaccacatccgataacgcagtcctcattgactgccgtcccaaagaagattatgcgcacggacatgtagccggtgccatcaattttccaatcgaaaaaatcacggaagaacgtgtctgccgccggcttccggacaaaacaaccggactgtatattatcggaagttattaccacaaaccaaacgttgccatgaagaaatttaaaaaactcggctacaaaaatcttcacttcagcggatttatggaagaacatcacggcatgctgacacgttaagataaacaggagacataaaacacgttaagataaacaggagacataaaatgataaaaacaaatggatttcgtgttctggcgatagtaatgacaacgctatggatggttacaataatcccggttaccgttgtgcaggcagcagactttcgtggacagggatttgatttatcaagctataatggaaccgtaaactgggaacaggttgcagaagcagacatggattttgtaatgatccgtaccggagagggccgggcaccggatgttgatacccagtttgcggcaaattatgatggtgctgttgctgccgggctgaaagtcggtgtgtatcatgtgtgttgcgtgcggactccgaaagaagccgtggaagaagcagagtattgtctggagattcttgatggaagggatctggattatccggttgcctatgacatggagcgcaagggcacctttgcaggtggcagggaaaatacgactgcgattgcaaaggccttttgtgacacgatcgccgatgccggttacgtgccgatgatttattcttccgcttccttcctgaacgaaaactttgactggaaaaagttgaaaaactgtaaagtctgggttgcatcttacagtgataccagaccaaagctgccggtatctgcagacttatggcagtatacaaagaaaggttcactggaaggtgccaacaccgacaaaggatattgtgatctggtctattcctatatggaagcaacaagtattaagttcacgaaacccacacttaccatgaaaaaaaatacgaccgcgcaggcaacggtcaaaataaaaccgaatggctgcacggatcgcaaatcttttacgtcttccaacccaaaggttgttgcggtcaataaaaagaccggtaagctgaccgccaaaaaagcaggtaaggccacgattacggtaacaaccggaagtggcaggaaagcgaaaatgaaagttgttgtgaagtaaatatgcctgattgcccgtgtatcaaatgtgcggatcatccggatcttcttccccggattctgccggcagtgtttcgttccccgcagtctcttttggcagtgcttcgtccaccacagtctctttccgcagtgcttcgtccactacagcctcttccggcagtgtctcatccccagcagccgtatccggcgacgtctcgtcggatacctcttcatccacaatatcctcactcttttgaaaacgctccagaaactgttgtttccatgtttcccatttctgcagtctcttcccctgtttttctaagcgcacttcctgtttctgttggattttcaacagtttttcggactcttttttctgcagacgatcctgtcgcaattcttcttttttctgcagacgatcctgtcgcagctcctcttttgcctgctgcttctgattctttttcacctgtttctttgcagaccgctcgatactgcgaatcatgcttttggcatctcccaccctgcggcgtgcactgcggtacggatcgtataaaaagtaagaagccgttgtcagtgcaagcaggaaaagtccgacagccagacaatagggcagtgcacgttcgtaataagaatagtgcagttcacaaccaataaacaggatcagcatccccggaaaaatcaacgcagaaaacacatcacagacaaactgccagaacttcgggcactgttttttatgtaccagaatggctgcctgtactccggtaaaaaacataagtacaaggcatgtctgggaagcgatgccatgcagatacccggcaaacacacacaacgccagcgaaaagaaaaccattgccagtgcatagcccctgcggtacgcatagccgtattcccgcatgccctcccgtttgtctgcgctcaggtcatgcatttcatacacgcggtcgtccacacgcgctttcatatcttcccggtatctccgcccctcttttgcatgtgccatattctgatccatgtcttcgtccagttcctgcagcatctgctgctcccgcaggatctgctgcaaaagctgatcttcctgcgcccggcgtttttccagttcctcccggatccatgccgccttctgtatctgaagactgtttttcgtcagggattcctcttctatctgttgttctctttcgatctgatcactcatggtattgtccacctttctttttccatcataaatggaatacttttatttgtaaagttttgttccattatttcatatattacagaacttttcttctcttaatgttataaatattcaatgtattacagaacttttctttcatattttgttttaatttccctgtttttttatattctaatgcattagaaagatactttataaaatacaaattagcagggaactctatgcatataaatctaaatgccatgggcacacgcatgaaaagacgcagaaaagaattaaaaatgagtcaggcagaactggcagaaaaagtaaatgtttccaacaatcatatttcttcgattgaaaccggaaaacagattccaagcctgacaacatttgtaaaaatctgtgagcagctggataccactcccgattttcttttactgggaagcctgcacacgaacaatctcccgaaaaatatttatgattctcttgccttgtgcaacaaaaaagaccttccattgattcaggatattgtagaaaattttgtttccaagcgggagtaataattaaggactttgcatgatgcaaagccctcttgtgtttccctttctaaaggataattctaggacacataaagtgtggtaattttatgggtggattgctatgtatggcagtccacctttctaagaatcttcgggaaaatataagtggaatataagaattgtgcatggtacaatagaaagagaaaaattagattgatcgagcttaaagctgggatacttcttgttcgaaggacaagaaggttgagttgagaaagattataaccatcgggagatataaactcaaagttatttggtaaggtattagatacttttttttacgaggcgatttttattcccgaatgtgtttctgcaccatccaaagatattattaaccagccagatttgcaggtatatgtaaaagactttggtaagaataagggagacttatgtttggttgctcaagttagtgataaaattgttggtgctgtatgggttcggattatgaatgattacgggcatatagataatgaaacaccgtcttttgcaatttcacttcttaaagagtatagaaactatggtatcggaacagaattaatgaaacagatgctaatgaaattaaaactagcaggatataaataagcatcattatctgttcaaaagatgaattatgctgttcgcatgtataggaatgtaggatttgaaatcgttgatgaaaatgatgaagaatatattatgatttgtaaattataggcacttgtaaatgccggtttaacaaattaaaaggaactttcacattaactaattttaccacactcccacgagtagattttatctgcccgtgggagtacttttttcagcttagtgatttatcttacagcagccatgatacaaaatattcagtcagaccgaaaagccaatcctccagctcactacattgatatccactggaatataccttacggcaatcaatgccaaagttacgctgacaatacataaggcaaggttgctgtggtattctctgcgaaaaacacatttaccttataggtggtctgtccttttcttttggtaaaagaggacatcgcccgctccttacttgctgtctgctccataataatttcacctcctccttgaaatgcaaacatatgtttgttataattgaagtatctttgatggactgcgacaacggataagataaatcttcatggaatacggacgatgtgcagatgatggcactaattatgaccatgaaaaacaaaccgcaggcagtaatgatgagttttcagaaagaatatgcagaaaggtatgactggcttgtaacactgttcaaggactgggcatttacctttatgtcaagcttcctctactatcaggactttgacatgctggatgatatgcaaaaacagctttaccgtcagggaatggcgacatttggcggtattgcgccaacctatcacatagagttgcttgaacgtcctaccattgtctgggattttcattctctgctattgggtgtgcagatgatgttttcttttatgcttacagatgaaaagtcctcgctgaaggtatgtaaacactgcggaaaagcctttgttgccagcagacccaacagcgtattttgcagtgataaatgtaaaaaccggtataatgtgtataagagccgggctaaggataaagacaacactaactaattcatctgctataagaaagaaggctgattatgaatacagatattacaaagcaaatggaaatggtactgtacagaaccgaagatgacaatgtaacggtcagtgccttgataaaagatgaaacgatatggctgacacaaaaagctatggctgaattgtttggtattgacaaatcgggcatcagccgccatttagcaaagatttttgaatccggtgaactggatgaggaagtggttgttgcaaaaattgcaacaaccactcagcacggagcaatgcaggataaaacgcagactattcctaccaattattacaatctagatgccattatttccgttggttacagagtaaactccattcaggcaaccagattccgtatatgggcaaccggtattttgaaggaatatatgataaagggctttgctatggatgacgaacgcctgaagcagggtaaaacagcttttggaaaagactatttccgtgaattgctggaaagagttcgctccatccgtgccagcgaacgcagaatatggcaacagataacggatatatttgccgagtgcagcattgattacaatagagattctgatactgcatatcatttttatgcaaccatacagaacaaatttcattatgccattaccggtaaaacagcggctgaaatcgtctataatcaggctgaccacaccaaggaaaatatgggcttgaccacatggaaaaatgctcccgatggtcgtattctcaaatctgatacaccgattgccaaaaactatttggacgagaaacagattcgtcagttagaacgtgctgtcacaggatattttgattacatagaggatttgattgaacgtgaaaacgtctttacaatggaggaattttcaaaaagcgtgaacgagttccttgcgttccgcagatacgatatcttgaaagataatggacgtgtttcccataagcaggcagtggagaaagcatatcaggaatatgatatttttaacaagacacagccgatagaatctgattttgataagatattaaaaggattggaaaagaaaaaataattacttttctggattatgcgattatgatacaattacggaaaatagttttttagaatctgacaaatcgggattgaccgagctctttgagcgagggatacttcttgtccgaagggcaagaaggtgggcgtgaaaagaattagaacaatcgtaattttatgaagagaaatggataattataaaatgaatgcagatgatgaattactaaagaatttggataaattgcacacaacagaattaggcgtagaacgcattaaaagaaatctgtttttagatacagatgatgtagtcggctggtgtaaagctaaaatcgattctgtaaaggctgtaatcacaagaagtgggaagaactggtatgtgaatatagataactgtatcataactgtaaatgcttatagttatacgattattacggcacatagggaaaagaaatgaaatatacaattcgtgaattagaagcattttcagttataggacaagaagtagaacttacaaattatcataaacgaaatattcaaatcagcacacaattttggagaaagtttaacgctgatttgaagaaatcctatctttcgcaatttgagaattggataaaatatgcctttatgataaagagaaacggaaaactgttttatttttgttctattccaaaaagaaacgtaattccagacggctttatctataaagacatacagtcgtataaatatcttgctgtagagcatattggttctatggataacctatatgaaacttacagaaagatttatcaggaaatattacctaatacggactacacgcctctgcaagaggagtttttgcactttgaaagatacgattatcgttttcattggaatagagaaaattcaatcattgaaatatgaataccaattaagggttagtgaaattcaagtttatatagctgtaaatgttttttacagcggaaaaggagatgattgataaatgagaattggagcgtatcaatttgcgatatctggagatgtaaatgagaattataaagaaatagaaaaagcaatatatttagcaaaacataaagatgttcaattactgatatttccagaatgttcattaacaggatatccacctagagatatatcaaattcatcatgtgtcaattttaaccttgtgcagtcaatgtgtgatagacttcaatcggtagctgaccaaaatgatatttcttttattgtcggaaccatatttaaagaaaaagaaatatataatagagcattactatttcagcctaataaacaaatcaagtcttatgacaagcgggctttatggggatgggataatgataatttcgcaaaagggaatagtgatggaatagttgagatagatggggttgtgtttggaattagaatttgttttgaaataagatttcccgaatttttcagagaattgtataaaagaaataccgacataaatgtggttttgttttatgatgtagcggatacggacgacaaggagcgatatagtatgattagaggacatctgcaaactcgtgcagttgaaaatgttactactactatttcagtaaatgctacctcgccttttcaaacggcaccgacaatggtttttggaaaatctggtcaatgtatcaaggaatgtgttagaaataaaccggaactattgatttatgattttgaaaagactgttaatgatttcggagaaaatggaagaacatctatatctaattcattgattaactggtaactgattcttttgcaatttcttatttattgtgaatgagcttacatgtgctataataaaacaaattaacagattgaaatttggaggtgaattatgaaaatcgaacacattgctttatatgtaaacgacctgcaaaaaactcgtagcttttttatgaagtatctaggtgcaaaatcaaacgaaggatatcataacctgcaaactaactttcgctcctattttctgtcatttgatgatggcacacgattggagattatgaataagccagaaatgcttgattcacctaaggagcttgctcgcacggggtatgcacatatcgcatttagtgtaggaagtaaagaaaaggttgatgccttgaccatagagttgaaaactgatggatatgaagtaatcagcggtccccggacaacaggagatggttactacgaaagctgtattgttgcaatcgaaggcaatcaaattgagattacagtttgaacccgttaacttcaagtttaccaaaatgacaaccgacaggaaacgtgatattttttacaacaaagatatcaatatatctccactaatttccataaatttatggaattaaaatttcatgatacttataacatagaaggaaacggaccgatgcaggagcttacacccgaacagataaaagaggaagaacacaaacgccgcaaacgtgcttggaatcgtacttattggagacgtagaaaagagcgtgaacaggcggcaaaagctgcaaaagaaaaagagctatctgaggcagtcggctagactgtcccagaaataacccttagataatgaaacttgccacagagtcttattatctggcataatctgctcctgtcagataataatgctcccaatcatattttccatcctccgacagatcttttgccgtctctgcaatatgatctgaccaaaggctctccgataaataatatttataattttcatatcctccgccaaccggatcatcccatgtacaatcaatataataccactttccgttaaccttaacctgattccatgcatgaccacctccatctgctgtaccggatacaaacctgcattcaagcccagcagatattgccatcatataaaaagcaaacgcataactctggcagacaccttctttatgtaacaatactccaccagctccatatgcccagttttccgcggtactataatctccattattgacataattggcatgatagattaaataatcatgaatggcttttactttctcttcctcacccattccatccttcactacctgatcaactgctgcaaaggccgcatcaaatacagcttttccatcctctgtatatcctcttgcgtctttttttatcagcgtatccttgaccgaataactgacactaatttttttgctatatatctcttttccggcaataacagtaaatgtatgatctcccggagtataaacaatctgatccggcaatgcactgccatccatctgaatttcgatgcctttattttttaactgtttataatggaatgatttccccaaaaattcccattgcagagaatctgcatcatagtttaccccagcctgggaattctctattaatccatcaaaaatcacatctttatcacagatgtacagggtaatatttctggtaaactgcccatacgaataataaagcgatccacttgcctgataaccattatatttcttgaaattacaatttcccctgtggtcaatttccttaaaggcactatcaacatacagctttacctgacttgtatcatacttatcggatactaactttaactgaaccatctgtccgccaagaatcagttcctgattaagtcttacatcacttttcttttccggaacaaccgtgatcgtatagcttttctttttcgtaccgctttttactgtgatggttgtaacgcccagacgaagagcttttaattttccctttgcatctatggaagccaccttgggattcgtacttgaatatttacaatttttatatcctgacggtgttttcaccgcaaccgtcttcctgcatacaaccgttgttgacttcgtaatattttgcacagtggccgcatatgtcgtttccactgttggtttcactgcgctcattgaagtacatataattgtcaatgtaagtacaaacgccatgcaccgtttcgtccacctgttcatctttaaactcctccatcttttcctttatctgttttttaatattattcttgggctgatttgatcgtcagcccaagaagttcgttaatggaatccgctcccttttaatttactttagtttttaatccagtaattttccatctctgtatgaccattcaaggtagtccggattctgataatataaatccgtattaaattctgaaattttatcactgacctgctcaaagctaaggcaatgatccatttccgcatcatgtagtagtttcttaataccttcttcaccgatggctttaacgatatcacctctgtgattcaaggtctcccttgcaatatactcaatcaatgcacacacataaaaataatcatttctttctttcgctgtcataaattacctcgctttttatgaatgtcaaacagtcaagtgcagacaatgtatggaaactgatctgtcatctgatatttccaaaaattttaaaatattcacgaaaaaatcgctataccgtttattacagtataacgattttttataaaaattacaatttttgattttctatcgctgtgtatttcctgcattctgctctgaatcacttaacattgtagcaatcccggaaatcttaaccgtatctacatccgtattttctataaaaacactccgtataaattctttgtcggatgtttcaaataactgtcccacctctccatttgcctcaatatagacccgtttatgggcggatgtcagaatccccacacaaattgttttgtctgcgcggatgttatcgaccgtgatgctgattttctgtggttttcctttaaccgcccatttgcataacgtctgttttggaatctctgcggaaagttttatgctatcctctgtaatatcctcaggaaatgcatccataactgcctgtttataaacatcatacggttcttcctttaccatataactgtgtctggcatccggatctgtctctatttgcgtcgcatagcagacctgattgtccataacctccatctgtacattcacttttttctgctgtacagtctttgcatagattttttgtacagctttttgtgtaccgatgccggctccacaggtaaagcagatactgccaagaaaaaccagaataaaacttgccaaaacagccagtggtttcatctctttttgttttcggtactgcttcatccggcggatacgctcctgtaaatgattctgcgccccaaacatggaaaacggaaattcgagaggacgggtctcttccgtaagcagttcaagtgctgcacgaaaatactgtccgacagaaaaaacattttcggaatcacggcagcattccatgtcgcatgccatttccgaccagaaatccagcctgcgattgaaaatatagatcagcggattataccagaataaatcttccagcactctgcccacacatttcaacgtcaggatgtgctgccgcacatgtacaaactcatgcgtaagcacaatctgcagactctccggagaaaaatccctcaccggcaatacaatccatttatgaaatagccccagcaccatcggggaagaaataccatagcagcaatacacttctacatttccccggatctttaaacgctcctttgtccctgccgcaacgagctgcagccgtttttccgccggcatccggtgcttttttatgtaatgttccacccggtaataacgaaccagatgaagcacaagaaccgttgctgcaccaagcagccagaccactgccgccacacactctatgtgcgcaatcacaggtgtcagttcaaacaggtgtcccttgataaacagtgcctcccccattttgcggtaatgcgtaacatacaacaggagaaacagccccggaaacagccagaacggtaacaccacaagcaacagcccatatatatagcggtatttttttaacccatccaaaacgcctgcaacaactgcatataccgcaaatgcaatactgcctgtaagtgcagtaaacagccccatgtaaaacaaattattgatccagttcatcaatgctttttctcaactcctctatttcctctttggtaagtttatgatctttataaaaagcagttaaaaactgtgcaaccgatccacggttccagaattttacaaatttgcgactctgctcctgctgataggaaagttccggtattatgatctcatatgtggcattgcgcccgttctggttcatccttagaaagccctttttcaccagctttgcaatataagttgatacggtctgggatttccagtctttcccgtatgtttcgtttgtcagtttcataatttcctgtagtgccatttcatggggatgatcccagattgttttcatcaccatggattccgctgtagtcagttcctccatattttcccctttcatcgttaacattgataatatttttgagtataaactaagattatagttttaggttatagtgggataataacataaagatatacaaattacaactattttacgcaagtttgcaggacatcccgtcttttcttttgttgttctttttctactttattccattcattcaaaacagcttctatctgtgtgattaactgccctttatttggaatataagaaatatagcgtgaagcaaaaatattgttggacaaacccccgagagcatattcagcagctatgctgtctttatccatacaaaaaataataccttttgaaagctgctttaaagtctgctttccataatctgcccggtctttattttcctgttcatgcccaacaataatctttccgtttcatctatttgatccctgttttatgataagtacaataaataattggcaataacgtcacacttaaaatggggtatattaccatcataattggaattgaaccaacaattttcccaccaatttgatacaaattaaaaatattgataatctcattaatctgcaatagttgatcaggaaatactcctaatgtgccctttaagaaatggaaatttgataaaaataatggtaaaaacaaaatggcgaatggaattgtaaccgccactactgctgtgtgtgttttcgctgatataagcatagacaatagcaagcaaaacaatgttccaatatatcccgatacaatcgtgagtaaatataattgcatataagtaatattgtagaaggacttccagtgccaaaatcccgtctgtatcataacatttccgccaccaaaaccaagacagcctaatacaatgactgaatataaagcaataatcatccaataaatagccgttactactataagccctgctataagcttagctctcgttcccctatcccttccgtattttgtcgagaagaatatggaatccgctttccagctaaattcatttggaaaaatacctgacaccaggaatgcagatacaagcataactaacataacaattgtttgcgcatagtgtaatgctgatttccagccatcataatcttcataatataatggtgttttcatctgatgatatcgttctaacaaaaaagctttctcttttttattaaataaatcttcggtttcttcagaacttagccatttttccaaacttttttctcgattttcatataacttaccaacctcatctttcgatacagaatcaatacgatagtagttgaaatctcgaaactcacaaaatcccatattaatcatatctttaatttctgaaaagccttgcactttggaatcatgtagcaaattggctgtatagtccccctgacgaattggatattcttcatttacctttctgtattcatctataactgcctgtaatgctgctttatccaaaacaccttcccatctctgcttttctttccgcaggtttctggctgccgctattcccgtgtgcgatacccctcggttgtcaatgtacgtgatatttgtaatcgcaaagtaacaggatataacaagtgagaataacaacacgatcagcgatatcctgctaatagttttagaaaaaatttttttaatttcaaaacatatcattccatctcaccacccttttctccaaaataatataggaacacatcctctaatgttggctccaccacagatgctccatgaataggcggttgatcagcaatgatacgcaattccaccattcccctctctgccttcatatttgacaccttaaattgtttcatcattttagttgcttctgcctgcgatacttcacacgcatatacattttcctgcatagaagcaagcatatgatccagatctccctgttgtacaatctgtccttccttcatcagccaaatctcatttgcaatatattctacatctgaaacgatatgcgttgacaaaataacaatcctctcctctgacagctcactaatcagattacgaaaacgcactctttccgtgggatcaagtccggctgtaggctcatccaaaataagaatctttggattgtttagcattgcttgagcaattcctgctctacgtttcataccgcctgagagttttttcatctttttattaacacttttggcaagaccaacctgttctaataattcttttactcttttacctgctatcatagaacggattccctttaaactggcaatatacattagataatcctttactgtaaaatccggataaaatccaaattcctgtggtaaatatccaagtaaatttctgtactctccatccattttgaaaatatcttttccatcacataaaatcttgccacttgtcggtggcaataaggtacaaatcattctcatgagtgtcgtcttacctgcaccgttcacccccaatagtccatatacaccattggttatcgttaaattcaaatcatctactgcacaaaaatcgccaaactttcttgtaacattaaccatttgtaatttcataacaacttacctccaaaaaacgattacaaccatgtatcgtcttatatacttcacaaaacaaaaaacatattgcaaatacgaacagcataatccatataggaacaacaagattgccataaatagcattattcatcgtaatcctccaccatatacccccccataaaaaacaacctactatagatgttgcttcattcagcagactacagtttaacattgcaaaacagatacccgctgcaataaccatagggaataaaaactgtactaacaaatctgtaaactgcattttcatattgatacaggctactgttaaaaagattgtgagcataactatatcaacaatccctatcaggaatatccttgcggaataaatctgtcttaaagagaacaaacaagttacctctatttgacaagagttactctccttatttctccaaaactcaggaataatcatcactataaaaaacactgaagcaactcccagcattctcataaaataagttgtgtccttcagagatggcataattagaaataccaaaacaagcaacatcgcctgtaacatccaccatctctttcgaatcaaccgaaactgtgaaaaaaggaattctgtataactcattgtattttcagactgtacttccatcacaatctccttggatttctgtatcgtttctaaaatcttttcttccctcggagtaacactattttctcttttatatgtttccatcatcttttccaggttcatgagaatcctcctctcccaataatctttttaattcttcttttgcccttttgtgtcgatactttacaagtggtaatccaatctgtaatatgtctgcaatttcctttaacttaaagtcttgaaaatagaacattataataatttcttttagttctggattcatctgttcaagtgcttgtttcacatatatttgtttttcctgctttgggataccaccatctgaaatcagttttctttccaatacttccttctctacacaatctgccttccatttctttacgtgatttttacaaagattacctgctatcacataaagataattctttgcttttccaatatgctgataggattgtatattattcataaagcgaagaaaggtttcctgtgttaaatcttccgcttctgtctgatctaaacaatgatatttacaataagacaaaatatctccataatacttccgcacaaacttatcaaaggcttgttcatccccttgtttcatttgcaagattaaaataacatcattcaagttgccatccttcctcattttgtaatgcataaacgtttattctaatatatataacaactgactgaccaaaaaagatagtacaagatgggtatcagatgcttctgattcaatagtatagtcttattttcgtcaccatcacgcctgaaatatgccctgacttgagctcacgaaaactgaaatgaaattgattgaataattattctcctgagatttttctgattattttatgctatatagaaaacgaatatttttagaattgattatgtagattgcggtttgaaattttccagatggtttactgcatacctacaacaaggaacgctccccgtttgcagtaattccactggaaaagtaaccgcctgtttactccttgattccggcaagtgccgtcagtttttcctttgtaaaatgattagattccatcgctaggattaataatcctgcaatatagatcaatacacgatagatcattgattttttcatagaataatttccctttcttctataacctattatgcacttttttatttatttttcaatgcctgagattccttcttgttttacttgacattttgtattgtttgtattattataactaatacaaaatattgtatgatatttacggaaggagaaaacatggtaatttccatcaatgatgcctccgaaattccgatctaccagcagatccgcaatcagatcgtgctcggcatttcggacgggcggcttgctccgggcgaacagcttcccaccgtgcgggcactggcagaggagatcggtatcaactccatgaccgtcagcaaagcctacaccctcttaaaacaggagggctacatctacaccgaccgcagaagcggtgcccgcgtgcggcaggaatttgaaacgaataaagaattgtcagaaaaatcccaggaactgctgcgccagatcatttccgaagcgaaagtaagcggcatgacgcagacagaatttttcgacttatgcaaacgcatctataaggggtgattgttatgattatgaatattatcttttttgcaaccatgtatccaatcgtctttatcatactgtttttattttccacacaaaataagtatgagaacggacgcctgtttgccgtaaacatgaaaaaagaatggataaaagatgccaccgtcgcagacatccggcaaaaattcaaaaaggaaatgcgttactacgccattctccttgcgattgttccatttgtaagcctgctgacctcccatatgtccattcagcttaccatctggatgttctggcttctggcagcgatttttcttctttccctgccgatcatgcgtgcgaatcaccggctgaaaacatggaaaacgcaaaaccatctgtacgaagaccggcagccagaacattatgtggaattaaaacaggcaggctccgtaagaaaagtccgttttctcccgtttttcctgccaaatataatcggtatcgcaagtgccctgttgctgcttccaaagtccagcgggcttgggatttcctgtctgatcggtgcctcctgcgggctggtcttctggcttgcagctgtatggatggaccgccagccggtttccgtcatcagtacggacagtgacgtgaatatcaattatgcacgcgcaaagaaaaacctctggaagaacttctggctgatctcctgctggctgaacacggcactgatcctgtttctggagatccttaccctgtctgccagacacatgggaatatgttccatcgccggcatgattgtttatacactgcttttactcctgctgtgcattttctgcatgataaagctgaaaaaaattgaccgaagctatgcacaaaaacggaatctgaccagcgatgaaaatgatgacagaaactggatcggcggcatcctctactacaatccatccgatccccatacgatggtagaacagcgcgtcggcatcgggacaacggtaaatatggccacatccctcggaaaaggacttactattttcagtgccattatgatgctttccttccctctgttatgcatatggctgattcaggaggaatttactcccattgatctggtgatccaaaaccacacactatgcgcacagcatctgaaaacggattatcagattccgcttagtgagatcaaagatcccacacttcttaccgcaagtgatctgccagactggaccagaacatacggcaccagcatggatacattggaaaaaggcacatttaccatctccggaggggaggatgtcaatgttttcttaaatccagaaaatgatgcgtttctccaattttccgcaaatgggaaaacttactatatgggcggtgtagacgatacccagacaaaggggatttatgaagaattgctgacccattagatccgcagtctttattggaagatcgcaagactttttatatcatacgtcccctgtatgactggatttactgataaaagaagacatctctgttccgaaaaattgaatgaaccggtatattcacaaaacgtctgtttcagaatctgcagatgaagaacttgaggatgtgggaggtttcctcgcctttttttgcatatgtcccaccttccatacaaattctgatccccgttattatatatttacaactgcaattcttacagatcccaccattgttttcgcattttgatacaaacgcataatagtttacaaaaattttactgtaaattcgtatatcctcacaaatgcgttattatgtagatgatgttataatacgtagaataaatacaggagaaatctaaacatatgtcaaaagtggttcacaggaagaaaagactttcctcctttaaattaattgtactgggctttgccgctgtcatttttgtcggcgcactgctgctgatgcttccggtctcttcggtttccggaacacagactccttttcatgaggcactattcacctctgtttcagcggtatgtgtcacagggcttgttgtacaggacaccggcagttactggtcttcttttggtcaggcagttattttgctgctgatccagaccggcgggctgggtgtcatcaccgttgctgtttcctttgccattttatccggacggaaaatttcgctcatgcagcgcagtacaatgcaggatgcaatttctgcaccgaaaatcggcggtattgtccgcctgaccaaattcagcgtacagggtacattatttattgaattgctcggcatgactgccatgcttccggttttcttccgtgattatggcatcaaaggcatctggatggcagcctttcactctgtatctgcattttgcaatgccggttttgaccttctgggaacttccaaccagccgtttgtatctctgagcagatacatcgccaacccactgatcaacctcgtaatcatgcttttgatcataattggtggcatcggctttctgacgtgggacgatatctgcacccataaatggcatatcagacgttatcgcgtacagagcaaagtcattctctggacatcggctttacttattataattccggccgtattcttttttgttgtggattttacgggttcatcaaccggcaccagactgctggcctccacgtttcagtctgtaacaacaagaactgccggttttaataccgcagatcttacagcaatgacaccgacatcaaaatctgttatgattctgctgatgctgatcggaggatctcccggctctactgccggcggcatgaaaacaacaacttttgcagtccttattttaaatatggttgccacgttctgccagaaagaggacattgaaattttcggtcggcggcttgacagtcatgccattaaaaatgcggccaccatcgtcgctttatatatcattttgttctttattggagggattgccatcagttccatcgaacaccttccgcttctggactgcctgtttgaaacggcatccgctgtcggaaccgtcggacttacacttggaattacaccaactctcggcatcccgtcccagctgattctgatccttctgatgtttttcggcagagtcggtgggcttaccttaatttatgcggcaatttccataaaacaaaacggagtaaaactgccgctcgaaaagataacagttggttaaaaaggagttgaaaataccatgaaaaatatattattaattggattaggaagatttggaagacatgttgccatacagctgaacaatcttggtcacgaagtgatggcagtcgacaacaacgaagaacgtgtcaatgaggttcttccgtttgtcaccaatgctcagatcggtgacagtaccaatgccgatttcttaaaatcccttggcattggtaattttgatgtgtgtatggtaacgataggtggaaatttccagaattcccttgaaactacttccctgctcaaagaactcggtgcaaaaacggttgtatcgcgtgcagaacgggatgtacagaaaaaatttcttctgcgaaacggtgcagacgaagttgtttatccggaaaaacagattgcagagtgggctgctatccggtatactgccgatcacatacgcgattatattcaggtggatgaggcacatgcaatttttgaagtggaagttccggaaaactggatttccaaaacaatcggtcaactggatatccggaaaaaattcggaatcaatattgttgccatccgggaagacgacaaaattaatatggcaatttctccaaataccgtattccagtctggtaccacattgcttgttctcggtgaatataaagaacttcaaaaatgtttccgtatgtagtttctatttccataacagattccacaggttctgataagcagctgtttcatacagatttatataattacatgccgtacttctctgccggaatgccggatataaaaatcctgcttctggcagtcccggctcatattctccctcaagcggtcccacggcacacagaagataattgtatacttcctcggaaccttcctgccattccttatcggttcctttcactggaacatcatacattccatgaaacaaaaaacaataactttcttttcccggtgcaacacgttccccgatcatttcataaagtagatccaaaaacgcatcgttctgcagcccggactctttgattccatccagaagctgccagatacttcccggctttctcccggtttccggaatccggtaatccttcagctgtttgttggtctctgcctgtaaaactgccttcgccagttccagatttttcgttttttctgctgtggaaagttttaaaaaatgcgtgttgaatgtgccatctatatatccttctgcatcataatatgcaccggcgatccggtcaatgtgtgactgcgccggagtcatgcgccgtgtcagttcgagcatgtcttcccgattaatcatgatttccttctccgatcttcatttaagaaaattatactggtattttccagattttccaagagaatatcagattataatttacataatcctgttatttttgtatatttaatcgcataatagtatgtaagtgtgctgtttctgcggaaatagttgagtctgcaggcattcctgtgatatgatacatttacacgggcaaacgtgtaattagaggagggtactgcatgggaaattatttaaaccaggatggaaaaaaattttacgaaattacacattctgatatctacgtggataagacagaattattgacctatacaaattctgtcttacagactctgcagaaatatatatgtatcagccgtccccgccgttttgggaaatcaataaccgccagcatgattgctgcctactacagccgtggctgtgatgcaaaagaactcttttccccatataaaattgcccggaatctggattttgacacctatcgtaataaatacaacaccctgtttttaaatatgcaggaatttttaagccggacgaaaaacatctatgaactgcttgatcgcatgaaacggctggtactgcgggatttaaaacgggaatacccgaatgttgattattttgatgatacagatcttattgaatccatgcaggatgtatatcaggaaactaactgtccttttgtcgtaatcattgatgaatgggactgtattttccgggaatacaaacaggataaagaagcccaggaaatctatctggattttttgagggatatgctaaaagataagtcctgtattgcactcgcttatatgacaggaattcttccgatcaaaaaatacggaacccattccgctttaaatatgtttgatgaattttccatgataaatccgggacctcttgcatcctatgtcggctttaccgaactggaagtcgctgccctttgtacagattatcatatggatctggatgaaataaaagcatggtataatggatactcttttgaaaaaataccatccatctataatccgaggtctgttgtaagctgcatgcgttttgggaaaattggaaattactggaaccaaacagaaacatttgaagccctgcagatttatatcgatatgaattttgaaggattaaaagatgatgttctcagtatgatagccggggaatccgttcctgtcaataccggaagttttaccaatgatatgacaaccttccgcaccgaagatgatgtgttgactcttttaatccatctgggctatcttagctatgactacgaaaacaaaaccgtaaaaataccaaacaatgaagtgcgtgaagaatacgttaacagtgtttccgtatccgactggggcgaaatctctaaagccctgaaaaattcagcagacaccctgcaggcaatctggcagggaaggccagaacaggtagcacttgggattcagcaggcgcattttgagacatcacatatccagtataatgatgaaaatgcgttaagttatacggtttcactggcactctatgccgcacgcaatttctatacgatacacagggaatttgccggcggtaagggatttgcggatatggtatttcttccacggaagaagtttccggataaaccagcacttgttatcgaattaaaatgggatcatagtgcacagggcgcaatcacgcagattaaacaaaaacaatattgtgaaagcctgaaagagtatcatggaaaccttttactggtcggaatcaattacgataccaaaagcaggattcatacatgtaagatagaaccattttctttgtaagaaacgggagggcactgccctcccatttcttatagcattttttcaatttcttctttctccggcatcacgcggagcgcgcctttgcgcgtcgtgatcagagaagccgccgcattggcaaaacgaagcatctctttcaaatctttctcttcaagcccctccagtccatgctccagcacataatgcagaacacacgcacagaacgtatctcccgcaccggtcgtctcaatcgtatttggctgaagaaacggctttgcctccacaattctgtctttataatacgcccggcttccctcttttcccatggaaaccagtatgagcggaaccggatagcgttcccgtatccagcggactccatccgtataatcttctttccccgtcagccactggatttcattatccgatatttttaaaatatcacactgtcccagaccatataacacctgttccctggcatcttccatggagtcccagagcggtttgcggatattcggatcaaaggaaatgagcgcacctgcttcttttgcgaccgcgatcgcttttttcgttgctgcgcggacacccggatgcgtcatggataacgttccgaaatgaaagatttttgctccatggattatttcctccggcagttcttcttccgtcagcatcatatccgcgcccggatttcggtaaaacgagaagtccctgtctccatccggatatgtatgcaccagtgccagcgttgtgtgcaccttgtcatcctttaaaagtccggctgcatcaataccgacttccgtgatcgcatcttccagctgctttccgaaaaaatcgtttcctacttttccgataaaagccgtcctatgtcctaagcgcgacagcattgccagcacattgcacggtgcgcctcccggatttgcctcaaacagcggattgccctgcccgctgactccgttttcggtaaaatcaatgagcagttcccccaaagccactacgtccatgttctcttcctcctgttactttttataatacaatatcatacttttcgaccgtaatatacatctttttatcgctgaaaaaccggattccctctgcctccaaaggggtacagaccgctgttgttgccacctgctgcccgtcattgataaaaagctcaatggactgacggtccagaataaaccgcatttttttaagtccttttggatctgcaattttaattttgcgcacgcagaccacatcttttgtcacaccacagtatgtgcggtcaatctccaatattcctgttcccttatgataagtaaaagcggtctcgtattcctcatctgcggcaagctgtatggaaaaaacgttaaaatcctgttcatccattgtaacagtcagatccatcgtccgtccgcaaatgccggaaagtgctgtctcaccatcaatctctgcatgctcataatggcacggattcttatgatactgcgcaatctcccgcaccggctgctgccagatctgtccgtcttttacttccagctcccgcggaagagtcatcatgccctgccagtcctgcgtatccggcaccacacaggcatcccatgacttcatccatgcaatcatcacacgccgcccatccgggagaagtgtggtctgaggtgcataaaagtccagtccgtagtcaatcgtatgcggttcttctttttcaaatatatgcgaatttttatcataatttccaagaaaataaacagaattatttccattgtggaattcgtatttttccgctttcatattctgtggggaacagatcagtacatgtttatctcccagtgggaaaaagtccggacattcccacatcgttccgacttttccggtactgtttgccgcaagaacggtctcaaatttccattcttttaaatctttgctggaacagagcacgacctgtccgatctgcctgttatccttgcttccgacaatcagataataggtgtcctcttccttccagattttcgggtcacggaaatcaatccggctgcagttttccggcagcatctccccggtcacaaccgggttgttttcatactttacataatccctgccatccccgaatgcgatgcactggttctgtcgttcctcttccctgccgtccggcagtgtaatctttgtgacaccggtatagaccagcacatgtttgttatccgcttcaatagcacttccggaaaaacatccgttccggtcatagtcctgatccggtgcaagtgctgccggaagctgttcccagcttatcatatccgttgtcacactgtgcccccagtgcatcggtccccactcccttgcatatggataatactggtagaacagatggatttttccatcgtaaacggaaaaaccgttcggatcattgatccatccggcaggtgccgagatatgaaacaacggtctggtatttttatcggtctgtgctgctttttctgcctcatatgctcttgctttttttaacatctcactcatacaaattctcctgtttatttttcttctttcaatgactcctgatactgatcgaaatatttctgtttgattgccagataatcggaaagcccgtatttctccattttctttaaataggaatcccactctttgtcgattccgccatttaaaatccagtctgcttttttctgctccgcatattttttaatatcggtatcatactgggatactttattggtatcgtcaatactcataaacacattcggatatacatacttgcttttcatatccttcagatatgtttcatgcatattgtccagacgccatttagcatccgccggctgtgtgacatacacatcataatactcattgagaactgcaagcggaccgttgacagactgcgcctcacgtacctctaccggtgactggtcgcccagatccagatgcttcaacatttcagcgccatctttatttgtggacagttcaaaaatattaaacgaatccttttccccataacttccccagttattctgcggggactgaagcggcgcatacatctgatcaatccaggctgccgccagtgccgtgttccggcagctggatgtaagcacgcagcggcctctgtcaaaaccacttgtttcactgttattctgtcttgtgatatttctgactccctccggaccggtcagtgccggaagcatcacataatcggtattgttgtcaatatttgcaatatcccaggtaaagcagagaccgtaacggtgatttttaccttttgccacataggttgaccactcctgcgtaaatgcctccggatctacaagatcctctgttaccagcttatgcagccattcgatgccttctttataaccttcctgcacggtcgtataaatcacggttccgtcatcttttacggcaaaatgatcgcccgtatctccatatccttcgccaaatccgttgatgagaatcgccggatcctgatcgccattgttgatgataaatgacatcggaatcacatctccctcgatatcaaactgttttttcagatcatctgcatgatcccggaacgcaatcagcacctgttccagttcatcggttgtcgttggaatatccagtcccagataatccagccactttttattgatataaggaatatccccgattgcctgaatggcttctttccctgcgccaagctgctcaatccacggaaatgaataaatatgtccgtccggtgcggtacacatcgtccggtattccggatatttctcaaagaccgcctgaaggtttggcatatatttgtcaatcagattttccagcggaataataattccctgctttgcataacgaagcagatcataatcgctcattcctgcattaaacaaaccatctggaaggtttccaaactgtgccagtgccagattctttttatcggaaaactggtctgccacaaaacaggtccagtcaatatgtacattcgtctgtttttcgagtctcttaaaaataatccgctcgttcggattctgcgtagaggttgccggagcacttgtgataaatgataattctgcctgttctttcagtggaaactgcacttcggaaaccggtatatccggattgatctctgcctccagatgctgctcttttccgcatcctgccacaccggtcatcatagcaaatgccagtccgagtgccaggcattttttaatttttctcttccacatatctgtacctgtcctttctgcttaaccttttaccgatccaaccataacacctttgtcaaagtatttctggaaaaatggatacataataagcaatggtaaacttgatactacaattgttgcgtattttaactgttcggcaacttttgccatctccgcggtactctgaatgtccgcgatcatgcccggctgcggtgtattctgtaccagaatggaacgcagaaccagctgcagtggctgtaagtttgcatcatttaagtaaatcatcgcatcaaaataactgttccacataccgacaaaagaccacagtgccagcaccgcgataatcggtttgcacaccggcatcataatctggaagaaatgctggatctcatttgccccgtcaattgcggatgcctcccgcagttcttttggaatggactgatagtacgttcttgccagaatcatattccagacattaaatgctcccggaatgagaattgcccacacggtatttaccatatgaagctgattgatcaaaataaacgtcgggatcattccaccgccgaaaaacatggtaatcagaaaaatcacgttaaaaaattttcttccgacaaattcttttttcgacatcggatacgctgctaacaatgtgacaaatacggaaattgccgcaaatgccagtgaatacaaaaacgaatttaaaaatccgcgccagatcattccgttttccagcacacgccggtatgcatccagtgtccagtctttgatgtgaaaactcagtccctgattattcaataccgttgggtccataaaagatgctaaaacaacatagaccagcggaacaacaattgaaagaacaaacagtccaagaatggcataaccgattccaagcaccagccggtctgtccgtgaatatttcattttactaactgtttccatttcacgttcctcctataatccttctccatcgtttaatttctttaccacccagttcacaaatataagcaggatcacattgatcaccgaattaaacagtcccactgccgtagaataaccgtaatcgccattcaaaagacctatccggtatacataggttgataaaatttcagaagccggtaaattcatatctgtctgcagggcatatgccttttcaaagccgatgctcataatgtttccggcctgtaaaataaactggatcacgataatatccttaattgccggaagttccacataccagatctgctgcaaaagatttgcaccatccacaatggctgcctcttccagttccttgcttgcattggataatgctgcagtatacatgatggatgcccatcctgctccctgccagattccgcttgcaatataaatggtacggaatgcggacggcatggtcatccagtttgtattcgttcccagcagacggtttaacggtcctaccggagataaaaacatacgcaccataccacagagcacgatgacggaaataaaattcggtgcatagatcagcagctggatttttttcttaatccccgccttgcggatacggttcagtaaaagtgccagaataattggtatcggaaaactccagagaagtccaaagatactcagctttaatgtgttcagcaggtagttcataaaatccggtgatgataaaaacctctggaaatattccagccccacccacgggcttcccaaaactcctttaatgacattgtaatcctcaaatgcaatcagaagtcctcccatcggaagatacttgaaaatgattgtgagtaacagtgccggcatcagaaaaaaaacatacagctgccagtttttctttatataagacagcttactccccatggtttgttttttcgcagagccgacttgttttgccagttttttcatgcgattgctcctcccttttcatcgtattactcgttctgctttgatgtaaccggtaaagtaaccggttactttatattctgatagtactacaaagtttccgatatgtcaacacttttattcattaaagtaaccgattacgtaaccagtttttttcattgctatttttctttccggttgttatactatggataaaacagataaaggagacagctttcagatgggaaagaaacaggtaacatttgcagatattgcagcatatacgaatttttcaaagacaaccatttccagatattttaatcatccggactccctgacgcttgaaaatcaggagaaaatttcacaggctcttgatactctgggttacaaaaagaataagcttgcaaaggttcttgccaatggaaagagtgaatttatcggaatcattattccgaacctttatctgcactattattcggaaatgcttacacagattctttccagctaccgcgattttcattataaatttctcgtattcgtcagcgacaacggaccgtccgaggaggaacagtacattgatgaactgatggcataccagattgagggcctgatcgtgttaagtcacactctttcttctgaaaaactggcttcttaccagatcccggtcattgccattgagcgcgaagccgaacatatctgtggcgtaaccagcgacaattatatgggtgcgctccaggcggcaacgcttctgatccgggacaaatgcgatgtactgattcacgttaatgcggatgttccaaagtccatccctgcctatgaccgtatccgtgcctttgaagatacctgtcaggaatatcacgttccttatgaactgaatttaaatgtaataggggattcttatcaggacatttttgcacagatgaagcacattttctctgatattgatgagaagtaccctgacaaaaagaaggggattttcctcgccaatgatacctatgcaaatatgtttttaaacctgattttccaaaaatacggatgctttcctgacagttatgaactggtcggatttgacaattccccgattgcaagcgaggcaattctgcctatcacaacggtcggacagcagatcgacctaatcgcaaaaaccgcaatagaacttctggtacagcagatggaagaacgcaaaaaaagaagaccggttcctctttcggaaccggtccataaacagattacaccggtactgatccgcagggatacgaccagctgattttttataaatttatgatttttctttctgctccatccccgtatgcgtcagatccttcacccacttatatttccgaaaatgatagagcgtccacggaatttttccaacctcatcaatacaggtacacgcgtatacgacaatcaccggccagtggaaccggtaagttccaagcgcagcaagtggaatcgcgattccccacattgttacggcaaggctgtacacatcaaacattgtatcaccgccggaaccaaacacgccattgatggtaatttcgttgacggagcggccaatcatatagacgcagagcacaacaaacattccctttaaatatacggctgcctgcggtgtcagtttgacaaaatacaaaataaacggtgccgaaattcccatgagaaccatcatggcaactccgcacacaaaggaaatcttcatcatccgcgtaccatataatttcccccgttttaggttgccggcaccaagctcatttccgaccataatccccgccgcaccggaaattccggcactcaggcagcagatgatatcacggacaaccgccgccacagaattggcagcggccgcgtctactcccagatgtcccataaaagaagaatacgaagtaaatccgactccccagaacagggacgcaccgagaatcggcattgcgcatttccggaaatcccgtgccagttcctggtttctttgaaacagacgggtaagatacggacggatgtagcccggacggctggaaatcaggatacaacaggccagttctatcatccttgcacttaatgtcgctgttgctgcaccccggacacccatcggggtaatacccagttttccgtagatcaaaatggcattcagtgcaatattgatccctaccgtagcagaactgatcagtgccgttgtcaatgcgtgctcgctgattttcataaccaccagatagcattgggaaattcctgtaagcagataagaaaatccggcaatccgcagatactgcacgccataaccgatcaataccggttcatccgtaaaaaacagcatcagatactgtgggaagcagatacaggcaatgaaaaatgcaatcgacaccagaccacaaagccgcagtgccatacagaaaatatcatccagcgttttgatattgcccctgccccagtactgtgccccgagaatcgccagtcctccggttgcagcagaaagaagcatattctgaataaactgaatctgcgtggcaagcgaaactgccgacatataattctggtccatccctccgagcataaacgcatctgccacggcaaccagtgccagcatcaagttctgcagcatcatcggaagcataagactccagagttttttataaaaaatcgtatcgtttgtaaacataaaattctctcttttttcctgtgtcatttcatctcaattcatttattatattgcctttttcatcattaagcaacatcaatcattgccacccgcctctatacctgtatataaagttttgtttcttcggaaaaaagaattgtgacgcgaaaaaagccgccgcaggaaaaatacctgcaacggctcaaaaatcaggggatatttataaaggattacgcaatggtaatatatttcttttcttctgtctttgtcttatcttcctttggaacaaacagggtaagaataccgttctggaaacttgcccggatatcttcctgacggagatactcgcccacatagaatgatctctggcagcttccggtataacgctcgcggcgcagatacttaccttccacggtctcttctgcactcttggctgcactgatcgtcagatagcctttgtgcaatgctgcctgcacttcttctttcttataaccaggcagttccatctgcagctcatatccgtctgccagttctctgatatctgtcttcatcagattctgtgtgttttgcggtgcctgctgcttcggggctttcttgttatattcactatcgtcataccatgggttaaaaaatgtatcaaataaatcgtacataagtcatttcctcctgtaaacgttttgttctttgtttatgcccctattatagcacgttattagcactcgtcaagtatgagtgctaataaaatttctaaaaattttattaagtcccggtttcaaagaatttccggattctttccacatccgtttttcgcagatccccatgaatattggattcaaatgttacatactcataatctttctgatatttctttaactgttttaccagcttatccgcctgtttttcatatgcctgcagatctattttttcatattctgaaacccctgccgccctcagattctcttctatctgtttttctgcatccttcacagaaatggccgaagacgattatatgatatgaacccaaacggtacgtcaagtattatctttaaattgcgttgacaatcttccctgaaaatctataataaaattagtactattgtattaccttactttcagataaaggagatccccattatgatatttgcgacaggatggctttccctgcacctgtttggtgtttttataacatttgccctgctggtgattgtttcccagaaagaggatgccacctataaaagcgaacttcttctgacaatcgcatgctgccttgtcacactggtagcaaaaagcatttatattgtgggtggttccaggcaaacgcttcttaccataggaaaactcgaatatctcggaaaatcttttgccaattactgcgcactgatgtttattctccgctggcagaacattaaaattccaaaatggtttatcaataccctgttgtttatcaactgtgctttctatatcctgattgcaaccgttgaccttcaccactggtattataaggattactggcttaacccgtcacaggcgaatatgcgtgggtatactctcgaaattgccccggctcctatgtattatatatttatggcttttcaggttatggaaattataggcagtgtatgtgtgattgtttcctcgtatctttccaaaaaggatatgccagatcgcctgaatctgcatatcatcctgctgttttccatgctttcccctgcgatccttctctccctgcgccttcttggcattttaaaatgggacgacccgacaccgctcggaatgtttttcgcctgcgtgtttatgtgtattgccgtcgtcaaatacaaaatgatcgacccggtaaaaagcgcaaaaaacctgatcattcagaatttaaatgaagctgttgtcgtcacggatctggagggaagatttctctttttgaaccctatggcagaaacactggtttcttctatgaagaaaaaagccatccaccgtcagaaagacagcgaaatctacgatattctccggggttcggagggatattttgactggctggatcaccactatcaggtcgaggaaacggaattgcaaagctgcaacaccccacagggatatatgctgacactggtagatgtcacaaaaattctggaacagaaccaccgcatgaaagaactcgtcacacaggcagaagctgccacacaggcaaaatccgcgtttgtatccaatatatcccatgagatccgtacccctatgaattccattgtcggaatcacggaagtcatgctgcgttcccgacattccccaagggaacaggaattcctgttaaacatccagagttccggacaggcactgctttccatcatcaacgatgtactggacttttccaagattgaatctggaaaaatgcagctggttttagagccttatgatacgctctccctgttccatgacctgaagctgacaatggaaaaccagatcagcaaatgccctctggagctgatttatgaaattgaccagaccataccatgccttttatatggggatgccggacgcatccggcaggtaattacaaatctggtcagcaatgccatcaaatataccgaacatggacatgtccgtttttccgttcatgtccataaaaaagattatgataaagtttccctttattatgaagtggaagataccggtatcggaatccgcaaagaagatcaggaaatattattcgattccttccagcgtgtggatttaaaaaagaaccgccgtattcagggaaccggtttgggcttgacaatttcgaagaatttcgtcaatatgatgggagggactattggtgtagaaagtgaatacggaaagggaagtaaattttatttctgtattgaccagacgattatggactcgacaccaatttcagaaatcaactacgagcagcggcacaacagtgttgtcagcaaagaagcagaaagcctgtttaccgcagaggatgcccacattctcctggtagatgataattccctgaacctgctcgttgcccaggagcttctaaaacctctgcagcttcagattgataccgcagaaaatggaaaagatgctgtcgctatggtacaggaacggcattatgatctggtactgatggatcacatgatgcctgtgatggacggcattgaagctaccaaagcaatccggtcacttccggaaccacaataccagaacctgccggtcattgccctgactgcaaatgccatggtaaatgcacaaaaggaatttacaaatgcgggcatgaacggatttgttgcaaaaccgattgatttccagatgatctgtagccagctgcgcaaatggcttcctaaagatatgatccatgaacttacccgggaagaagccgaaaagattctgtcggatgaaacggacactgctgattccataacggatgcttccgccggaagttccgcggaaaatcctgcgggattttgctttgaaagaggacttccttactgtggttctgaggaagcattaaaacagatcatccaggttttttataatacgattgacagcaaatcacgaaagatagagcagtgtcttcaggaacaactgttaaaagattatacgatcgaagtccacgcattaaaaagttccgcattactgatcggtgctccagatctatccgatgccgcaaaggaactggaaatgtacggaaacgaaggcaatcttgccgctctggaagaaaaaacaggaccgatgcttgccatgtaccgaagtcttaagtccctcctgcgtccttatgtggaggataacgaaagcagcaaaaaggaagtttcttctgatgactggattaccgttcttgagcagatgcatctgtgtgtagaacagtttgacatggatggcgtggatcatgccatggaaaccatggagacgtttcagacaccggataagctcaaggatctgatggaacagctgcgtgtctgcgttgcagatgtggaaatggaagaaattatgaaattaactgatacgatggtcaatttattacaataaaaggagagacattatgcacgaaataaaaagcccatttctcatcctgatggaggaacaaagttatctcgcacaatcattagaaagtgcttttgaaaaacaaaatgtcaaagtaaaaattgtaacgatagcagaagccagcagcattgtcatctcggaaaaaccaagtggttacctgatctgcacaagcccggaacttttaaagaaggcggtcagcgtaaaagtaatggttgaccaggcgataaaaaacaaaactccggtatttatcatgggaaacatcgatgaactggaactgctgtgggaaactctcccacagcagatggtcatggatgtgttcatccgcccgattacggtgggcgatatggtcgataatgtctgcacacagatgaacgatttctatcagctgaaaaaacacacgattctggctgtcgatgattctggtattatcctgcgcaaaatcaaggctctgctcgaagacacctatcaggttgtactggcaaactccggtgcaatggcgatcaaatacctgaccttaaacacccctgatctgattctgttagattatgccatgccgatcgttgacggaagccagatcatgcagatgcttcgggaagatccggaatttcaccatattccgatcatatttctgactggaaaaaatgatgcagaaaccgtaaaaaatgttatgtctttaaaaccggatggttatttattaaagagcatggatcctcagaaactgcacgcggcaattgatgacttttttgcatcacggggcaaataaaccggttacgatacccatcactttttgcggtgggtatattgatatcctgcaaaaatacttcccaccagacagacaaactctccccaccggtcagttttatatctcctgcactgtgtctcataataatattctattcctgttttgcgcatttttgcaatctggcgcaactgttgttttctcgtctgaacattttctttccacccggaaaaatccgaccacttacccggaaccagttctgacagcgtctgccagctgcgcaaataatccatacgcagcacatgccctgtcagaccatattgcagcagaaaattttgtgctttctccattttatcacttgccagcgtcagacggcgaaacactttctttttctgttctgtcccctgtagatacacaccgctttccggctgcttcacaaccccacggatggtacgcgtctgatgatccacacagatctgcagtccggttacactggtactaccaaacaatttccacgctgtattttttccaatcagacatcctttcccgtcatctgccggcagcaccgcagatgccggcaatatccattcggaggaaccatacagccacaccacgtttgtctgcacgctttttccgagatccagattcgtcaccgtctggtcagcagtttccccccaggccgtaaatactgcattttctgcgatgttctgtgcgtcctccacagaaatcggtttttccagataaagaaccggattctgccacacagcatctgcacacttgtctgcacgcgccgctcccatagcaaaaagaaccgctgcaaacaggcatcctcccgacagaaacagtgcaaacaggcgcctcatgattcctgcaggcgaacgttttctcctgccgaaagaatcgcatcggaatccacaatcacaaagtctcccgatgacagatcgccatctttaattgccgcatattctccatttttctcagcaattgtcacatttgttttctttgccacatactctcctccgagcaccgtatccgctttttccatcgtgtatacaaaatatttgtctttttcactgtgtatggcggtgattggcagcgtaacggaatattcctctgaagttttgcacagctccatacgcacatttgcccccagggaaattgtttttttcggcacatacaccgtaacttttacggtatggtcttcttccgtttccgtagaaagaaccgtcatgtcctcccatgtccgatcccctgcttttaatgcaaccgtatcaccggagtccacatatacggcatcttccctgctgacctgtgtggtaaaacgcagtccaccggaagtatctgccagcagaaaggccgccgtatccgttgttttttctcccactgtaagctgtacactgcttacaacaccgctcatctgtgcctttacttttcctctggacgctttcactttctgcaatgttgcaagctgctgttgtttttgcgtaattgtgaccgcattgatttctgcactattgtcttttgcttctatttccgcagcatccgcaagtgcacgttttgcttccttattctgctgtttctgctgtttttgtgcagtctttaccgcttttttcgcattctctgccgcagaagtgtcctgtggttcttcgtcttccccctgtacaaatgcctgcaatttgcatttggattccttccatttctgttccgcctcgctgacaagcctttcatttttgcccacaacattttcatagtcctcctgcgcacgggcaagtgtctgtctgcgatctgcttcctgactggatgcttcgtttttctttgcctgttgccggagtttttcggctgccagctcatcttttaaatccagcaccgtatcacactgattttcccactgatcagtacaggaatccctctgtgccgtcagtgcagaaatctggctttccagtgatgcgatccctgtttttaaattctgcttctgtgcttcgtctttctcctgcgcaaacgctttttctaattgtgccttctgtgcattcagatgatccatggatctttgtatcccgtctttttgctttgtgagagcatccagctttttttgcgcggcatccagtttacgctgtttctggttgatctctatctgtgtgatggtgtcggaataatcgctgaccggagttttggcagcatcctctacggcacgtctcgcctgctgctcttcggttttctgctgttctatagcatcatcatatgtcttttttgcctctttgaccgctgtctgtaattcttccagctttttttcatatgcctgcgcctgctccctgcgcaatctggttttcgtatcttttacatctttctttgcgtccctgacggcatccgcattgtttctgaccgtatccctgtaatcctctttggcacgggcaaccgcctggttccggtcactgtttttctttgcctcggcagagagcagcgcgtcattttgcagctgcagtatttcaatgtcatcagaaaacgtccggattttatctttcaggctgtccatgtcaagcactgcaagcgtctgtcccttttttacgttttgtcctttacgtacattcacttttgccaccagaatatccgccggggcatacactgcctgatccagcagtttttccactgtaccgtccccggtcactttatgctcaatcttacgcgcctgtggctgctcaatgcgcacctgcgcaacggtaaaagatgctgccgaacgggaaatcactgtaaacaaaagcatgattcccagcaacacgataaatatttttgtgggttttcccatgtatttcctcctttgcattttctatttcgtaatcacccattctattcttttactgccgctgctgtaatgcctagttccaggtactgctgccccatgccaaatacgcaaagcgccggaagcagtgccaccagagaacaacacagtgcaaaccccgtctgtccctctttgatctccggcagatacagcgaaagcggccacagttttttagtctgcaggaacaccagcggctgctcaatcatactgaaacactccagaaattgcagcaccagtgccgagaaaattccggaggaaccaagtggcacccctattgcccaaaaaatcttccattccccggcaccatcgatccttgctgcttccagcagttcttccggtattccgcagaaaaagcggtacataagaaataccgaaaaggtagaaaacacccccggcacaatgactgcccatgtcgtatccatcagatgcaaccgattgagcaccagatattgcgagagcattgtcacctgaaacggtaacatcataagcagaatatataagaagtataaaaaacgtttcccgggaatcggataacgtgccagcccccatgccgatggcaggccaaataccagctgtccggcaagtattcctaccgtaatcttcatcgtattccagaacatctgaaaaaattctggagaatcgaaacaaagctccaccagatttcgcagcgtcggatacaatggaaacagtctccagcgcgcatatccctttgtactctccagaaccggtgcaagatattccgccagttccccgcttcccatcagacttccgcaaacaagaaagacaagcggtgccgcggtaagggctccaaataaaacaagaatcgtaatgactatcgcttttttcattcatttgtctcccacaatttctgaagcagcaggacaaatactgtaatgaccagtgcaagaagtacgcttcccgccgccattttatccacagacagatccgtaaaccagttattaaacaggtgctgcaggagatacatatcttcctgcggataatttcctgccacaagataggcctcccggaacaccttaaaagagttcagaaacgaaagaaccacaatggtaaaaatcagcggtcggatcagtggcagcgtaatcttaaaaaactgcgtcattcttcctgcaccatccatctctgcagcctcatacagacccggtgatatcgaggaaagtcctgcaagccagagaaccattgtataacccagatttttccagatatagctgaacaccagcacaaaaaacgctgcaccagtgttcatccagtcaaccgcatggattccgcacaaatgcaggataccgttgacaaaaccatgtttgtcaaacatcagtttccagagcagcacaagcgatgccgccggaattgccataggcaccagatatgcagctttgatcagacgcagcttttgatgaaatgccatctgccatgcatgcagcagaaaggcaagcactaaggaaatccccagcaatagtggcagacataccagaagaaatcgcagcgtatttttcacggcaagcaaaaatgcacggttatgtaacacaatgcggtagttttcgagtccgcagaatctgccactgaccacctgcacaaaggagctgcagatcacatccataaacggcaggagagaaaaaaccgccactccacagaacccgggaagtaaaaatgacaatcccgtccacttactccgcctcatacaactgcactttcttcataatggcggaaagcgtatcttccagtgactgcttcccctgcagatacttttgtccttcactcagcaccagatcccgcaccacgcggtcgttccacgtcggtgtatcaaggctttccaacatttttgtcagatcttcctgctgtttttcagatattttctttacttcataattgatctcataactaccgtccgaagaactgcttcccatctggctttcccgactgtttttgcactctgtatccagtgccgtgcggttgatggaaaagccttccgtcatctggttttgtccttttgccaaaagggctgtctcaataaatgcccgtgcatttttattatctgcacttttctgtgccagtccaaggcttaaaaacggaacaaacgatttatgctctctggcatcaaacagggtaaacatgcctttgtaactgctttctattccataaagctgctgcacatcatttacacttgtcagtgatccgatcgcaatctgtccccctcccatcagtcgggacattgctgcacctgtgcccatccccagcagactaccctctgcgaaaccgtttgcaatttcatcggtaatccggtctttttccgcataactatcggcatcatacaacgcttttgcagttttcaaaaactgtctgatcttctcctgatccacactcgtttttgttttccatgaggcactgtctgcatcgtaaagcatcccaagtgtggtctgtggtccccagtttccgaatactttttctttttcagaattcaaagaaccggcatagttctccagctgctttaaattcaccccggcatcggtcagatcctgtgctccctccacaacggtacagtaaaaacgcaccggaacctgattgatttttcctttctttgtataagcatctgtaatattggtaaaaagcccttctttttcatttgctgcttttacataactgccaaggtcggcaagtacccccttttgtacgtaactgtctgccggaagcccgtcaagtaccaacacgtccggacctttccctgcaagcacctccgtatttaatgtccggatggcatcctccgcagtgacaccgtcctctcccgacataccgatggtctttttaaccatcacatctggatggtctttctgatatgctgtgatcagctgctgcaatgcattggaatcctccagcgcatatacggtaatctgattttgaggcaccgcagaaacgtccgcatcatatgtgtaacgataacaatgccgcgcgccctgtgagtcattgacaaaaaccatatagtttttatcatcgaatttatacagtgcctgaaatgtcacattcctgtctcctaaacttgtaagttctccgttcatcagctgttccgtggtacttccgccaattttatggtaaaaaagtccatcgttgtttatataatacagttcatctccggaatcccccattgtcatggcaatattattgctgtccgtgttatgtgacttgctgattttacccactgcctgctgcagcacgtcatcgttttgcatacgctccgcaagtgccccactcttagcatccgcaaactggatgcctttgtccgtcataagtgcaaactctgttcctgctgcaatcagacggttaaccttttcggaactatcggaaaatgctttgctcatctctccggtctgtggattcacctcatagaccacccagtttaagtcagtcacaaacagtttattgtcggcatacactgcggaagtaacaaaattctccatatcatcactttcttttccagtggcctgatattcgggaagctgcaaatttacttttgttacttttccgtctgctgacacccgtttcattccggattttttattatacccaaacactgctgccgatccatcctctccatttacggcagccacatagcaatctgttttttcaagttctttctgcgaccatgtctttccctgatctttcgaatgcgcaagaaacagtttcccgttgtcgttatcatagccaatcagtgtaagctccccttctttactttttccaactgcgttgataacctgcagattgtccggcagcgttacttcgctttccacaaaccgtcctttgccgccctgtgtagacgcggcatcctctgtatttttctgattaccggtgccacgggaaccgcagccagccagcagccctgccactatgacacataccatcagtagcatggaaattttccttttcatcttcatttctctacaatctcctttctgcctttaagtgtagcagagctttctttaaattttctttaagggaatctttaattttccagtacatttaaagatttctttaagataaatctgctatactaaggacaattcaagaataacaacgaggaaatcaaatgaaaattctgctgatagaagatgataaaaatttatgtgaaatgctgtgctttcaattggaaaaagaacaccataaagtagagatctgcatggatggacgcgacggactggatctggttttgcaggatgcttatgacctgattcttctggatcgcatgctgcccaccatgaacggacttcttgttctgcaaaaagcccgaagcaaaggcatttccactcctgtcattatgatcacagcccttggagagctgtatgaccgtgtggaaggactcgactgcggtgcagacgattaccttgtaaaaccgtttgcgtatgaagaactttctgcgcgcatccgctccatcggcagacgcaatcatgtatacgatgacaacaaccggttttcttatgcggatattacatacgacagccggctgcgggaactgaccgggcctaaaggagggatacagctttccgggcgggaaggacgtcttctggagatttttttgcagaacccctcgatgatcctgcaacgcctggtgcttctttcccgcgtatggggtgcggatgccccggtagaagaaagcaatctcgatacctacatccattttgtgcgcaaacgcttacaacaggtgggaagccacgcaaccatagagacggtgcggggaattggttactgtatcaaataacacatgggaggaaaagatgtttcaaaaattacaccggcaactgacttttttctgcacggttatcacaggggcaattcttctggcactcagcgtggtgtgtctgctttttgcgcgaaaggcaattgttcagacgggatataccgcctttcagaaagaactggtttctgtgattgccagtctgcagagccaggattatatctcccatcagtggttaaagcaaatgcaggaacagcatcatttcaccatttacctgtacgataatcaggagtcgctctactatgaccgtctgcaggacagccactgggaggatctgcgcaacgctgtgctgaaaaaaagcggtacagatatctttatcggtaaagacggacaaacgattgcgcataaagaactgacctatcgttcttctgcaaaagaaacttactatgcctctgtcggatatttgctgcgcggaaacggacagatccgttttgtgattctctacgacacttcccatcagacaggccagattgcgcatatgaccataggagtatttgcagccgatctgataacctttcttttgctgattctgttctcctggttctttaccggacgcatggtacagccactggaaatttcacacaaaaaacagcagcaatttgttgccgctgcctctcatgaactccgttcccccctaactgtaatgctgtccgggctggaaacggtagaaaaatcggaatcttccacggaacggcatcattttctctctctgatccggcaggaaggactccgcatgcagcatctgattgcggatatgttgctgcttgcaaacgctgatgcccgcggaatttccttacagatcaacgatgccgcccctgatgatctgctgctttgtgtctatgaaaaatatgaaaacccggctgcttccaaggggatttccctgcagttttcccttgtggatgcggcttaccgtgactgcgcgctggatacggagcgcatcacacaggttctgtccattcttatggacaatgcactgtcttataccccacaggggggaaaaatcctgctgcttttgtcccagtccgcgcaccacaccatctttgccgtggcagacgacgggccttctattccggaggaagaaaaagcgcatatttttgaacgcttttatcgcacggaccatgcacatactgaccacgatcactttggtctgggcttatgcacagcacaggaaatcgttcgtgcacatcacggaaagattctggtacacgatccccgtgactgctctccgctgcctgaaggttttccacgggatcggggcgttgtttttactgtggtactgcacggataaatttctaaaatactattctgctttgttacagcaggcaattcccagcccgtccggtccaatatgacaggacagccccagcgacagattatcgcacatgacatccatacccggaaagctttctttgatctgccgtatccactcttccgttacttctgcggtagaacttgatgcagccataagatataattttcctgcttcataagcctccttaaaattcgtctcaaattcttttttcattgcgtctatcattgcttttctcgcatttttcattccacggcacttctgatagacatctaactttcccacaccaaatttcataaccggcttaatcttcagcacatctgctgccacagctgcaacagaactgatccgtccaccctttttcagatatgtcagcgtgctgagccccacataaatgaccatatgctgtctgtttttttcgagaatgtctttaattgtttgtgcacggtatcctttctctgcaagctccacggcatcgaggaccgaacggtgcatcggcgtagacacgcgtccattatctacaacaaatactcttccggcatacggctcctcctgtgccattgcctgtgccgtcatgcaggaaccgctcagaccgctgctgatcggaatatagacaagttcttcatattcctgcagcatggctgaccacatatgcatcacactctccggtgacggctgggatgttgccacatccgcacctttacgaagcatttcataaaattcctctctggaaatatccaccccttcacgatataatttttcatcaatataaaaaggcattggcagtacggcaatccccagcttagatgcttcgttttctaagatgccactgtggctgtctgtcatgattcctgtttttttcatagaataatcctgtcctttatcgttttgttttagtataacacaaagcaggggacaattatactgctggcgtaaactgtaacaaatatcctaaaatgaaaacttaaattccactcttaatctgggcatgcggacatttttttagaccgctatgcctatactccttctataatctagaggactaagtcctccgagtgttgatttaattctatctttgcaataccaacccatatagctatttatctcctggataa

SEQ ID NO: 992 - DNA, 165358 bp, Unknown
  gut microbiota DNA sequence
aagtaagaactattataaaacaaagaaaaagatagcattatgccatgagaaaataaggaatataagaaaagattatctacataaagtttcacatgagattatcagcgaaaaccaagtgatagtttcagagaatttacagataaaaaacatggtaaaaaatcatcatctggcaaaagctataagtgatgtatcatggtatgagctgacaagacagttagagtataaggcaaaatggaatggcaggaaatacatcaaaatagatacattttatgccagtagtcaattatgttctgtttgcgggtatcagaatccagatacaaaagatttgtcagtgaggacatggatatgtccgaaatgcggagcagaacatgacagggatatcaatgccgcgaaaaatatactgacagaaggattaagacaaatagcataaagaaatatatagggcagggactgcccaaattaacgcctgtggaagatagtaggttacgaggtcgatgaagcaggaagcccattggcttaagacaatgggtagttcacttatacatatttcatacagatttccatatactacctccaaagcatgaatgcaaatgcaaaagtaacggaggacaataaagtgaaaattacaggattgaccagaagagtagactcactcggcagaatagtcataccgaaggaactgcgcaggatgctccatatcaaggagggcagcccgctggaaatatatatggatgcagacgagacgatagtgctaaagaaatattcgcaggtgggaagcctcaaaaatatatcacaggcatatgcacagagcctgtcaaaggtaactggtgccacggtatgtgtggcagacagggatgagataatagcggcagccggaaaagaccataaaaagtatataggcaaggctttatccaaggagctcgaagacattatggataagagaaaaagtggattatacagtaaaaaagacgataacctgatatctgtggtaaaggatgatgaagctgactgtgaagcgcaggcgatagcagcaatagtgcatgatggtgatagtgcgggagccgttatactttgtgcttacgctgaacaaggcgataagcttgagattgtcgaaaagctggtgagtgcagcagcagaatttccggccagacagcttggctagagacagcgaaaagcactgtaaaaaactatttacttgactacaacagtaataaagagtctctttctcttaatgtttacttttcttctacagaaagctgagtgactttcatctccagatttttacagaaaagaagcaaaagaccatttatataagtctcatttgccaagcgttgaaatgggaatgccggtagcatcagataattcctgcaacgacattcttttttctgagtctctcaaatcttttagcctttccggtatggtaagttttgtgtgcatagtgtattccttcgctttgaatatacagatagattaccatgatattttacagctggaaacttccgaatggacaccggaaattcagctaaagaactagagaaataagaaataagaaaaatgtattatgaagacgcaaaggaaaatgcggcatttgaacgatgtaccgatgttatcactaatatgattatgaaatatggtccggttttaaaaagaaagtgggctgtagatgaatggctaagaaatattcatgtggaatgctttggaactaaaaatgaatggaggagttttatggcagaagataaaaaaaggaaattgctgttgcagtaataaatgtaacagaagaatacctgaaagaaaaactctatgaggttagagggaaaaaggtattgttggatgctgatttagcagaaatatatgggtatacaaataaaagatttaatgagcaggtgagaaataatattgagaaatttgatcctgattttatgtttgaattgacagatgacgagacagagtatttgcggacgaatttttcgaccgcaaatataagctcaaaaagtcgttataatccacatgtatttacagagcaaggactatatatgctgatgactgttttaaaaggatcattggctgttaaacagagtaaggcattaataagaaccttcaaaaaaatgaaagattacatattagaaaatcgtgatttaatcggtcagagagaattacttcagttaagcatggagactgctaacaacagaattgaaattagtaaaatcaattctgatatgatatctcttgaaaaacagatttctgatgtcgcagaaggtctgaaggatgtagtgacgaaatctgaacttgaggatatgatgaatagttttatttcagatgatgatgaaaaatggcttatgtttaatgcaaaatttagtagtgcgggtgaggtttacgagtctatttacaggcaggcaaagtcatcaatatatatggttgataattacattggtttaagaacgctggtgcatcttaaaaattctccgacaggagtaaatattattttattcagtgacaatgttggaaataataaacttcacaacatagaatatacggatttctgtaaggaatatccaactgtaaaactgtcaatgaagaagactggcggcatattccatgatcgttttatcgtgttggattatggaacggcggatgagcgagtctttctgtgtggcgcttcttccaaggatgccggggctagaataacaagcattgttgaggattatggaacagccaaatacaactctgttgttgcaggattattgaaaaattcgccattagtattaccgaaataggagtgtgagattattgaagaagaaaacaagatgttacatatatactcgtgtgtctacggctattcaggttgacggatatagtcttgatgcacagaaggacaagctgagaaaatatgcagaatttcaggacatggagatagtgggggagtattcggatgaaggacattccggaaagacgtgaagatggtaattggattaggaatagtcccaactaaaacaaaagccggatgattacattaatgttacgattgagcttgatgatatggatgtaacatcagctgagaccaaggtaacctatgatgagataaagaagtatgtggcagagcataatgacggaatgaaggtttccaatctgtatatttcacaggtaaagaaaaaatgcggaattgaggttggaaagaattataatatgccaaaagcagatgatagtaaacagccacaatgtccggaagaaaaggaaaaagcaattgtggaggcattggagcattttaagatgattcagcagaaataaaaagagtttgataaatcgggaatagtggaggtagaaaaatatgtatagaatatatagcacacttatcgaaattgttgctgcagcagtttttataattcctatctggtgcatatataacaagttgcttttccgtagctggaaaataaccattctttatataatatttggattctatttaactgctgttttagcattggtaggatttccaaatataatatcattaaaagttgaattgacggtaaatataattccttttatatatatgataaatgattttagtaatgcgtgcttgaatgtgttattgtttgttccttttggcttctttttgccagtgttatggaaagaattcaggaatgcaaaaaaagtatttatagcaggatttgcaatgacatcatttatcgaaatagctcaaattttcacaggacgagcgacagatatagatgacattattacaaacattgcaggtactttagtcgggtatctaattgcatattggtttacaggtatttttacaagaaaaatagtgaaaaattcaaaaaagaacgacttttacataatatgtgcatctgtagtacttattatgttcttccttcaaccatttatttcatctttgttatgggaaatgattctgtgacttcaaatttcactctacgtagcatagaaaccgtaaaattcaccatattctacgttgcgtgggtgtgattgggaatcaaatgggataatcaaatcagagaggaggaaaacagatggatcaaattaaaaaactttcagatactgaaatcgaagaaattatcaggaagatggacagaatgtttttagaagaaggctacgagaagacttacgaatgggcattgaggcttataaaggaatatccgaattgtaacatgcttatctggcaggctgcggtaatgcttgatgcaagaagaataacggataaatgcacaaatccggaaaaatatgataagcagattaacgcatggtatgagctggcactgcatgatgaaaatgaagaaatacagcatcatgcagcagattctttatttggattttatttacgtaagaaggattacaccaaggcagaaaaatatgaaaatattattttttccggctatagtatacttaattttgtgctttccacaatggctggactggcattacagggaaaatgatatcggttatgcaaaatttttgtcagggaaagtacaggcagttgttcatacattggaaatgggaaaatataatgagtattcaccaatgcttgatattgtatgtgcagggaaggatgtagagggaacatataaggtggtaaaacttctcattgataatgtgggtactatgtatgattttagaaagtccggtttatataagcatatgaagttcagagatattgatgaagctatattagatagtgtaaaagaaaaacttcttgaaggatttagaaatgaggaagaattcggctacatggcaggatatgaaccgtgggagaaattaattttttacagataagcttttttgaaaactgtcgtttggtaaaatctattccatttttaaaagccctgcgataaaatatgttctgtgaatcattcacagtattatatcagatgggagtcaatcccccatctgatatagcctccggcaggattgcagaggtgcgcatttgaagaatgtcatgcatttgcatgacgcacacctcgcaacaagaatgccgaggcattcttgaatttaagagaggcttggcaatgaacaaggattttgaacgctgctgtagctttcttgcagacatgattattaaatatgcacctgagataaaagacgaagtagaggtgtgtatgatgatcaaggattccattgatgacgagaaagtaagcaggcagaaacaatttgaccggttctgttattacttaggtggggcaaaacagtttctggacaaaaaggctgcataggcagccggcatcctgtagataatatgctatgggatgtatacatgtattacgggacttcattcataagagtggagtctttttgttttattgtaagcctgttgggcgcttacgttttattttttattttgaaaaaagttttggttgaacagaggttggaatgatgataagatttagttgggacagattatgaacgcatgcgttcacaatttgaattggacacattttagagcatttttacgtgtgtcagatgaaaacgccagattgtggtatatgaatgaagcagcacaggaaagttggagctcaagaactttagatagaaatatcagcacacagtattattacagattaatacagtcgccaaagaaagaagaagtcatgaatgaaatgcttcagaaaacatcagaaactcaaaaaaataaatttgaacttctgaaaagtccaattgttgctgagtttcttggattcaaaaatgaagattcctatatagaaagtgatttggaatcagctattttaacacatatcagagactttcttatggagatgggaaagggatttgcctttgttgccagacagcagcatatcgttactgagacagaagactattttattgatcttgttttctataatattgagttaaaatgttatgtgcttattgatttaaaaatggggaaaattacacatcaggatgtgggacagattgatatgtatgtccggatgtatgatgaattgaaatgtaaagagggtgataatcctacacttggaatattactttgtgcggaaacagacgaggatatagcaagatattctgtattgcatgataacgacagactttttatgtcaaaatatctcacatatctgccaacaaaggagcagttaaaagctgagatagaaaggcagaaagaaatattttatatgcagcatccagcattgtctgaaaaagaaaaagaaggtatggaagaataataaagcatttcatacaatccagttgtatggaatgatggacaactgaaatagacggatttttagacacaggagatgaaagctatgaaaaaacagcagaaatgttacatatacacaagagtttccactttcatgcaggtagatggttacagtctggatgcacaaaaggacaagctaaaaaaatatgcagattatcaggaaatgtctatcgtcggggaatattcggatgagggtaaatcgggtaagagtgtggaaggcagaccacagtttaaacagatgttatcggatatagaaaatggtaaagatgatgttgattatgtgttagtatttaaactgtcaagatttggaagaaatgcagcggatgttttatcatcattgcagaaaatgcaggattatggagttaatcttatctgtgtagaggatggaattgacagttctaaagatgctggaaagttgatgatatctgtattatctgcggttgcagagatagaacgtgagaatatccttgtccagacaatggaaggcagaaaacagaaggcaagagaaggtaaatggaatggaggctttgctccatatggttatcagctggtaaatggtgaacttatcattgcagaagatgaagccgagattatccgtattatatatgataaattcgtcaatacaacgatgggaatggctgcgatagctacatttcttaacaacagtggttataagaaaaagcttcgccagaataacacaattgaaggtttttctacatcattcgtcaaaggtgtgctggacaatccgatatattgcggtaagcttgcatttggaagaagaaaaaatgagaagattccgggaacaaggaatgaatatcatatcgtaaaacaaaaggaatacatgttaagtgatggaatccatgaggcaattatatcagaagaaatgtggaatcaggcacatagaaagcgtcaggagacaggtgttttacaggtaaaaacgcacagccttgaacatgagcatattttatctggaattatcaaatgtcctgtctgtggaagcggtatgtatggcaatgtaaaccgcaagaagcatccggatggaggttattacaaggattatttctattatgcatgcaagcatagaaaactggttgacggtcaccgctgtacctataagagacagtggaatgaagacaagatcaatgcggcggtagaggagataatccgtaaatttgttacgaatccaaagttcgaggaagaaatccgaaagcaaataggaggtagtattgatacgtcggagcttgacagagaatatgatggtttaaaagacaaattgagccagacaacaggggcaaagaataagcttgcagaccagatggaccatttatctgtatctgataagaattatgataaaaagtacaatgacatgcaggaacgacttgataagctgtatgatgaaatcaccgatattgagaatgccatagaagaagtcgaaacaagactttataatatcaggcaggacaaaatctcagaagataatgtttaccagttccttttattctttgataagctgtatgataaatttacagatctggaaaagaagacatttttgaagagttttctgtccgatgtatttatctatgaggaagagcaaaaggatggcagaatattaaaaggtctccggtttaaatttccgatatatatgaatggcagaaatgtattgggtgtggatcgggacaacgaaagtacagatgagactgtggtagcactacaccatcaaaggccgactgtaggatcccaaaacaatccaatatccggcgggcaataggtgaacacgaaaaatgcaaccgtaagcaacagcaggacagcggctgcggctttcgtcgatagaagagaagacttgcgataccgtttgttttcgacaaacaatgccagaagaacccctgcaaaatacaaagcgatatttaaagcatcgtagtttcggccaagcacaccccgcagcgtataaaatccgaccacaatcccgcccattccggcgaggataccgagaactcttgccgggagaaactgttccggaagcatattgccgcggagcagcacttcgaggatggtcagaagcagaaacgggaaaaacaaaagttttaaatgctcccaggtggactcatttacagctgagaataacccgacgacagcgttatctccggaccattcataggtgaaatggagaagaacacccagtacagaaataaaaataaaacggaacagattggtttttaaagacatagattcctcacggttttataattgttagaaacagtatatgaaatttgaacagctttatgcaggcatcagccgttttttgtgaaaatatggaaaattcttacgtttttcttaatccatttgaaaccgaaagcataccatggtaaaacagggggagcaaaaaagaagcaggaggaaacgaaaaatgaaacgattaattacaacaatttgtgccgtttttgttttctgttttgttctttcaggaacagcagtccaggcggcagcagagtatcagggaaccttatcaaaagattaccgtatgagctggtcgaacggaacgaataaagtttattatgcgacctatccggaaggtggaacacacatgaataagatgaatgtgtatcgctgtgaccggaacggaaagaataataaactgttattcacacagaatgttgatgacgaaaatggctatattattccggaagaatttactgcaaagaagataacatttgcagtaagttcagagaaactgtccggttccgaagaagatccggtaatagaatatgtttatgactgcaccacagagcagattacaaaagtggaaaaatagttactgttcgcagggagacctgcgaacagtgacagaaaataaatgatcatattacataatgatacataaagataaagtgacagacacttccacccatcacgaacagatggaaaatttcatggctgccgaagtatttgtgaagtgcgttaaataccggaagtttcagagcatagattacaccaccgatggtgtagatgatgccgcccgctaaaagccagccaaatgcggcatgcgggagatccgtccacagccgggcaaataccggcaggcacgtccagcccatggcaatgtaaatgatggaagaaaaccatttcggacaggtgatccagagtcctttgacaatgattcctgccactgcaattccccatacaagagccagaagggtatatccaattctgccgcccaggatgatcatgcagacaggggtataagatccggcaatcagaacgaagatcatcatgtgatcaagcttctgaaaattccggagtactttggtagatacatgacagatactgtgatagattgtgcttgccgcgtacaataaaaccatacttgtggcaaaaattgtcatggcaagcatataggttgcatttccgtgagcttttattaaaagtggtgaggctgcgatcaaagccatcaggcagccgataaaatgtgtgatggcgcttccgggttcccgaattgttaattgcatagtaaaatctcctttcttacaatgtataaataaaaactaactaatgtagtattgaaaactatatctaacataaataaatactatgatatattggtgcgcatgtcaataataattatgcataaaaaaacgggaataaaatgccgtttcattgacacaagttcaatgtttgtgtattatgcagttagttaaagctaactgcgtgaatagtatgaaaagaaaggatttctgatgtatgaataaaaataacaggaaagaaaaaaaagacaatttaaatattttgaagtttatcggccccggactgctggtaacagtcgggtttattgatccgggaaactgggcatccaatattgcagccggatcgggatatggatataccctgctctggatggtaactctttcaacgattatgctgattattttacagcacaatgcagcacatctggggattgtgacgggattgtgtctgtccgaggcagcaagccgttacataaacaggacattgaagaatgtgattcttgtaacggcagtagccgctgccattgcgactgcgatggcagagattttaggaggtgccattgcactgcagatgctgttccacattccgattaaagtgggcagcatgctgatccttgtcgtggtcttgttctgtgaatttaccaatgcatataaaaggatcgaaaaactgatcatgctttttgtctctctgattggtttttgctttttaattgaaatctgtatggtgaaaattgactggggagctgccgccacaggatgggtaaaaccggtatttccatcgcatgcgatgccggttatcatgagcgtgcttggcgcggttgtcatgccgcacaatctgtttttacattcggagatcattcagagccggaagtggaatctgaaagaagaagcggtgattcagagacaattgaaatttgaatttaaggatacgctgttttccatgatcatcggatgggcgattaacagcgccatgattctcatggcggcggcgacgttttatcagagaggggaaaaccaggtggatgatctgacgactgcgggaaatatgctgacaccactgcttggaaatgaagcaacggtgatttttgccattgcccttttacttgccgggctttcttcaagtattaccgcagggatggcgggaggaacgattttttccggaatttttaataaaccttatgatattgcgacgaaagaaaccagacagggtgttttgattacgatgattccggcagcacttatcattctgctgatccggtctccgtttcagggattgatttattcccagatgcttcttgcagtacagcttccgatcactatttttacgcagatttatcttacctcgtccaaaaaagtgatgggaaagtatgcaaacagtaccggacttaaaatggttctctgggcaattgcaattgtagttacagcattaaatatcgggctttttgtgacgggcttttaaaaagacgatagttttttcagaaattctctgggtgtcatgtggaatttccgtttaaaaactttatgaaaataggaaaggttgtggaatcctgtggcgagagagacctccagaatagaggtgtttccctgttcaaacagttctacagccttttctaatcgcagattgttgaggtattccactacggtcatgttcatgtgttttttgaaaaaacgcataaagtaatattcgctgaaatagcactgggcagcgagaccggcaaccgtaagcggctcggcatagtgcagatggatatagtccagtacggtttttaatttttcagaggcgtttgcggtgtcgacagatcgtttcccgtccggggtacggtactgcaggagcaggaaaataacctgcagcagtaatgccttaatggccagttcgtatccctcaaccggatttgcaaagagagaactgatctgtgcaaaaattttgcgcagagatacataagccggatgggtcggacggatcagacagggaaccgacagttcttcattggtcagtggcatcagataacgggtggagcagatatcggtcgcatttccaccgagaaagttcatgtgaaatacataggtttcggactggtaaagcgcagactgtccgcgggagaccgagtgcagcaacagaggcgggataaaaatcagatcgtctttttccacagcgtaggaagtaaggtcgatctggtagctggcatctccttcggtgatgagtgtaaattcagcctcttcgtgccagtgcgttgttatgaccggataatccggttttaaagaagtgatatatttctgtatggggaaggttgcgtcaccgtgacgggcatcttctttctgttcaagggcaagtgtctgtaaccgtttcatggaaaattctcctttgtcttatgagagcagtattgtgttataaaaagtaagaattatgcaagataattttgaaatttcaaactataatgacagtatactgttacagaaacaaattgtcaaaggacatggagatacaggcgaaggaggacatggacatgcagaaaaaatggtggcatgacaaggtggcatatcagatttatccaaagagtttttgcgatacaaacggagatgggatcggtgacctgcggggcattatttccaaactggactatttaaaggagctgggagttgacattatctggctttctccaatctataagtccccgtttgtggatcagggctatgatatttcggactattatgcaatcgccgaagaattcggaacgatggaggaattcgacgaactgcttgcagaggcaaaaaagagagatatgtatctgattatggatctggttgtcaatcactgctccgacaagcatgaatggtttcagaaagcactggcggatccggacggaccgtatgccgattatttttatttccggaagggaaagaatggaaatccaccgagcaattaccgttcttatttcgggggaaactgctgggagccggtaccgggatcggacaaatattatttccatatgttcgcaaaggagcagccggatttaaactgggaaaatccaaaactgagggaagaaatctaccggatgatcaactggtggctggacaaaggactggcaggttttcggattgatgcgatcatcaatattaaaaaagatctggcatttccggatatggagccggatggtgacgatggactggcaagctgttggcgtatggtcgaaaatgtagaaggtgtcgatgagctgcttgaagatttaaagaatcatacatttgcccaaaaggatgcatttacggtaggggaagtatttaacattggggtggaagacctgccggactttattggagaaaatggacatttttctacaatttttgatttcagcgcccatatgctcagtgacggggaacacggatggtacgatgcgccaccaatttcttttgatgcgtggaaaaaagcaatcacagattcccagatgcgggtacagaatgtcgggttcgaggcaaatatcattgaaaatcacgatgagccgcgcggcgtttcccgttttctgccggattatgcgcaaaatgcggacggggcaaagatgcttggtacagtaagtgttctgctgcgtggaattccgtttatctatcaggggcaggagattggcatgcagaatgccagatggaacagtgtggatgaattcgatgatatcagtaccaaagaccagtacagggtggcgcgtgaggccggactttcggatgcagaagcacttgccgtatgttcggttatgagcagggacaatgcacggacgccgatgcagtggaaggatgcgccgcaggcgggctttacctcgggaactccatggctgaaagtcaatgataattatccggtgatcaatgtggaaaaagaggaagggcagccggattcggttctgcattattacagaaaacttatcgcattgcgcaaatctggggaatatcgggagttgtttacttatggaaaatttgagccggcatatgagaatgcagatcacgtaatggcatattaccgcatcctgcaggggcgccgggttctggtagcggcaaattttggaacagataccatagaactggattgggaagttccggcaaaaaaggtacttttatcaaataaaaaacgaacaaatgctgaaaataagctgattttagagaaatgtgaagtgtttgtgacggaatgtaaatagcgttgcaatcttatcggattttgatataatgagagcatacacgaatgtctgtttggggagaggaaaggtatgccgcagtatatcgcaattgatctgaaatcattttatgcatccgtagaatgtgtggagcgtggacttgatccgctgaccaccaatctggtggtggcagatgaaagccgcacggaaaaaaccatctgcctggcagtttctccatccctgaaaaaatatgggattccgggaagggccaggctttttgaagtggttcagaaagtaaaacaggtaaaccgcagccgaaaaaccggtgagccggaattgtcgtacattgcggcacctccgcggatggcactttatgtggaatacagtacgcggatctatgatatatatctgaaatatgtggcgccggaagatattcatgtatattcgattgatgaagtgtttatggacgtgacacattatctgaaaacctatggaatgacagcttatcagctggcgcagactatcattctggatgtgcaggatcacattgggatcacggccactgccgggatcggaaccaacctgtatctgtgcaaaatcgcaatggatattgtggcaaagcacatcgatgcggatgaaaacggtgtgcgcattgcccagctggatgaaaaaagttaccggaaactgctttgggactaccggccgatcacggatttctggcgtgtcggaccgggatatgcgaagaaactggcagaaaacggaatgtataccatgggagatgtggcgcgctgctccatcggaaaagaaacagattattataatgaagatctgctttacaaactgtttggtgtgaatgcagaacttttgattgatcatgcctgggggtacgaaccgtgcacgattgcacagatcaaagcgtatcgtccgcaggcgaacagttccggatcgggacaggtattgcagtgtccgtacccggcagataaagcaaggattgttgtgcaggaaatgacagaccagctggtactggatctggtggagcatggattcgtgacggatcagatagtgctgacggttggctatgatatcgaaaatctgacagacccggtgcgggcaaaaagatatcacggggaagtgactacggatcgttacggaagaaagattccaaagcatgcgcatgggacggcaaatttgcaaaatcatacatcttctgccattacggtagtagaaaaaacactggaattatatgacagaattataaatccggatcttttgatccgcaggatctatgttacggcatgccatgtacgcacagagcaggaggcacaaaaagaacagacttatgagcagatgagcctgtttgattttgcggaagaaaccgaggaacagaaggcacaaaagcaggcattgcagaaggaaaaacagatgcagaaagccatgctttccattaagcagcgttatgggaaaaatgccattttaaaaggaaccaatttcaaagaaggggcaaccatgcggcagcgcaacggacagattggaggacatcgggcatgaaccggctggaaaatacgcatcgttatgatgacatcatagatctgccgcatccggtttcgaaaaagcatccgcagatgccatcggaagaccgggccgcacagttttctccgtttgcagcattgaccggttatgaacgcgccatccgggaaaaagaaatgcagcatgaggaacggatgatgctcggggagggcatcagcagggaaacttatgattcagaataaggacaacatattttttatgattaaattcatacgatatactaagcaggaaatttgtgtggtatgaaatggcagacaaaaaacaatggaaaagatatgtggggtatgcactgtttcttttcctgtcatacagcattggaaacgcagcggctgttgtaagtacaatgacactgcagccggagaaagtggagaaagaaatgaaaacagttgcaattacctttgatgacgggccgaatccggaatatacaccgaaattgctggacggattagaaaaacgtggtgtaaaagccactttttttctgctgggagaagaggtaaaacagtatccggatgtcgtcagacggatgcatgatgacggacatctgatcggtgttcattcttataaacatgttaattttaaggaagtgggcacggcatgcactttgcagcagattgaaaaaacacagaaggcgatttatgatgtgacgggagaatatgcaggatatatccgtccaccttacggatgctggcagaaggaactggatgcgcaggtaaatctgatcgaagtactgtggaatgtagatccgcgggactgggcaacgaccgatgcggatactgtggttcagagagttctaaaggatactaagccgggggacattattctgcttcacgatgcttcggcgtcatctgtacaggcggcatttacggtcatagataccttgcagaaacagggatattcgtttgtcacggtcgaggagcttttgttagagtagcatacttgaatgttccggtgatctcgtggtaaaataactagcagacctaatcattacaagctgaaaaagaaggaataaaaaatgagtaacgataaatttgacacggcacggcaggtgcttcgtcagcagaaattaacaggagaacgcgcactgtttcagtctgaaaatctggcggtatatgacagtgtgtttgaggatggggaatccccgttgaaggagagcagcagtctttatctggataattgtctgttccggtggaaatatccgctctggtattgcaaacatgtcgatgtaaaggaatgtacctggtttgacatggcgcgggccggggtatggtataccgatgatatttcggtaagagattccattgtagaagcaccaaaaaatttccgccgttgcaggggagtaaccctgacaaatgtaaatttcccgaatgcagaggaaaccctctggaactgtaccgatgtaaacctgtcctatgtgcaggcacacggggattattttgccatgaattgtaaaaatatgcagctggatcattttgaactggttggaaattattcatttgatggtgtggaaaacatggagatccatcatgcacgcatgctttccaaagatgcattctggaacagcaatcatgttactgtgtatgacagttttatttcgggagaatatctgggatggaatgccagaaatcttacacttgtcaactgtacgattgagagcctgcagggcatgtgttatatagaaaatctgaaaatggtgaactgtaaattgattaatacgacactggcatttgagtattccacggtggatgcacagattgtaaataccgtggacagtgtgctcaatccttccggcggaatcatccgggcggataagattggaaaactgattttggaaaaagacaaggtagatccagggaaaaccacaattatatgtacagaagatgaaggggagggacaacgatcatgaaagcaagtcacagaaaagacgtcattattgccagaattatttttgccataatctgcgcagcactgcttgcaggaattatatcacttatcgtatggcttcatgggcggaatgcagggaaaaaccagacaccggaaacggaaatcacaaataatgcaccgccggcagacaacagcaatctgccaccggtaacggaacagccgctggacgaagacggacagagtgtatggacaagcacggatggcgtaaatttccgtgcagagccgaatacagacagtgaaattcttaccgttctcgtgacgggaacgaagctgacactgctgggagaagaaaacggatgggtgcaggcagaatataacggacaaaaaggatatgtcagttcagactatgttaccgatcaggaaccggatataacaacgcaggaaacagagtaacggaaaggggaaacaatgagtacagcaggaaaaattatgtccttccgacaggatggaaatgagatttgtgtgaagtatgaacagcaaaaactggtggtgaaagccataagggatgatattgtcaatatttttgtgccttacagaacaaaggaacattattctaaggccattgatggagacaaggcggttgcgacagaactgacggcagagcaaaaaggagaagatctggtaattgcaaccgataagatccggatgcagtttggagaaaatctggaaatggtgattacgagaccggacgggactccgcttgtccggacacaccggcagggcagaagtgtttgcggggaagtcagtgagcagatgaaacagattctggagtcggaagggcatgatacgtcgaatctgggcgcacatgattatccggtacagatgatgtttgatctggacgagggggatgatttttacggtctgggtgataagaccggattcctgaataaaaaaaattatgagtatgagaactggaattccgatattccacaggcacacaatgaggactatcatgcgctgtacaagtcgattccggtgctcttttgcaagaaaaagaatgacgtatatggcatgttttttgataatacgttccacagctatctcaatctgggcaaagaaaatccggaatattatttttacggcgcggatgatggcaatctggatctgtacttcctgggtggagaaaaactgacggatctgattgaagaatatacatatctgaccgggcggacaccgctgccgcagcgatggacgcttggataccagcagagccgctggggctatcagtgcgcagaagatatccgtgatgtggcagaacatttccgtgatctggatattccgtgtgatgccattcattttgacattgattatatggatgggtatcgtgtgtttacatggaatgatgcaaagtacggaaaacctggggatctgattgcggaaataaaaaaacagggctttaaaacggttacgatcattgatccgggaaccaaagtcgatccggactattttatgtgtaaagaaggcgaagagaacggatattttgcgaccgatacacagggaactacctatgtcaatgaggtttggccgggagatgcaaattatccggattttggacgccgcaaagtacgcgactggtggggaaaacaccataagtttctggtcgacatcggtgtggacggtgtatggaatgatatgaatgagccggcaagtttccgtggcgagctgccgcaggatgttgtatttcatgatgaggagcgtacgacaaatcatgcggaaatgcacaatgtatatggacattatatgagccgtgcgacctttgagggactgcagaaactttccgataagcgtccgtttgttatcacacgtgcagcgtatgcaggaacacagaaatatgcgaccgtgtggaccggagataatcagagtctgtggtcgcatctgcagatgatggtgccgcagctgtgtaatctcggtatgagcggatttgcatttgccggaaccgacattggcggattcggtgcggatacgaccccggaacttctgacccggtggatcgaggctgccgtattttctccgctgtttcgaaatcattcctgtcagggaacacgcagacaggagccgtggcagtttgatgatcaggtggtgggaatctatcgaaaatatgtaaagatgcgttatcgtttccttccgtatctgtatgatctgttttatcagggagaacagaccggacttccggttatgcgtcctctggttctgcattatccaaaggacccggaaacctataacctcaatggggagtttctggtaggggaaaatctcctcgttgccccggtattggagcagggagccacgaagaaaatggtgtatctgccggaaggggagtggtatgattactggaccggagagaaaattaccggaggaaagtatttcctgcgggatgcaccgattgatttgtgcccgatgtacctgaaagaaggaacgatgatcccgatgtatgaaaaaatggcgtatgttggagaaaagccgtatcgtacgctgtatctgctgacaactccgggagaggcttcttacgatcattttcaggataatggagaggactatgcctaccgtaagggtgtgtataatttatatcatttccataagaatgcacagggagtactggaaacggaaatgcggcacaaaaattatccggaatacgagcagatatgcttaaaaatagtaggaaaataagcacaaaaaaccgttgcatggcatagtctataatgatgacaggatggagcatgcaagtggattattcaaacgatttttacccaaagattccgttttatatgacatatccgatgcagagtatgtatctgacagagatggaatatgaaaaagatatggaacgaatgaaacagtactatccggcagagacaaaagagatcatggagctggtggaacagaggcttgaccagctggagtatgagggaagccgcatctacgatgaggaaccggaccgcctgatgatacagatggagattgatggaatttaccggaagctgtccgaagtgcagaaaaagaaagagaaccggatcgaaggaaacatgcaggcggcatcatatttcgaaatggttccggcttctatcgccggagaaactatgacaacacaggaacgggaatgtgggaatccgtggctttgcagtatgatcggtgtgctgtttggtgcggaaatgtgcaaacggcgctgccggcatcgcagatgcaggagatggatgtaacggcggaaattacagccatagtaagaaggaaaagataaatgaacaggaaagtaattaaaccagtggtgctgtcagggctttttctggcagcactgattgttttcagtatcataaccaatcaggataataaagatatgacaacggcgatgaaggaggcaacccttcccatcgtccagttttatgaaggaaataacagcgtggcacagctgcacggatacgtatcggaaatgaatattacaaagatgcgggatggaattgtgccggtagaccatacacgactgcttccgctgaaaattaatacatatggacaaaaaatcagaggcattgcttatgaaatccggagtcttgatgattcccggctggttgcaaagggaaatgcacaggagatcaaagaaaaaaatgatgaaatctctgcaaacctgaaaatccagaatattctcggaaaaggggaagaatatgaactgattgttattcttgcttcaggaaaaaataagatccggtattacacccggctgatgcagacacaaaacgatgatactcaggcatgtatggattttgcactgcagtttcatgaatatacattccgggatgatgcaaataaatttattccgaaatatatggacgcggcaacaggtgataccagcacgctcaattatgtggatttaagctgtaccttaaaccagattacctgggcagatttaaaaccggagcagatgggagaactcgaggcatctttcaaggaaatcaatgattcctatgatgtgatcacactccggtatgtggtgaccatcaaaggaaccggcggggaaaccgagtattataatgtggaagaatattatcgtctgcgtatgacagaatcccgtatgtatgtcttaaattttgagcgtactttaaatcagattttccgtggggaaaaccggtttattacagataataatcagatccagcttggcatacgtgacaaaaatattgaatatgctgtaagtgagaccggagatgtgatcgcgtttgtacagcagggagaactctggtgctttgaccgtgtaaataataagattgtacaggtattcagtttccttggggcagaggggatcaatgcgagggataactgggatcagcatgatatcaaaattgcccgtgtggatgaagcgggaagtattgattttgttgtatatggatatatgaaccgtggggatcatgaaggcgaagtgggcacggcagtatatcattatgatggtctggtacacactatagaggaagaaatttttatcccgtcggatgtttcctatgaaatactcaaagcacagatggggcagttaatgtatgtgaacgaaaaggggacattttacctgatcatggatcagaaactttacagtatagatacggacaagcggactccggaagtgcttgtgaaagatctgaaagaaagctgttataaagtgtcggaatcgaatcagtattttgcgtgggtagacagcgacaaagaatacaaaagcgatgtgattcacctgatgaatttgaaaaatgcttctgtctatgatatcaaggcaaaaaagggagcgtatattcttccgcttgggtttatcgatgaagattttatttacggagcagcaaagaaagataaggtgatggttgcagcagcgggaaatacggttttcccgatgaaaaatttaaccatcatggatacttccgaaaattcacacagtatcttaaaggcgtatgaaccgtccaggggaagtatcggttccatttcggtggaggattatacaattaccattcatctgatcaaaaagtccggcggacattatgtggctgcaggaaccgatgcgatcatgaaccgtgagggagacacggaagaaaaagttaccgtgggatcaaccgtgacagatcgcaaggaaacacagtaccagcttgtgatgaaaaacggggcggatgcatccaaaattaaaatgctgacttccaaatctgttttactggaaaatccgcgtgacgtttccgtgaaaaataaggagtcgcaggaatacttttatgtgtacaaaaaaggtgatgtgctgcttgcaaccgatgagatcgcggatgccatcgtctgcgccaataatcatatgggagttgtggtggattccaagcagcagtatgtatggatgcgtgcgcgtaaatcggcacagacggcatttagcagcctgaaagtaaacgatgcggataagagttcatcatccgtggttcaggcggtcagtgccatgcttaattacagaggaaacgggctcagtgtaaaagaactgattgacaatggaggaaccccgaaaagcgcgattgaaaatacattaaaagattcagttgttcttgatatatccggctgcacagtagaggagattctgttttatgtcagcaagggcagcccggtatttgcaatgaccggaacagacagtgccgtattagtgacgggatatacctctggaagcatttattattatgatccgcagacccattccacgaggtcaaaaagttataaagatgcggatgactggttccggaaagcaggatacattttctttacttatttggaccgttaattttcattgtaaaaatgaacaattaaggacaaggttttatggatgattcgtgaagatttaacagaaataaagttcgtatattgcaattcctggataagtgagatatatttgagaatgagttatacagttttggaaagggagagcgtatgagtaagaaaaatgtgatcgtttctaatgtgtcagaaggacacgacaatccaatcgcagaacttgttcaggtagcatgtcagttcgacagcgatattatgttggagagcgataaccgcagaattaatgcaaagagcattatgggaattatggcgtttaatccatccgatggaatgtcggttgatattgtgacggagggtgccgatgaagaagcagcacttgatgcaattgaaaaatttttagtatgtgaataattctggttaggaggaatcgttatgcaggagaagaagttaaacaaagcagtttctgacgtgaagctgatgaagacaccagagggaaagacagaagttaaaaatgcggttaaggatgctacaaaaaaagtagaatcaaaagtcggggatgttgctgaggcagcagcaaagaaagcagaagttgtagaagagaaggcaaaagaagttgcaaaggcaacaacaaaggctgttgttgagaaggcagaacctgttgtgaagaaagctgcaacgaaagcaaaggctgctacaaaggcaaagaaagaaaaacagccggcaaagaccgaaatcattgttcagtatcagcagaatgctgcaaatcttggagaacttgaggataaggtaaagaaacagtttgtagctgagggacatcgtgccggatgcattaagacattaaatatttatgtaaagccggaagagtacaaggcatattatgtaatcaatgacaagttctttggaagtgtagatctcttctaagcgagttttattacccatacatgatataaaggacgactgcagatgcagccgtcctttttacgtggtatgagacaggatattcataaaaaagagtataaaaaaagaaaccggataaacagtttctttaaaagagcgggtgatgggaatcgaacccacgtatccagcttggaaggctggtgttctaccattgaactacacccgcatatagtgcctagttccggaatcgaaccagagacacgaggattttcagtcctctgctctaccaactgagctaactaggcattgcagtggatttcttaattgaaaatctcacgcggaacatttagtattatatccgagtgagatcttcttgtcaagaaaaaaatcattatttttgatttttttgaatatcctgtgtgtagcagcgcagaatttctccaacgctccatgcctgggcatagcaaccacggcaggtatgcggggcatcaccgtcaaaaatttcggaaatagaaccaatgcagccctcttccaaaaggtgggtctgtaccggtgcaagatatgccattgcctgtttttttgcttccggagagtggtggtggactttcatgtaagcggtcagaaagccgcccatcagaaatccccatgcggttccctgatggtaagcggcatctcttttcggaagagagccacagtagatcccgtgatagtctttgtgttccggagagagggagcgtatgccggggccggcaagcagcttttcctctacggtatttaccacctgcagagcctgtttggccgtgagcatggtatgtggaaggctgacggcatagatctggttggggcggatgcttgcatctttgccgttttcttcaataacgtcatagagacatccgtctttttcgttccagaattcttttcggaaggaagcagatacacgagtggcaagctggcggtaaacggaggaatcttctttgaaatgttctgccagttccgcagtcacgcacagcgcattgtaccacagtgcattgatttctaccggttttccgtgacgcggggtagctacccagtcaccgacacggacgtccatccaggttacctggtccaatccgcttccggcatggatgagggcgtcatcatccatatagatggaaaaatccgtgccgtgtgcataggcatgaataatttcacacagaacggggtaaatacgccgctgtatatagtcataatccgatggttgtccggtaaccttcaaatatgcgtccacggcataaaaataccacagagaggcatctgcagtgttatagagaggatcctgcccgtcatccggaaacatattcgggaccatgccgtgatggacatactgcgcaaaggtcgaaagaatttcccgggcatccgaaaaccgccgggtggccagtgtcagcccggaaaaagcgatcatggtatctctgccccagtcggtaaaccacggaagacctgcaaggattgtcataagtccggtggaatcgcgccgggcaagaaactggtctgctgccacgacaagtgtattggcaaaagcatcatcgccatatcccgcctgttgttttaaggaattataatattcctgtacgtgtgcgatttcgattgctgcggtatctgcctgcgggcgggaaagcacaggggtgtcctgtaccgggtggacggtgcaaagcagggaaatctctgtactgctgtgtgccggaagtgtaaaacgcagatcatatgggcaaaaatgtgtatccagtcccgccgtttcgttgtctacttccgtctggtattgcatatccacgtcgtattggttttcacgtggaaaaagtctgccggcactgcaggaaagctcgatgcagagtccgggtgcagcagccgggatcagagtgaaaccgcccactgtgtttggctcacaggtaaactgcaggtcagaaacggcagacgatgcactgtgctcccggaaattcataagcggggtgatggaaagtccggcttcctctccctggtttgtaatcgtataggagatcgcaactgtgtttgattcccgcagcagggccagatgtttgtccatacggatattgccggcggaataggaaaagcagacagttccgtcacaggagaaatccgttaaaaaacgctgtccttgcgtgcggatgggagaatgtcctttcccggcatgctgggaagtttccagattgtaaacatgggttccctgtgtcagtttttcattggttttggaaaataccagatagcgctcgaccgggggatgcagactggcaatcagatatccctgatgtgtccggttgcaggcaccgatgatggagcctcccgcgtatccgccgattccattggtcatggtccattcacggcggatgtttttttcaaaatctgcaagtttttctgttggaatatgtatcatatgcacctccgaaaataaacgaaaaataatatctcttattgtaagggctggggaacaaaaaatctactgtatttatgaaaaaaatattctttagtggaaaaaaagtgtgggatggagtataattaacattactacaaatgaaggagagatagaagattggaagtatatgtattagtaccggtccggaagaccgtggttgcaaaagtagtggggacattgatgcttgtacttgcagtagtgagtctgcttgcatcatgtctgaccagtggcattacattaccggttgcactggtatgcggaattgtctggtttgttctgatgggaaactccaaggagtttgagtattcttattttgacggggaagtccgcttcgcaaaagttttaaacaagaaccgcagaaagtcactgggaagttatccgatggatgatgtaattcagattgcaccggccggagatcgcagtgtatcacaatacgagagagagggtgtcaaggtgattgattatacctctcatgacaaagatactgcatattatgatatggttctgaaaaaggaaggcgagacactgctgatcaaatttgaaccggatgataaatatctggaagcagtggagtttaaatacagacaaaaagtaattcgcagaagtacacaggcgtaagaaaaaggggtgccgaaatccggcatccctttcctgtgagtggatagttcttatttcgttttgtcagaaggggtatcgagataatgcatgcgtgaatccggtgaaatggcaggggcaacggatctgccctgtgtgttcatcagtttcagacaattcggacacagggtaccgaaagaaaccggagcaccacagcgctggcagtgcatgccggagatagtggaagctgtgtcgacctcatgatattcgatccgtccttcccgaatccactctttgatctgccggagaggaatatggaaatgttctgcaacttcatattcatttacagtgttggcgcggatataatcccgcacattccggaaaagctgtgcttcctgacaagtgggacatagcgttccttcataatgttttggaagcgtgcgtccgcaaaattcacagtatttatatttatcggaagtatttttttcagtcagcatagttgtcactctccattgctatttactagttactattataacaactgaaccatgttttttcaattaagaaaggataacagatctgtggaatatcaattacaaagagaaaacccaattgcggtatttgactccggagtgggaggaatcagtgtcctgcgggaactgatccggattatgccggaggaagattttatttatttcggggattctaaaaatgcgccatacggaacaaaagaaaaagaaaaagtacgggaactgacgatcggatgtgcaagaaagctgtttgaccagggggcaaaaggtcttgtggttgcctgcaatacagccaccagtgctgctgtccggaaactgcgcgagatgtatccgtatattccgattgtcgggattgaaccggcactgaaaccggcggcactttgcatggaacatcccaaagtccttgtgatggcaaccccgatgacaattcatgaagaaaagtttcatgtgctgatggagcgctacaaagagaaagcacaaattcttccgttgccgtgtccggggctgatggattttattgagcggggagatctcgacggagaggatcttcataaatatctggaagatctgctttattcttaccgggaaaaccaggtggatgcagcggtactcggctgcacacattatccgtttgccagaaaacagattcagcaggtgttgggggagaatgtgaaaatttttgacggaggcgagggaaccgcacgcgagatgaaaagaagactgcaggagaaagatctgctttgcggccggcagaaacgtggacaggtggtatttgaaaacagtctgaccgatgacagcaagatcgaattatgtaagaaattgttaaatatataaaatgtctctaaaatttttggaatatgattttagaatttgtttttgaagtggacataatatggacacattttttgcatatactagacaatgtaaacggaaatcattcctttacattattccctttttatttaataaacattttcataactaaactcctcgaagagaagccgatccgggaacggagaggcttctcttcattttgtggcaaaatgctgcctgtgaaataaaatacaccgtgtggatgcaggctttctttatatggagaaaatatacaaaaataagtgaaatggagattggaactttgttaattatttgacgaattagcggttacttttttgggggctgaggtgtaaaatatacagagattataaggaggtacaagaaaatgggtaacataccgctttggctgtgcataccgtttgccggccttttattatgtatcgcaattttcccgctggtaaaaggagaatggtgggacaaaaataaaggctgggcggtactcatctggtcacttttatttattattccgtttgcagtaaaatacggcgcaggcgagactgcagaaacagttctggaatgtatagtgaatgattatctttcctttattgtattgctgtttggtctgttttgtgtttccggaaatattaatctggaaggagattttgtcggatcaccgcgtatgaataccggacttctggcgatcggaacactgctttcaagctgtatcggtacaaccggtgccagcatgcttttggtacggccgatgattcagatgaattcctggagaagaaataagagtcatattatggtcttcttcattttcctgatttccaatatgggtggatgtctgacaccaatcggtgatccgccacttctgatgggatttatgagaggtgtaccgtttacctggagtttacgtctgttcccggtactggtatttaatatggtaattctcctgaccgtattttattttatcgaccgtcgtgcataccgcagagacattgcacttggcatgcgtccggatatttccaagccaacgactacttttaaagtcaatggtctgcacaacatcatttttatgattatgattgtggcaggtgttgtattaagcggcgttcttccgggaataaaagcattccagaatgcagacggaagcgttatcagtattccgattttccggagcgtaagactggcagtgccgacactgatcgagattattattattctggttgcagcgtttctgtcatttaagacaacgaaatccgatgtgcgcacaaagaaccactttacctggggtgccattgaggaagttgcagtactgtttatcggaatttttattaccatgcagccggcactcatgatcttaaagagcaaaggtgcggaactgggactgacaaaacctttagagatgttctgggcgaccggtgcactttccagtttcctggacaatacaccaacctatctggtattccttacaacggcaggaacactgggcgcaaccagtggtattgctacaaccgtgggaaccgttgcggtcaagatgcttatggcaatctcctgtggtgcggtatttatgggagccaacacatacatcggaaatgcaccgaactttatggtgaaatccatttcggatgaaaacggtatcaagatgccgtcattctttggctatatgttatgttccctgaagtttttgattccggtatttatcattgatacactggtattctttttataggaggtagaaggctatggacaacaaagaacaatgcagaaagctggcgaaccgaatctatgaactggatgaaaaagtgtataagacttccggttccggtttgggaaaaacatttactggggaaaaggcacgcgtgctggacaacctgacggtgcttatcgtttcaaatccgcagggacatctgcttcgaagtgaactggctctgatcggaaacatggcgagaagtatccgggataaagatgcacgtcatgaccttttgattgaatataatgatattctggaagaaatagcaaatctgccgatgagttttggatcggttgatattgtggacaaagatctggcagatatgaattcttccattctgaacaagaatttttcggagaaggatcatctggtcatctgtatcagccgttcacacggaagtgcaggtaccgatatcggatttgctctggctgaggcactgcacatcaattactatgatgagtctgtgctgaatcagattcttgatcgcagggatgcgaaggaatttggatcagatgcaacgaaagtcagcgattttaaacgttatcacggtctgtcaaagaaagatgcgtcatttttccggcagagcgctttgatctgcgaactggcaaaagaggaagatatgattattatgggacgtgctgcggatgtcgtattgaccggacagcatattccgcatatcagtatctatattaccgcaccgtttgcgattcgtgtgcgccgtatgatggaactgaagaatctggatctgaagcaggcaatcaatctggtgcgcaagatggatcacaagcatcaggattattatcattcttttacgggaaaacgctggggagatgcgatcaattacgatctgtgtatcaacagtgcatgctatggaattgatgagtctgtagaattgatcggacgtctgatcaaccggcaggcaaaattggtacatcgaaataaagataccaaatagtgtggataaaaccaatagacttccgtcttcgttaaacggcagtttaagaaaacgttaagatacaacaggtaaaacattaagcgtacaaagatataattggaaacagataaaagaaaaggagtttcagtcaaatggaaaagaaaaaattgctgaaaaacaaaattgttgatacgcttccggtgctttaccttgaaactgtgattctcatggttttaggacaatttctgggaaactttgttctcggaatcccggtggggattgcctatgcaagaaaccctgagatactaaattctgcgtttttgaatacgacactgatgtatgtgatcttttggggaatctgggccgtggcattgttctggatcggtatccgaaaacggaatcgtccgattttacaggcagtcggcacgaaaccacagggaaataactggaaatatctgcttttcggtttggttctgggatttgcactgaatggattttgtattctgattgcatggctgcaccatgatattgtgctgacctacgatgccattcatccgctgtggtttgtggttgtgtttctgaccgtgtttatccagtcgtcggcagaggaactgctgtgcaggggatttctatatcagaaactgcgcaggagttataaaaatccggtggttgcaattgtcggaaatgcactgctgtttgcgttgctgcatctggcaaataacggagttacggtgctttctgtcctgaatatttttctggtcggaattttgttttccctcatggtatattacatggacagtctctggtgtgcgtttgccgtacatacagcatggaattttacgcagaacattctctttggcttgccaaacagtgggatcaatgtgccgtattcggtatttaaactggatgcagcgaccgccagggacagttttgcatacaacgttggatttggtatcgagggaacgctccttgcggatattgtacttttggctgcctgcgtgctgttgtatctctggggaagaaagcatggaaagaaatccatggatgtgtgggcagaaacataatataattagtattttacgaaaacggcaccaggttacatctggtgccgtacaactttgtattcgtccccggaacggtaaaagggacattctttgtaattactctggacaaaacgagccatgtcgtcttcatccatattgacggagcagtagtacgcttcgtcctcttcatcatattcattgtatgcacaaaaatcacaactggccatacaaaagttcccctccttttatgaagtgaatcaggcgattgcctgttaaataaactgattctgcccctcatcgtaatgataattgatggcagcaagggtttctgtaattgcatctgcatctgtcatatatgcggcagcaagttcggtaagtgtcgggtaatgatcacgcagctgtgtgttgacaacagacagaagcatgacaggatctttcggtaaattcatagtatattcctcctttggaaacgattattgcatatcggtataactgcgcaggatttcctgcagaaaaatttggtattcattgacaacggaatccggggaaatcacacggatatgtgtggataagccggtaagccagccgaaaaactgtggactgacagcgacctgtgcccgcgcgagaatgtgggtttcgtcgtaggggcgcatggctacaccggcaccaaagcggtcaatgatgacaccggtcatggaagtatcgcacagaagctgtacggttgtctcttccccggcaaacatgccgaaatttttgcgggaataagaggcgatatccatctgttcgtaatcggtccgtccgcaccgcgcctgatccacagcggagagatcaagcatcttgtcgacacggtaatgtttcattttcccagcatccgcgtcataggcaacaagataatagttttcgtcatcccaggtaagaagccaggggctgacctgatagaatctgccgtctttgcgcagctgcatttcttttctgacattccagtcgaagtagtggaaacggatctgccggttttctgcaatggcagagtggatgacatccacgctgtaatagattttttcattgctggttttgttgcggtctgcaacgacaacctgacgctgtagttttttcgcatcgtttttactgacaagctgttccagtttgccaatcagctgccgtgatttctttgtggtaataaatttggaagactgtaccaggtcaacaagcagtttgacttccggcagctcaaatgtgcggtctgctatgcggtaaccggcatgcgcgccttcggtccggatgatgtcataaccataatcacaaagcgtctggatatcgttatagatgcttttacgctccgcccggatgccgtttgccgcgagatggtcgatgatctgtggggtagtgacggtatgggtttcatccgtgttctgacgcagataatccagaaggaataacagcttttgtttttgattcacagatttgggcatggcagttctcctctttcaaataaagcgaaaacccggcggaaaaaccgccgggaattacattatcgtttacacttggttgctgcttccacaaaaccacggaacagtggatgtggacggtttggtctggattttaattccggatgtgcctgtgtggcaataaaccatgggtgatccgggagttcgatcatttctacaattcttccgtccggagaagttccacaaagtttcatgccatgctcggtgagagtggcacgataatcattgtttacttcataacgatgacgatgacgctcggaaatctcagtggttccgtatacttcatatgctttggaatccttgtccagtacacaaggataagcgccgagtcttaaggtaccgccgatatcttctacaccgtcctgatccggcatcagtgcaatgaccggatgtgttgtgttcgggtcaagttcgatactgtgtgcatcgttgaatccgcatacgtgacgtgcaaattcaatgatggatacctgcatgccgaggcagagaccaaggtacggaatcttgttctcgcgggcatagcgtgcggcaaggatcattccctcgacaccgcgcagaccgaatccgccgggaacaaggataccgtttacatcacccagcacctcatctacattgtctacatttaattcttcggagtctacccatttaatgtcgatggttgcatgctctggaataccaccgtgctttaaagcttccacaacggaaatgtaagcatcgtgtaatgcggtatattttccgaccagtgcaatccggacttccttgtccggatgacgcagatcattgaccatggacttccagtcacttaaatccggttccggacagtcaagatttaaacactcacaggcaattttcgcaagattttctttttccatcgccagtggagcttcatataaatactcaacatccagattctgcagtacatgtgtgttcggaacattacaaaacagtgcgatcttgtcctttaatccctgatctaacggttgctcggaacggcagacgatgatatccggctggatacccataccctgcagttccttgacacttgcctgagtaggcttggtctttaattcctgtgaggcgcgcaggtacggaatcagggtaacgtgacagagaatcgcattctcatgtcccacttcgtgctggaactgacggattgcttcaaggaaaggctggctttcgatatctccgacggttccgccgacttctataattgcaatatgcatatcatcggatgtgaaattacggtaaaaacggctcttgatctcgttggtaatatgcgggattacctgtacggttcctccgccataatctccacgacgttctttctgcagaacggaccagtaaaccttaccggttgtcacattggaattctttgtcagactttcgtcgatgaagcgctcgtagtgaccgagatccagatcggtttccgctccatcatccgttacgaacacttcaccgtgctgaatcgggttcatggttcccggatcaatgttgatatatggatcgaacttctgcatggtgactttgtagccacgcgctttgagcagacgtcctaaagatgcagcagtgataccttttccaagaccagatacgacaccgccagtgacaaagacgtattttacaggcataattttcctcctaagtttttatctaaactaccatagtttaatattatacagcggacaacgaaaatattccacacttttttataaaaagtttagaaaggataggaaaagttctcgaacaaaatgttgattttgcgtttcttattacatataataagggtattgattacaagagatatacaagtggagggcttatggacaatcaggcaccgaataattataacaacggaaactataacggtggcaataattataataacggaaataatggaaacaacggaaacaatggtaataacggaaacaacggtggcaacaacggaggaaagaaagacaaccataacggacagatgatcctgggatttatcatggtcactctggtggcactctttttcctgtcattttttgccaaccggttttcacagatgagttcgaaggaaactacatactccgaattcctaaaacagctggaaaaaaataatatcaaaacagtggaattcagcaattatgagatggattacacactggtggacgataaaaaaccatatgagataacatattacaccggaattgtcaatgatccggatctgatcacgacactcaagagtgcaaagacatcagaggggaaagcgattgaaatttcggcatccgtgccggacaatacttcggcatggctggtaaacattttaagctttgttattcctctggtactgatctggattctttttggattcctgatgcgccggatgggcggaggagccatgggggttggaaaatcaaccgccaaagtatatgtggagaaaacaaccggtgtgacatttaaagatgtagccggacaggacgaggcaaaggaatccctgcaggaagtggtggattttttgcataatccgaagaaatacagcgatatcggggcaaagctcccgaagggggcacttcttgtcggacctcctggaaccggtaagacattgctggcaaaagcagttgccggagaggcaaaggttccgtttttctccctggcaggttctgattttgtggagatgttcgtcggcgtgggtgcttcccgtgtgcgtgatctgttcaaggaagcgcagaagatggcaccgtgtattatttttattgatgagatcgatgcaatcggtaaaagccgtgacagccggtatggcggtggcaatgatgagcgtgaacagaccttaaaccagctgcttgcggagatggatggatttgatgcatccaaaggtattttaattcttgcggcaacgaaccgtccggaagttctggataaggcactgcttcgtccgggacgctttgaccgtcggatcattgttgacaagccggatctgaaaggccgtctggaaactttaaaagtacattccaaggatgtacacatggatgaaacggtggatctggatgcactggcactggctactgccggtctggtgggatcggatcttgccaatatgattaacgaggctgccatcaatgcggtaaagaatggacgaaagtttgtcaatcagtcggatctgtttgaagcatttgaacttgtggctgtcggtggaaaagagaaaaaagaccgcgtgatgagtgataaagaacgcaagattgtctcctaccatgaggtagggcatgcgctggtatctgctttgcagaaaaatacggagccggtacagaaaatcacgatcgtaccgcgtacgatgggggcactgggatatacgctgcagacgccggaagaggaaaaatatttagagaccaaggacgaacttcttgcaaagattacgacatttatggcaggacgtgctgcggaggtgcttgtattccattccgcaaccagcggtgcagcaaacgatatcgagaatgcaaccaagatcgcgcgtgccatggttaccatgtacggtatgtcagatacgtttggcatgatgtgtcttgctacggtggaaaaccagtatctggatggaagagccggtctgatctgcggagaagacacggcaggacagattgataaggaagtactttccattattaataacagttacaatgaagcaatgcagatgctgacggaaaatcgtgaaattcttgatcatatcagtgaatacctgtatgaaaaagaaaccattaccggcaaggaattcatgaagattttccgcgagatgaaaggacttccgcaagaagaggataaagaagccctgatgccggatgacacagagaaggataaaaaggattccaaagccgcatttgtgagtgatgatatgtttgaggattaaatcatgttcgactttcaggaagaattgcgtaaactcccggatcaaccgggagtttatattatgcatgacaaaacagatgcaatcatatatataggaaaagcagtcagtctgcgcaaaagggtacggcagtattttcagcctagccatgatgagggaatcaagaaaaaacagatggtggagcatattgcacgctttgagtatattatcacggactccgaactggaggcactggtgcttgagtgcaatctgatcaaggaacatacaccgaaatacaataccatgctgcgggatgataagacgtatccgtatatccgggtaaccgtgcaggaggattttccccgggttcttttttcccggcaggtgaaaaaagacaagtcccgttattttggaccgtatacgagtgccggtgcggtgaaagatacgattgaactgatcaataaactttataaactacgcacctgcagccgaaagcttccgcgggacatcgggctggaccgtgcctgcctgaattatcatattcatcagtgcggtgcaccgtgtcagggatatgtggataaagaaacctatggaaaacaggtcagcaaagcactggaatttttaaatggaaattatgcgccggtgctgtgtgaattaaaagaaaaaatgcaggaagcctccgaggagatggagtttgagcgggcgatcgaataccgtgagctgttaaacagtgtcagccagattgcccagaaacagaaaattaccaatacggacggagaagacaaagatatcattgcactggcgagtgatgaccgggatgcggtggttcaggtgttttttatccgcagtggaaagattatcggaagggatcattttcatgtgcgcgtgggatcggaagaaagcacgggagatattctggtaaattttgtgaaacagtattattccggcacgccatttattccgcgggagattatgctgcaggaggcgatcgaagacattccagtactggaggaatggctgactgcaaaacgtgggcggaaagtgacgataagaattccacaaaaaggactgaaagaaaaactggtggaactggctgcaagaaatgcacagctggttctcagtcaggataaagaaaagattaagagagaagaagggcgtaccatcggcgcggtaaaagagattgaacagctgcttggcatgaaagacttaaaccgtatggaggcttacgatatttccaatatcaacggatttgaaaccgtcggttccatgattgtatatgaaaaggggcggccaaagaggagcgattaccggaaatttaaactccgtacggtatcaggaccggatgattacgcttccatgcatgaggttctgacccggcggtttacgcacggcatgcaggaacagaaagaactggaagaaaaaaatatgccgcaggaagtcggcagttttacacgtttcccggatatcatcatgatggatggcggacgcggccaggtaaatatctgtctgcaggtgctggaagaactgggactagatattccggtctgcggtatggtcaaggatgacaatcaccgtacaaggggactatatttccacaatgtggaaattccgattgatcggcatggagagggatttaaactgattacccggattcaggatgaagcacaccggtttgccattgagtatcaccggtctttgcgttctaagacacaggtgcattccattttagatgacattgagggaatcggaccggccagaagaaaggcactgatgcggagattccagtctatggaaaatatgaaaaacgcatctgtggaggaactggcagaaaccgacagcatgaatctggcggctgcacagaatgtatatgataccctgcattccggaccggcttagcaacttgtgatatggaaagattcatggtacaatctgtttataaaaaggcagtccggcacaggtactgcttaatatgagccacagggggaaatgaatatgtcaaatggaagtgttagtgttgcaaaagttgcgcaggttttaaatctgaaaaattttacgccggatatcaatctgaaaaaatgtaagattatttccagcgatgtgaatcgtccggcattacagctgaccggatattttgaacatttcgaggaatcaagaatacagatgattggaaatgtagaatatacgtttatccagcagatgagtgatgcggaaaagaaaacccgttatgatgcgtttctgaagtttgatatcccatgtgtgattttctgccgcagtctgcagccagatgaaattttcttagaagaggcaataaaaaatgaagtgccggttcttggtacggatcgtccgacttctgaatttatggcagagctgatctatacactgggtgaagaactggcaccctgtattaccgttcacggggttctggtcgatgtatatggcgagggtctcatgattacaggagacagtggaatcggaaaaagcgaggcggctctggaactgatccgccgcggacatcgtctggttacggatgatgtagtggaaatccgaaagatcaatgaacatacactgatcggaacttctccggaagtgacccggcattttattgaactgcggggcattggtatcatagatgtaaagactctgtatggtgtagagtgcgtcaaggaaaagcagcagattgatctggtgatcaaactggaagactggaagaaagatgcggattatgaccgcctgggactggaagaagaatatatcgaatatctgggcaacaaggtagtatgccattcccttccaatccgtccggggcggaatctggcggttatctgtgagactgcggctgtcaaccacagacagaagaagatgggctacaatgcggcacaggaactgtatcgcagagttcaggcaaatatgacaaaaagtgacgatgaagaatagacgagagtaaatgaggagatgtaagaaatcatggaaaagaaaaatgcgtgggagaaatacccggaaggaaccaaaagacaggatgtatttacatttgcggaagaataccgtaagtttatatcttcctgcaagactgagcgcgagtgtgcaggggaattctaccggaaggcaaaggaagccggatttgcagatctgagtgaaaagattgcgcagaatacaaaattaaaagcaggagaccgcattgttgccaataatatgggaaaaggtctcgctctgtttgtgatcggtgaaaaagacatcgaggaaggaatgaacattctcggcgcacatattgattccccacgtatggatttaaaacaggtaccgttatatgaagatacggagatggcactgttagatacgcattattatggaggtgtgaagaaataccagtgggtgacacttccacttgcactgcacggtgtaatctgtaaaaaagacggtacaacggttacggtcaatatcggagaaaaaccggaagatcctgtttttggcgtgagtgatctgctgattcatttagcgggagaacagatggagaaaaaggcatccaaggtgatcgaaggagaaaaccttgatctgcttgtcggaagtattccggcagcaagtgatgatgaaaaagagaaaaaagagatgaaagaccgcgtaaaggcaaatattttaaatattctgtccaaagagtacggtgtggacgaggaagattttctgtctgcggagattgaagttgttccggcaggggctgccagagattacggctttgaccgcagcatgattatgggatacggacatgacgacagagtgtgtgcttatccgtcttttgcggcaatgcttgagattgaaaagccacagcataccagcgtatgtcttctggtagacaaagaggagatcggaagtgtcggtgcatccggcatgcagtcccatttctttgaggacagtgtggcagagatcatcaatctgcttggggaatacagcgaattgaaagtgcgcagagcgctgcataattccagagtgctttcttccgatgtatctgcggcatttgatccgaattatccgtctgtgatggaaaaacgtaactgtgcttactttgggaagggacttgtcctgaacaaatatacaggagccagaggaaaatcaggttccaatgatgcaaatgcagagtatattgcaagactgcgcagaatttttgatgataatgatgtatcgttccagacatcagaacttggaaaagtagatcagggaggcggcggaaccatcgcatatattcttgcaaattatggcatgaatgttattgacagcggagttgccgtactgaatatgcatgcaccatgggaaatcatcagcaaagtggatctgtatgaggcattgcacggctatgtggctttcctgaaggaggcataatggatcagtggcttgaagaaatcagggcggcattgcctgagctggtcgtatatcagcaggaaccgatgaaaaaacacacgacatttcgcgtgggaggtcctgcggatctttacgtgtgtccaaagaaacaggaacttccggtaattcttggcctggctaaaaagaaagggcatgcagtgacagtgatcggaaacggaagtaatcttctggttggagacaaaggaatccgtggacttgttattgaagtcggggcacagatgaatgcggtggaagtgcagggaaatatcctgcgtgcgcaggcaggtgccctgctttcccaggtggctgcaaaagcggcagctgccggtctgggcggcatggaatttgctgccggaattccgggaagcataggcggtgcagtgaccatgaatgcgggtgcctatggcggagaaatgaaagatgtcatccggcaggtgacagtgcttaccccggagtgtgagcaaaaggtactctcacgggaggaactggatctgtcctacaggcacagctgtattcccaagaatcattttctggtactggaggcagagttgtccctgacgccggcaccggagcaggagatccgtgcaaagatggcagaactcagggaaaaacgtgtggagaagcagccgctggagtatccaagtgcaggcagtacgtttaagcgtccggaaggctattttgcaggaaaactgattatggatgccgggctgagaggctatgccgttggggatgcccaggtttccgaaaaacactgcggatttgtgataaacagaggaaatgccaccgcagcagagattttgcagctgatgaaagatgtacaggaacgtgtgaaaaaacagtctggtgtgacacttgaaccggaagtgaaaatgataggagagttctagatgagatttgtaattgtgacgggcatgtcaggagccggaaaaagtacagcaatgaaaatgatggaagatatgggattcttttgtatcgataatcttccgattccgcttctggataaacttgtggattttgcaacaaattttgatacgcagatgaaaaatgtggcgatcggaattgatgcgcggagcggtgaaaatctggataaagtgcaggatatgctggaaattttaaaaagtaaggatgtccagtatgaagtgctgtttctggatgcagaggatgcggttcttgtaaaacgctataaagagacccgaagaagccatccgctggcacagggagagcgtgtggataagggaatcatgcgggaacgtcagaaaatggaatttctgaaaaaagaagcggattatattatcgacaccagccgtctgcttacgagagaattaaaaacagaactggaaaagatctttgtacaggatgaagaatttaacagcatgtatgttacgatcctttcttttggattcaagtatggaattccggcagattctgatatcgtcatggatgtgcggtttctgccaaatccgtattatgtggaagaacttcgtccaaagacaggaaatgatgtggaaatccagcagtatgtcatgaaatatgatgaggcaaagatctttttaaacaagctggaagatatggtgacatttctgattccacactatatttccgagggcaagaatcagctggtaatttccatcggatgcaccggaggaaaacatcgttccgtcacacttgccaatgaattgtacaagcgtctgagtcagaaaaaaaaccgggaatacggattgaaaattgaacatcgcgatatcgggaaagatgcgctgagaggaaaataggatgtcgttttcgagtgaagtaaaagaggaactggcaaaacagttcggacggagcagacattgccagatcgcagaactggcaggaatactggaactggaaggcatgctggatgaagagggaaagcttgtagtttccaacgaaaattctttgctgcagacaaaatatggtctgctgttgcaaaaaatatttggagagaaacaggaggttttacagatcatgcagacactgcactgggatcaggaaccgtaccggtcccggaaaataaatcaccggagagcggatgggatgctggtgcagcagacatgctgtaagagagcatttatccgtggagcatttatggcagcgggatcgatcagtgatccgaataaatcctatcattttgaaattgtctgccatacgcttgaacaggcacagcagctgaaagaactgatggaattttttgagacggagcctaagattgtagaacgcaaagagcgtatggtggtttacctgaaagaaggttcacagattgtggatctgctgaatgtcatggaagcttatgtatctttgatgaatctggaaaatgtaagaattttaaaggagatgcgcaattctgtgaaccgcaaggtaaactgtgagactgcaaatatcaacaaaacggtgaatgcagcagtgaaacaaatggaagatatcaagaggatccgggataccatagggtttgacaacattccagaaccgctggcggagattgcacaggcacgtctggattatcccgaggcaactttaaaggaactgggaacttatcttgatccaccggtcggaaaatctggtgtgaatcacagattacggaaacttgccgcaattgcagaaaatcttatataaaggggaactacgtatgagccagaagctattatttatttttaatccgcatgcaggaaaaggacagattaaaaatcatcttgtagatattgtggacatgatggtgaaggcaggatttgacgtgacaatttataccacacaggcacaggcagatgcgacgcgcaaggtggtggaagagggtgcgggatatgaccgtattgtctgcagcgggggtgacggaacacttgatgaagtgatgaccgggctgatgcaggcgaagctgcatattccgattggatatattcctgccggaagtacaaacgactttgccaattctcttggaattccgaaggagatgctaaaggcagcggaacgtgcggttggacaaaacagatttccatgcgatatcggagatttcaattcggatacctttgtctatgtagcagcgtttggtctgtttacagaggtttcctataagacatcccagcagctgaaaaatattttcgggcatgtggcgtatattatggagggtgtcaaacagcttcgggacattccatcgttccgtatgcaggtggaatatgacggaaaagtgtttcaggatgaatttatatacggaatggttaccaattccgtttctgtcgggggctttaagggaatgaccggaaatgatgtaaaacttgatgacggtctgtttgaagtgactttgatccgcaatccgaagaatccgattgagctgaatgaaatccttgcctgcctgacaaatatgattgatgattcggatctgatttattcgtttaaaaccgatgccgtacacattatggcgaaggaagaagtatcgtggacactcgatggtgaattcggcggagcacaccgggaagtagtcatccgaaatttgaagcagagagttgaaatattttgttaaaaaattaactttattttttgggaaaagtgtactataatctaggtaacttatgattaggaggaaatacaaatgttagtatctgcaacagaaatgctgaaaaaagcaaaagcaggccactatgcagttggtcagttcaatatcaataacctggagtggacaaagtccattcttcttaccgcacaggaattaaagagccctgtaatccttggtgtatctgagggtgctggtaagtatatgactggtttcaagaccgtagcagctatggttaaggctatggatgaggagcttggaatcacagttcctgtagcacttcacttagatcatggaacatacgaaggatgctacaagtgtatcaaggctggtttcacatctatcatgtttgacggatctcattatccattcgaggagaaccttgcaaagtctacagagttagttaatgtagcacataacttaggtctttctatcgagtgtgaagttggttccatcggtggtgaagaagatggtgttgttggtatgggcgagtgcgcagatccagacgagtgcaagacaattgcagatctgggcgttgatatgctggctgctggtatcggtaatatccatggtaaatatcctgcaaactggcagggattaagcttcgagactctcgatgcaatccaggcaaagactggtgttatgccattagttcttcacggtggtacaggtatccctgcagatatgatcaagaaagcaatctctcttggtgtatctaagatcaatgtaaatacagagtgccagttatctttcgcagatgctacacgtaaatacattgaggctggtaaggacttagagggcaagggatttgatcctcgtaagcttcttgctcctggtgcagatgctatcaaagctactgttaaggagaaaatggaactgttcggttctgttggaaaagctgaataatagaacatgtacaaaaggaagtgccgcatgacacttcctttttttcatttcataggaaaaaggctggtatgcctcatacaaagaaattagaaaatgtacctgttttgtagtagaactggaagaagtagacaaaaaagaagtagattttgatagaaaaacgtcaaaatgtataaattataaaaaaattctaaaaagaggttgcattttgtgttggaaagaggtatcttagtttcagattaaacatgagttaagaacgagggcgttccaatatagctattggaatgcccttttttagtaaaatgactgatgtttggtgaataagcgtacaatcaggggatttgattgtgaaaagaaaggatgttgtaaaaaatgagtgattattttaacgttgcagacatttttggcgagaacgtattcaatgacacggtcatgcaggaacgtcttccaaaaaaagtttacaagaaacttcacgaagttatggatgaaggaaaagaacttgatcttgagaccgcagacgtcatcgcacatgagatgaaagagtgggccattgaaaaaggtgcaacccattatacccattggttccagccattgactggtgtaacggcagagaagcatgattcttttatcacagcaccgatgccaaatggcaaggttttgatgagcttttccggcaaggaattgatcaaaggtgagccggatgcatcttctttcccgtctggtggacttcgtgccacttttgaggcaagaggatatacagcctgggattgtacatcacctgctttcgttcgtcaggatgcagcaggagcaacactttgtattccaactgctttctgttcctacaccggagaggcattggatcagaaaactccgcttcttcgttctatggaagcgatcgatacacagtccatccgtctgttaagactgtttggaaacacgacttcaaagaaggtaactccttctgttggaccagagcaggaatactttattgtagatcgtcagaagtatttacagcgtaaggatctgatctttaccggacgtactcttttcggggcaatgcctccaaagggtcaggaaatggacgatcactatttcggagcaatccgtgagagaatcgcagcatacatgaaagatgtcaataaagaactctggaaacttggagtatctgcaaagacacagcacaatgaagtagctccggcacaacatgagctggcaccaatttatgcagagtgtaacgtagcagttgatcataaccagatcatcatggagaccttaaagaaggttgccggacgtcacggtttacagtgtctgcttcatgagaaaccattcgcaggtgtcaacggttctggaaagcatgacaactggtccattacaacagacgatggaatcaatctgcttgagcctggtaagacaccacatgagaatgtacagttcttactggtacttacctgtattttaaaggcagttgatgagcatgcagcacttcttcgtgcagcggcagctgatgtgggaaacgatcacagactgggagcaaacgaggcaccgccagcgatcctgtccatttaccttggagatcagcttggagacgtattaaatcagctgatcagcacaggtacagcaacacacagtctggaaggagagaaacttgagaccggtgttaagacgattccggatttcatgaaggatgcaacagaccgtaaccgtacatcaccgtttgcctttaccggaaacaaatttgagttccgtatggtcggttcccaggattctgttgcacaggcaaatatcgtattaaataccatcgttgcagaggcattttctgatgcatgtgacgttcttgaaaaagcagacgatttcgagcttgcagcacatgatctgatcaagaaatatgctattgagcatcagagaatcgtattcaacggaaacggatattctgatgagtgggttgcagaagcagaaaagagaggacttccaaatatcaagtccatggtagatgcaattccagcatataccgctccggaatctgtagctgcatttgaaaaattcggtgtatttaccaagcctgaacttgagtcccgtgtagagatcgagtacgagacttatgcaaagaccatcaatatcgaagcaaaggctatgattgatatcgcaggaaagcagatcattccggctgttatcaagtacacaacagaacttggacagtcaattgcaacggtaaagagtgcatgtgcatctgctgatgtcagcgcacagacagatattttgacagagacatcctccctgcttgctgagacacagaaagcactcaagagtctggaaactgttactgcaaagggaacagaaatgagtgaaggtaaggtgcaggctgtatattacagggatgaagtgaaatctgctatggatgcactccgtgcaccggtagataagcttgagatgatcgttgacaaggatttatggccaatgccgtcttatggagatctgatctttgaagtttaacccaaagatttaagggacattttttacaaacatcttataaaataaaaaagagacattttttcagaaccacgaagctgtggaattttggaaaagtgtctctttttctatagagggaggagattgttatggataaacaacaaattgtaagttttatcaatgaaaatatgtttggcatctggtttctgatcggtgccgcactggtattctggatgcaggcaggctttgccatggtagaaaccggttttaccagagcaaagaatgcaggcaacattttgatgaagaacctgatggacttctgtattggtaccgtaatgttcatcctgatcggtttttcattattgctgggagaagatgttcttggttttatcggaaaaccgggatttgatatctttaccagttatgcaaattttgatttttcgaattttgtatttaacttagtattctgtgcaactacagcaacgattgtatcaggtgctatggcagagcgtacaaaattcttatcctactgtatttattcagcagtaatttcggcattgatttatccgattgaagcacactggatctggggcggtggctggttatcacagcttggattccacgattttgcaggttcctgtgccattcatatggttggtggtatttcagcactcatcggtgcagcaatgcttggaccacgtattggaaagttctcaaaagataagtctgggaagattacaaaagtcaacgcattcccgggacacaatcttccacttggatgccttggatgttttattctctggtttggctggtatggatttaatggcgctgcatgtacttccggttcacagcttgccagcgtatttcttacaacgaccgtagctccggcagttgcaacagttgtatgtatgatctttacatggcttaaatatggtaaacctgatgtatcaatgtgcctgaatgcgtcacttgcaggacttgtagcaattaccgctccttgtgacgtgaccgattgtttcggtgcaatctgtattggttttgtttccggtttactggtttgctttggtgtatggcttttggattataagcttcatgtggacgatccggttggtgcggtagctgtacatatgatgaatggtatctggggtaccatcgccgttggtttatttgctaccaaatccgcaccgggaaatgattcggtggttggtttattctatggtggtggattcagacagcttggtattcagctgttaggttttgttacggtagctgcatggacagctgtaaccattaccattgcatttatcgtcattaagaaaacgattggacttcgtgttacagaggaagaagaaattgttggtctggattctatggaacatggacttgcatcagcttactcaggattttctatcatggatgtttccaataccatgacaatggatatcaatgaaaatacagatctgggtacaccggaatatgcacaggcttctacggcaaagagagatgcagcagtcaaggtggtttccgccgtgccaaaggatgcaaccggcatgtacaaagtggttattattgcaaagctttcccgatatgatcatttgaagaaagcaatgaacgatctgggtgttacgggaatgacctgtacacaggttatgggttgtggtatccagaaaggctccggcgagcgttaccgtggtgctgaagtcgatgcaaccttacttccgaagattaaggtagaggttgttgtaagcaagatcccagtagacagcgtagtggctgcagcaaagaaggcactttataccggacatatcggagatggaaaaatcttcgtatacgatgtggcaaaggttgtcaagattcgtaccggtgaggaagatatggaagccttacaggatgttgaataattttgcactaatctaatggctaggttagtgaatctaatccccttagttttagtatacatcaacagcggacccctggcgaaagccgggggtttttgctgtcgataaataaaactttctattgcacatattatttggtataatatatggataaaagaatttttattatttctgcggggagaaaactatgaactatggaagaacttctttgcgccggagagcaaaacagctggacgcaagaggaacgagaatacgtcataaaatcggagtcatactggggaaacttctactgattggaatcattgtgggaggctgtgcgacagtgagtttcggagtgggtgcattgaaaggaattcttgcatccgcaccggatatatccgaagtggatgtcattccaacgggatattccacgaaagtgcttgcggcagacggaagtgagacagcaaaattagtggcagccggatccaaccggcagtacgtgacaattgaccagattccggagaatctgcagcatgcggtagtggcgatcgaggatgagcgtttttatgatcataacggtattgacctgaaaggaattgtcagggcactggtggcggatgtccggaccagagatttcagtcagggagcaagtacgcttacgcagcagctgattaaaaataatgtgctgagtgagcagtgggcaaacgaaaatgacagtaatatttccaaaattgaaaagatggaacgtcaggtacagcggaaaatacaggaacagtatctggcaatagagctggaaaaaaaggtaaatgacaagaactggattctggaaaattatctgaattccatcaaccttggaagcaatacccttggggttcaggcagcagcacagcgttattttgggaaagatgtgtcaaagctgacactttcggaatgtgcggttattgccggaattacaaagaatccggcaggttacaatcccattcttcatccaaaggaaaatgcaaagcgcagaaagaatgtgctggatgccatgaaaaaacagggatatatttcgcagaaacagtatgataaagcgatggcagatgatgtgtatggcaggatttccgaacacaatgatgtgagggaagaaaccatgaacacatattttgtggacgcggtcattgatgatgtttttgatgatctagtaaatatcaaaggctattcggagtcagaagcatacaaggcaatttatcaggggggattgacgatcaagtccacacagaatcttcaaatccagaaaatctgcgatgaggaggtggcagacaaagccaattatgatgcgggtaccaaatattcattctatctttcttttcaggtgaaggagaaggatggtacaataaaaacatataccaatcagacaatgctttcctattataaaaagaaaaacaaaagtcagaattattcgatcaattttacatcggaggaggactgccgggctgcaattgcacagtacgaaaaagatgtcctcggaaaaggggacaagctggtagaaaattcagagtatattttcattaccatgcagccgcaggtggcgatgacgatcatggatcagtcgaccggtgaggtacaggcgattgtcggcggacgcggaaataaggccggaaaccgtacctggaaccgtgcaacaaagacctgccggcagccgggatctacttttaaaatcattgcatgttatgcgccggcactcgatgccggaggaaaaacgctggcatccgtgcaggatgatgcaccgcttacggtcggaaataaaacatacaataactacacgcacaaattcggaggattcacgagcatccggaaggcaatcacaaaatccatcaatattgtgacagtaaaaacacttcaggatattggtgtggatctgggatatgaatatgcagaaaacttcggattttccacgcttaccgatacggacagaaaccttggaatttctctcggaggtctgacacagggtgtgacaaacctggaacttactgcagcttatgccgcaattgcaaatcagggagaatataacgaaccgagtttttatacccaggtactggatcatgacggcaacgttcttcttgataaaacacagacaaaggaacagcatcaggtaataaaagaggataccgcatggcttctgacggatgccatgaaagatgttatgacgagtggaacgggtatgcgggcttattttggaaccggaatggcacaggcaggaaaatccggtacgacaacgctgaacagggatgcactgtttgccggatttacgccttattacacctgcgtggtatggggcggatatgatgataattccattcagtcagctacgggatatccaaagaatttgtggaaagctgtgatgaagcggattcatgcggatcttaaggcaaaagattttgaaaaaccttccggaattacacaggctgttgtctgtgcaaaatccggacttctgccggaagcggatgtctgtgataaagatccgcgtggaacgcaaagttatacggaatattttgcgaaaggaaccgttccgacagagagttgtgatcatcatatttctctgcagatctgtgaggcatccggaaaagttgccggagaatactgtcctgcagatcaggttgtgacaaaaacttatattgtgggtgccgaaaagggctcggccgattaccagtactgtgcgacagagaaattcttaaatgaaacatgcaatatacatgatgccgaaacgcaggatgaggaaaagccggaagaagaaccggcagatccgccggatgatgcaaaaccggaagaaacacatgaaccggaacagacaccggagaaaaatgaggaatgacacaaaggagaataggatatatgcgagtggtctataccggaggagagggtgaaatcacagagaagaaatcccgttttatagcaacagtaaagcctgttcagtcagaagaagaagcggttgctttcattaatgagacaaagaaaaaatactgggatgcccgtcataactgttctgcttttgtcatcggggagaggcaggagctgacgcgctgttcggatgatggagagccggcacagactgccggccgcccgatgttggatgtacttctccgggagaagattacggacgttgcggttgttgtcacgcgctattttggaggtgtgctgcttggaacaggagggcttgtgcgtgcctatcaggcagcgacacaggcgggacttgcagccagccggctcattgaaaaatgtaagggacagcagctgctgattcataccgattacaatgggcttggaaaactgcagtatttattcggacaaaatcataccgtgattctggatacggcatatgaggcggatgtcacaatgacaattctcgtacccacggaacataaagagacacttccgaaggaaattacagaactgaccaacggatcagcaggtctggaatggggaaaaacctgcgtatatgcactaattgataaagaagttgtgtttttttgaaaaaatttgaaaatatgggttgacacttataggggttccatgtataataccatttgttgagagacatgaaacacattggcccatcgccaaatggtaaggcaacggactctgactccgtcatttccaggttcgaatcctggtgggccagctgaaaagcactacattatgtagtgctttttgttttataaaagataagaataagaaaggacacggtaatgtacgaatttgacagcagagtaagatacagtgagacagatgcacaaggccggatgacatggctggcgcttatggattactttcaggattgcagcgtatttcattcagaggccgtgaaccttggtgtggaagtatggaccgatgcacaaaaggcgtggatcttatcttcctggcagatctgtctgaaccggatgccgcggctgggcgaacagattacgacacagacatgggcatatggaatgaaaggcttttacggttaccggaatttctccatgaacggcagggatggggaacggatggcatatgcaaattccgtatgggtactgatggatacaaagaaggggattccggtcagagtgacaaaagaaatctcggatgcatacggattggatccacagcttcccatgcagtgcagcgagcggaaaattatgctgccggaaaaatatgaagaaaaagattcattggtcgttccttcttatttcatagataccaatcaccatatgaacaataccagatatgtacaggtggcgatggaatatgttccgaaggagtttcggacaatggaagtccgggtagaatataaaaaagctgcgatgtgtaaagatgtaattgtgccgcatgtgacgatagaagatccccgtgtgacggttgcactgtgtgcgccggatgggcagccatatgcagttgttgtttttttgaaagcgtaggaaaaagatgaaattagcagaatatcaggatttgtattatgtaaaaaaagtagacttcggagtatatctggcagaggatatgggcggtgagacacatgtgctgcttccgtcaaaacaggtgccggaagatgcaaaaccgggggaaaagataagggtctttttatataaagattccaaagaccggctgattgcaacaaccaacacaccgaagctgacactgggagaatatgcaccgcttgtggtgaaagaagttggaaagatcggtgcttttctggattggggactggaaaaagatctgtttctgccatataaagagatgacttcacgggtagaagcaggagacgagattcttgtaaccctttatattgataaaagcaagcggctttgtgccagcatgaagggactgtacgatctgctttccaaggattcaccgtatcagaaagatcagatggtaaccggaagggtgtatgagttttccgataactttggtgcttttgtggcagtggatgatcgcttttccgcaagaataccaaattcagaggatcacagtttcctgaaaatcggagatgtgattgaggcgaaagttactgcagtaaaaccggatggaaagttagatcttacactgcgggaaaaagcttatattcagatggacacggatgcagagaaaatacttgaattgctggattcctatgcaggagtgcttccgttttcggaaaaagcgagtccagaggtgattaagagggaaaccggattgagtaaagctgcgtttaaacgtgccatcggacacttgtataaagaaagaaaaattacactggatggtggaaaaatccgcaagagtttcgtataatgcaggtaaaggcaaaaggaggaatataaaatgaaaaacgtaatcagtacagataaagcaccagccgcaatcggaccgtactcacaggcgattgaagtgaacggaacggtatacacatccggcattatcccggttgttcctgctaccggagaaattccggaaggatctgtggcacaggcgcagcaggcatttgaaaatctgtcaaatctgcttgaggcagccggaaccggaatggataaggtagtaaaaaccactgtttttatcaaggaaatgaatgattttgcagcaattaatgaagtttatgcaaaatttttcccgtcaccatttccatccagaagctgtgtggaagtggcacgtcttccgaaagatgttatgcttgaaattgaagccattgctgtaaaataaagaaaagatcaaaaacgaaaagagatctgtgcattgcacagatctcttttgttgtctttgcggttctttttccggttagacggaaacgtcaatgttacttcctaaattaggataaacagagttctccatcatttttgccagcccaacaccaagcgattcattcgatgagatggcattgtcaagcattttaatgctgacggcatttgccagagagccgggatcggaactgtttacggaaagaagcgcagaactgatacttgaaatatccatatgacagatctccttttaaaatactcggtatacgtgtttttctttattacatctttattatggcataaatatacgaaaaattcaattgaattctgtggatggaaaaggggttgacacatatccgtgcctttgctataatgacaatgtaataattgtaacaaattcgtaataaagaagtacaaaagtcattggaggcgaaaatgaaacgtaaaacattattaaaattgaccgcatgtgggttagttggggcactgaccattggcaattttactgtagcagcttacgcagcaccaactgctggagtcgcaagccttgcttccgatattgcaacaacatcatctgcaccgactgcaggattttcactggcactcagtgaagtcgcagaaaaagtggaagatgaggcaaccgttgcaagtgcacagccggaagtaaaagaagttgaagcaccagttgtaaagtctgagtatgaagacaaagcggtagctgttgtggaggattacgtgaacgttcgtaagaaaccaactacagacagcaaggctgtaggaaaattatataagaataacgtaggaaccgtcatcggggagaaggatggctggtacaaaatcaaatctggatcggtaacaggttatgtaaaatctgaattcgtatccattggtgatgagaaaaaattaaagaaagcaggaagaagagttgctcttgtagagacagagacattaaaagtccgcaagggagcttcccagaagtcagaagtaattactctggtgccggaaggagacgatttgacggtactggatgagtcaaaggatggatgggcaagggtttctgtagatgaaggcaaaggctatgtatctacagattatgtcacattatctacagaatacacatatgcagagtctgctgcagaagaaaaggcaagattacagaaggaaaaagaggagcgtgaggctgcggacagagcagcacagaaagcggagagcgcatctcagacaacctcttcaggctcttcacagtcacaaagctcagattcttccgtacaggattcatcaagcgcatcttcaacaggatcagcggttgcaagttatgcaggacagtttgtaggaaatccatatgtatatggtgggacaagccttacaaacggaacggattgttccggatttgtaatgtctgtatacgcacatttcggtgtcagccttccacacagctcaagtgctttaagaagtgtaggatatggcgtcagcacatcaaacatgcagccgggtgatatcgtatgttacagcggacatgttgcaatctatgttggaaacaatacgattgtacatgcaagcaatgcaagagacggtattaaatatacttctcctgcaaattacagaaccattcttgcagttcgaagaattttctaacaattaagataacataagtataacaggagcacttgcgaaagcaagtgctctttttcttaatattatttaaggatttcttaaatttgcaaaaaacagattttgcaagggaaataacattgacaagcacaatcatataaagttactatgtaaaatgagtagtttattgaacggtaacagagggaggaacagaaattggcatttaccaaggcgaagatagttatggcaggactggcggtgacggcggtttgtattgtggcgccacagcagttaaaggctcaggtgcccgaagcgcagatggatggcgtcatgggacagagcatagaggatgagaccgtgtatgagtcaaagccggatctggatacactgatagaaaagaatgcacctgttttcgggaatcggacatccttgaaaaaagcatcgtcgtattcgagtgcttttttgaatgcgtcttttacgacggccggtgattataccagcgcaacctattatcacaaagcggactatgcggatgatgaactggtcaacggaattgatgtatcatactggcaggcggatgcagcactgaagaaaaagtattccaaagacaaaacaaagtggacacagaccggattggactgggaaagtattcacggagccggaattgattttgctttcgtgcgtgtggcgtccagagatacgaaagatggaagtatttacagagataattgtgcagacagtcatattcagggagcagtttccaatgatatcaatgtcggactgtatttcttttcccaggctctgaatgagacagaggcacgggaggaagcccagtatgtgctcgatatgattgaccagtacggctggaatgtgtcgatgccgatcatcatggaccgggaggcaggggcaaacaagcgtctgactgcgggaaaactttccaaaacaaaagagacagcggtatgtcaggcatttgcggataccattacggcagccggataccgggcaggcgtatatgcatcttatgcgtggatcaaaaactatatcaatacggatgctttgtatgactgttccctgtgggtggcacggtacaacaataccacgacaagcaatacaaaattaggaacgccatatgcggatgccgcatatgattacgaattctggcagtattcgtcaaaaggggaagtggatggttatacaggggtccttgatgtgaatttctggtataaggataccagtgaacagataaccggactgaaagcatcgaatgggacttcgggaattgtgaatctcagctgggacagtgtttcggcgaatgatgtggacggttatcaggtatggcgcagcgactcggatcagggaaaatatacgcttctaaagtcgacaaccgactgtagttatacggacacaacggcagaaggagggaaagtctatcagtataaagtgagatgttactggacgataggggggaatgcttattacggaacattttcctctccggtttcagtgattacctcgctggaaaaggttgctggaatcgcaacacagacgcggacagagacttcgcttgggttgtcctgggaagaaacacagggggctgtggggtatcagatttatcagtacagtgcagcaagtagtcagtatgaaatggcagctgacgtgggagatggaagcacttcttatacgataagcggcctgacgggggcgaacgaatataagtttaaaatccgtgcttatgaaaaaaataatgatcatgtacttccgggccggttttcggatgtttacagtgatgtgacacttccgggtcaggtggatctgacgaatgtttctgcaactgggacttcttccgtgaaactgacatggcagactgtggatgggatcaccggatatatgatttaccggctggatacagcagacggtaaatacaaacaggttgcgacagtaaaaagtgcccagacgcttttctacaccgatcagaagcttgcagcaggaaagacttataaatataaagtatgtgcatacaaaacgtataaggataaaaattataaaggtgcgtattccacagaaaagcaggtgaaaatcaaaaaaacagaaaagcctgcaaaagtaaaaacgataaaactcagtacaaaagatgcagcagttaccgtgcagtggagtaaggtttccggggcaaccggctatcaggtataccggctgaacacaaagaccggaaagtatacaaagattgcagcggtcaaaggaacttcgtatcggaatacaaaactgaaaaaaggggcaacctatcgctataaggtccgcgcatacaaaacggtaaacaaaaagaactattacggagcattttcaaacaccacagcaattaaagtaaagtaggaaacaaatgaaaaagaaagtacaaatgaaaaaaatggcaggtgtgtttttggcattggcaatactgggaattggtcttttcccgccgggaaacgtgtatgcggctgcaaatcaggcgccggacgcagatccggtggttgtagttcttgatccgggacatggagggcatgatcagggtgccagatataagtgggacggaaaaacatacaaggagaaacagttaaatcttgccattgcaaaggcctgtaaaaccgaactggaaaagtatgcaggagtgaaggtatatatgacgcgttcttccgaccgttttgtgacacttggaaaccgtgtgaattttgcaaaaagcaggaaagcagatctgtttgttgcgatacacaacaatgcttccctgaaaaaaaacgaccatggagcctgtgtttattatccgaacagcgggtataaagaagaggtggggagtgaaggaaaaatggcggcagcaagtattcagaaacagctggtggcacttggactgaaaaataatggaattctttaccggaattcggctgtggggtcccgctatccggataaatcaaaggcagattactacgccgtgatcaagcggagcaagtatgccggctttccgggactgattgtggagcatgcttatgtcagcaacaacgatgacagtacaacatttctgaatggtaacgaccggctgaaacgtcttggcgtggcggatgccacgggcattgcagaatattttgacctgattttagatcaggcaccggttctgcagacaccggttgtaaatgcggatgagtcggtgacactggcatggaatacggtgcagggggctgattattatcgtatttaccgcagaatcgcggggacgaaaacatatgtctgtctcgaagaaacagaggaaaccggatacacggataccggggtaatgccgggaacttcttatgagtatacggtatgcggatgccatgtgggatatcagaaagattcctgcacaaaaattgcgcaggcaatgcagataaccgttacaggggaaaacgcgaatatacaaagtgcacaaaaaaatcaaaactaagatgggggatggaaaccacagatgtggataaaatgaaaaaattatccactatccggaatcaaaaaatgccgaaaaatcgagttatacacgaagttatgaacattatccacataatttgggataagttgtttgtggatgacagggataaaaacaaacgattgttttgttaacaacgcataaaaagtatgtatttgaatgattgcaaacgggaggtatttttgatatactagggaagttatgattaaaacgattgattttgctggaattgaattggacaattataccgttcgggaaatgatcatgaatgtagaaaaggatatgtctgatcatggattccatacaatagaagaagtaaacatggatacgcttatgctggcagaaacggatgaacttgtccgcaaagccatagggtttgcggaacataccgtgattgcggaaaacggaattttagaagctgttggtgcaggatcttaccagcaccgtcatgagatcgaacatcatgatttcttttttgaactgatgaagcgggtggaacgcaatcatcagacggtgtttgtgatcggagataccacggaacatgtggaaaagacctgtgcttttttatcagagcattttggaaaatgcgagatcctgggagcagaagcgtttgaaaactgtcagggggggacggatgccatggtcaatgagatcaatgcactgactcctgatatgatcttaagtgttctgccaagtccggatcaggaacatttcctgatggagaattgtgagaaactgtctgccggactgtggtatggaatcggttcctgggattttacaaagcgcagacagggactgcttggaaatatacggaatctgatccgcacgcataaactggagcggcagctgattcattatcatggaaagcaggaaagcatatcatgagggcaaatgtctggaaagaactggaaaattatttcctgattttgctgggcactgcacttatggccattgccattcagtggatttttgacagggtggggctgatcaccggagggtttactggtcttaccattattatacgaaatcttacggaagcgcttctgccgggaggaattcctctgtggctgacgaatattgtgctgaatattccgatatttctgtattcctatattcggtttggaaaaaattatatcgggaaaacgggctttgcaaccattttgctttcggtgtggctttatctgataccggtgatagatatgtcaggggatgattatatgcttgcagccctgtttggcggggcatttaccggcattggcatggcactggttcttaaggcgggagcaacgaccggcggaaccgatatggttgcggcgatcatccagtcacacatgcggcactatacggtggttcaggtgatgcaggtactggatgcagccattgtgattctcggattatatgtatttggtttaagacctacactttatgcagttgtttctatttttgtgtcgacaaaaatatccgatgcctttctggagggctttaagacttccaaagcagcttttattatcacaaaccggtatgaggaagtggcagaacggctgatggatgagcttgaccgcggggttacgggactgcacgcacaggggatgtacacagaggagaaaaagtgcgttctgtattgcgttgtatcaaggaaagagatcgtgcgtgtgaaagagattgtaaatgatgtggattcctctgcgtttgtaatcgtatcggatgtccgggaggttttgggcgagggatttctggaatattcggatgatttttaaaacgatattgttaaaattttatagtgaaatattactaaccggaaaaagtggtaagagaggaaatgcataaaaaatatacatttcctctttctttttttggaagaatgtattaaaataaaagtaattgttcagaaaacaggtgggggaacgatagatttctggatgaaatatggggataaggagagctgactatgatatccaatcaaatacttcaaaatacaattgacggactgaaagcaattacacgtacagatttatgtgtgattgatgtagagggaaaaattctggtcgcgacatttccggatgcagaacagtttgtagctccggcacagaccttcgtggaatcgccggcggacagtcaggtggtaaatggctgccagttctttaaagtgttcgatgatcatcaactggagtatattctgctggcatatggagacagcgaggatgtgtatatgattggaaagattgctgctttccagattcagaatcttttggttgcctataaggaacgttttgataaagataattttatcaagaacctgattttggacaatctgcttttggtagatatatacaatcgtgccaagaaacttcatattgaaacagaagtacgccgtgtggtattcttggtggagacaaaccgtgagaaagatggaaatgagctggagaagatccggggactttttggtggaaaatcaaaggatttcgtcacagcggtagatgaaaaaaacattattgtagtcaaagaacttgcagaaaatgaaacctatgaggatttgaataagacagcagatgtaatcatcaggctgtttaaatctgataccaattgcaatattcatatcgcatatggtaccattgtgaacgaattgaaagaggtttcgagatcttataaagaggcgcgcatggcactggatgtcggaaagatcttctttgagggacaggatgtgattgcgtattctcagctgggaattggccgactgatttatcagcttccaattccattgtgcaaaatgtttatcaaagaaatctttggtggaaaatcaccagatgattttgatgaggaaattctgacgacgatcaacaaattctttgaaaacagtctgaatgtgtcagagacgtcaagacaactgtacattcatcgaaatacgctggtatatcgtctggacaagctgcaaaaaagcacaggtctggatctgcgggtttttgaagatgcaatcacgtttaagatcgcactcatggtagtcaagtatatgaagtatatggaaacactggactattagagattgaaggagagattatgattacactggaacatgtcagcaagacatatgcggcaggagttcctgccttaaatgacgtgagtctggaaatagaagatggtgaatttgtatttgttgtaggagacagcggttcgggaaagtcaaccctgattaaactgttgttaaaagaacttgagccaacggaaggaagcattaccattgcagggaaaaagcttgggaagatccgcagaaagcagatcccgaaattccggagaaacatcggagtggtatttcaggatttccgtctgttgaaagaccgcaatgtctatgacaatgtagcgtttgcacagaaggtggttggtgagccgaacagccatattaagaaaaaagtaccgcttatgctttctatggtgggacttgccgcaaaataccgttcttttccgaaacagctatccggaggtgagcagcagagagtggcgattgcccgtgctctgatcaatgagccgagcattttgcttgcagatgagccgaccggaaatctggataacaataatgcgtgggagattatgaaactgctggaggaaatcaacagcaaaggaactacagtgattgttgtaacccataatctggaaattgtgaaagttatgaaaaaacgtgtgatcacagtgaaaaagggtacgattgtcagtgacagtaaggaaggtggctacgacgatgagaattaatacctttttttattcgatcagacagggcttaaaaaatatatttcgaaataaaatgttttcgcttgcttccgtggcaaccatggcggcctgcatttttatgttcggtctgttttatattattgtaacgaatttcagtgcgacggtacattctattgaagagggtgtgtcagttaccgtattttttgaaaatgatgcgacagatgcacaaatccgtgacatcggagaaaagattaataagcgtgccgaggtcagcaaaaacgagtatgtgtctgccgacgaggcgtggaaagaatataaaaaagtatattttcagggaaaagaagaacttgcggatggatttacagataatccgcttgcgaattctgcacattatcaggtgtatctgaacgatgtttcgatgcaggattcccttgtaacctatatcaagggacttaccggggtgcgcgaggtaaaagagtctgccaaggtggcaaatacactgacggattttaataaactgctgggatatgtttccggaggaattattctgattctgctgtgtgtggctgtctttttgatcagcaataccgtaacggtcggtatctcggtccgtaaggaagaaattgccattatgaagctgatcggagcaacggattttcttgtgcgtgcgccgtttattgtggaaggaattgtgatcggactgatcggagcagcgattccgcttggtgtgctgtattttatgtatcagaagatcattgtctatattgcagcgaaattcaattttatcggttcgatgatcgtgtttgaaccggtgaaggttgttttccggacactgattccggtgggagttatccttggagccggtatcggatttatcggcagtcagatgacgatccgcaaacatttgaaagtataatattgttattgttgtcataaaatgacaagaagccatgctgcaaggtgtggcttcttgatttatagggaaaattatggaggcaggaatgcaggaagaacgggaagaaatgatcaaaaccgggaaaccggaaaaaagaagaccatcgggctttaaaaacggagtgattatcgggctggtgctgggactgctgattacgggaatcggtgccggagtcggaattcgtgcgtatgcgaatcttacaaacaattatgttatatttggaccacagggagtaaaacagacagccaaagacaatgttctcgaccaggcggcaataaagaaagtggatgagctgttgtcatatatcgatttgtattacaacgattcttacaaagaaaaagatatccgcaatgccatttataaaggaacgctgagcgggcttggagatccttattccgtatactacacggtagatgaatataaagatctgcagacatcaaccaatggaaattattatggaatcggtgcggcgctttcacagaatgcaaagaccatggaagtgacagtggttaaagtgtacgagggaacaccggcagaggaagcggggctgaaaaacggagatgaaattctatccgtggataagtatgaagcgaccagtatggaactttccaaccttgtaaaaaagatacggggaaaagaggggacaaaagtccatttgaaagtttatcgttcgcagactggggaaaatcttgaacttgatgtggaacgtaaaaacgtggatattccgagtgtggattccaaaatgctttccgatgggatcggctacatacagatcagcgaattccagagtaataccgcaaaacagtttaaaaaggcacttgcagcacttgaaaaggaagatatgaaagggctgattgtcgatgtgcggagcaatccgggcggactggtgacttctgtcgtggatattctggatcagattcttccggagggaacggttgtttacacggaggataaatatgggaaaaaagagacatatacatccgatgcgtcctgcattcattatccgatggcagttttagttaatggagacagtgccagtgcatcagaaatctttgccggagcaatcaaggattatgattatggaacattgattggaacaaaaacgtttggcaagggaattgtccagacggtatttcctctggaaaacggggatgccattaaaattacaaccgcgaaatattatacgccaaagggacattacattcacgggaaaggcattcagccggatatcaaactggaatacaaatacagcggtccggaagatgaaagttatgacatgaagtacgataatcagttacagaaagcaatttctgttgtgaaagaaaaaataaattaaagggtaacaatgaaaagaaaacgtgtatggagaattgtcagtgttgcgttgattgttgtatgggctgtggttattttttcgttttccgcgcagccggatacggagtcttcggaaatcagcgggcatgtgagttaccggattgttaagatgtggaatcaggtgtttggatggaaacattccgggccggaactggaacagatggcacagaaaattgaatatcctgtgcgcaaagctgcacatatgagcgaatatgcagttcttgcacttctgatatttcaggcattgacggcatttgaccggaaaaagaaccgtggatgtatggcacttggcataacggcagcctatgcagcaaccgatgaatttcatcagctgtttgtgccgggaagagccggaagagtgacggatgtgctgattgattcggcaggagcatttcttgcattgcttgctattcatattattttatattatcataagtctgaaataagaaatagaaagaggtgattctgtggtagaattggataattttaagagccagctgcaaagctacaaggctccactgcaggaagtgagggattcactttgacttagctggcaaagaacagcggattcaggaattggaacgggagatggaggcaccggatttctggaacgatccggaagtttcccagaacaagatgaaggaagtcaaaagtttaaaggacgatgtggcaacttatgcggcattgtcgacgcaatatgatgatattgaaaccatgatcgagatgggatatgaggaaaatgatccggaactgatcccggagatcgatcagatgatgaaagaatttgttcagacctatgaggatatccgtatgaaaacgcttctgtcgggagaatatgacaggaacaacgccattgtttccctgcatgcgggagcgggtggcacggaatcctgtgactgggcagccatgctctatcgtatgtatacccgatgggcagataaaaagggattttccgtggaggtgctggattctctggatggagaagaggccggaatcaaatccattacatttcaggtgaatggggagaatgcgtatggatatctgaaatcggaaaaaggtgtgcaccggctggttcgtatttctccgtttaacgcggcaggaaaaagacagacttcttttgtatcctgcgatgtgatgccggatatagaagaagatgtcgatgtggagatccgggaggaagatatccgtattgatacgttccgctccagcggtgccggaggacagcatatcaacaagacgtcttctgctatccgtatcacgcattttccgaccggaattgtggtgcagtgccagaatgagcgttcgcagcatatgaacaaggataaagcgatgcagatgctcaaagcgaaactgtatcttctcaaacaggaagaaaatgcagccaaagcagctggaatccggggcgaagtgacagatatcggctggggaaaccagatccgttcttatgttatgcagccgtataccatggttaaagatcacagaaccggtgtggaaagcggaaatgtggacgcagtgatggacggaaacattgatccgtttatcaatggatatctgaaatggcagagcctgggatgtccgaaaaatatggacaatgatgacgtgtaaataaaaacaggaataaggaggagcgtaatgggaattattaaggcagtaacgcaggcagttggaggtgcatttgcagatcagtggctggaagtcattgaagcagataatatgggggatcagaccgtttttaccaaaggaacactgatccgccgtggggaaaataaaaagggaacggacaatgtcgtgtcgaatggttccatgattcatgtatatgacaatcagtttatgatgctggtggacggaggcaagattgtagattacacagcagagccgggatattacaaagtggatcattcttccatgccgtcactgctcaacggacaactgggagattccatcaaggaatcgtttgaccgtttccgtttcggcggacagacgccgcagaaacagcgggtattttttgtcaatctgcaggaaatcaaaggcattaagttcggaacaagacagccaatcaattattttgattctttctataacgccgaactgtttttgcgtgcacatggcacatattcgattaaaattgtagatccgctcaaattttatgcggaagcggttccgaaaaatagggatcatgtagagattgacgaaatcaatgagcagtatctgtctgagtttttagaggctttgcagtcatccgtaaatcagatgtcggcagatggtttccgtatttcttttgtttcgagcaaggcaagagaacttggaaagtatatgtcatcggttctggatgaggaatggaatcagacccgtggtatggaaatccaggcggtaggtatgacggtttcttacagcgaggaatcgcagaaactgctgaatatgagaaatgaaggagccatgctttccgatccgacggtccgggaaggatacgtgcagggagcggtagccagagggcttgaggcagcgggaagtaattccaatggttccatggccggttttatgggaatgggaatggcttccaatatatccggtggtatgatgggagcggcatcaaatgtgaatctgcagcagatgcagatgatgaatggaggtgcaccagctggaatgacgcagggggcggtgcctgcgatacctcctgctgggcaggaggcaccgcaggcaccggcaggctggacctgtgcatgtggacagcagaatcagggaaaattctgttccaactgtggaaaaccggcaccgaaaaccgagtggacctgtagctgtggacaggttaacagcggaaatttctgctccaactgcggaaagccgagagcgtaaaaatcggggacagatccccgatacctcttgcaagattgatgttcttatggtagaatctttcaagtgagcacaagtgtcggtcgtagacagacaatacataagggaggaaatcaggatgggcgagaaggcatctttcttcgtattgcgggcaaaagccgtgcctgaggtattgctcagagtcgtggaagcgaagcggctgctggattccggtaaagtggagtctgtgcaggaagccacagagatggtacagatcagcagaagctctttctacaaatataaggacgatatatttccatatcatgaaaatgcaaaaggaaaaacggtcaatatggtgatccagctggatgatgaaccggggctgttgtccatggtattaaaaacgattgcggaatttcatgcaaacattctgacgattcatcaaagcgttccggttaatggaattgcttcattgtcgctcagtattgatgtgttccctgcgacgggcaatgtggaggatatgagaaacagtattgaatctgtgcaggggattcattatgcaaaaatattagccagggagtaagaaaaatgaagattgcagttatgggctacggcaccattggttccggtgtcgtagatgtattaagaattaacaaggaaaagatcacaaagcgtgcgggagaaccggttgatgtcaaatatattcttgatctgcgggaattcccgggagaccctatggaagatgccattgtacatgattatcagacgatcgtaaacgatccggagatcggcatcgtagtagagaccatgggaggcgtggagccggcatatacgtttgtaaaggcaatgcttgaggctggaaaacaggttgccacttccaataaaaacctggttgcagccaagggagcggaactgattaaaatcgcacgggatcacaacgtaaactttcagtttgaggcaagtgtaggcggtggaattccgattatccgtccattgaataaatgtctgactgccgatgagatcgaagagattacaggtatcttaaacggaaccacaaactacatgctgacaaaaatggcagaggaaggtgcagatttcgatgaggtactgaaagacgcacaggaaaagggatatgcagagaaagatcctactgcggatatcgaaggacatgatccgtgccgcaagattgccattttaacttctctggtgtgtggccggcaggtagattttgaggatattcactgcgagggaatcacaaagatcacagcagatgattttaagtatgcaaaggttttgaatcgttccattaagcttcttgcatccagccgtaaagtcggaaacagttacagttgtatggttgctcctttcatgctcagcgcagagcatcctctttgcggagtaaacggtgtgttcaatggaatcttcgtacatggaaatgtactgggcgatgcaatgttctacggcagcggagcaggtaagcttccgacagcaagtgcagtagtagcagatatcgtggatatgacaaagcacaaaaataccaatatttacattgactggtcaccggaaaaactgacactggtagattacaaagacagtgtaaacagtttctttgtacgcacttcttccggtaaggaaacaatcgaaaatgcatttggcagtgtagaatatgcagatgccggaattgcaggagagattggatttactacaaaagatatgacagaggctgaatttgaaaaagcggcagcacagattgaagttcgaaaccgtatccgtcttggataattttctggaatgtatatttccaccacgctgttttgtatgcgaccgtctgctggaaacggcagatatccgcagacagcgaaatgttcacgcagcgtgccggaaaaaattgtatcccgttgtgcagccgtactgttatcattgcggaagcccgcttgcggataccgaaacagaatattgtcagaattgcagaaagcatcgttcttttgttgcagaaggacgatcgctttttgtatatcgtggggctgtgcagaaatccatgtaccggtttaagtatgcaaaccggaggagatatgcccgttttctggcggaggaagccatgcagcgctgggaaaactggatgcgggaaaaaaggatcgaagcaatcgttccggtaccgatgtattcgaaaaaagaacggtatcgcggatataatcaggctgcgctttttggcagggcactgtcagaaaaaatggatattccgtgtattccgcgtctgatgatccgggtgaaagatacacggccacagaaagaactgaatggcagagaaagagaaaataatgtcaaaaatgcttttcagagttcggataatgtagtaaaatataagagaattctgattgtggatgatatttatacaaccggatctacagtagaagctgtagcggagagattaaaagaagcgggtgcggaacaggtttatgtgctgactgcctgcattggcagaggcttttaggagggatactatggaagtaagaaattgtaaaatgtgtggcagattgtttaatgttttgaacaatgagcgtatctgtccggcatgtcagaagaaattggaagataaatttcatgaagtcaaacagtatctcgaggatcatccgggtgcttcggtagaacagacagcaacggataatgatatatcaaccaaacagatccggcagtgggtaaaggaagaaagattgattctttcctcggctacggaagcagggattgtatgtgaaaaatgtggcaaaccgatccgcacgggacgcttttgtgataaatgcaaggaaagaatggcaaacgaatttcagaatgcctatcagaaaccggaacctaagatggaagacttacgctctaccagagacagggaccgtatgagatatttaaaaaatgaatagtggacaaataaccagaccccggatatttccggggcttttttcatggaaacgggcgattggaaaacagactttgaaaaaagaactatctatggtataatagcaaataatgcatcattgtgtccaaattccgggatgcgttcgagacaggagttatctatgatcagtgaagaacgggtaaaagaattatatcatcttgcagcatttgatgaatatgaaaataaaaaatatcatcaggcgggagaatatacgatgtgggactatgtaggaaaagaaattgtaaaaagtttcttttcgggaaccatcgcatttattcttctgatcgtgttctggggactcggggatattgatacaattacgaaatggatcaatcgcgtggatcttacgacgtttgtcccgaaacttattgttgcatatgccggatttatgatcgtgtatcttctgattaccgcacggatctattgtgcccggtatgcaaaaggctatcgcaagatgaaagcatatggaaatcatctgaagagagcgcgcagattactgcgggaagaaaaataaaggatggggcataacagggaggatttatgacgaagttgttggaaataaaggatcagctgatccggttttacagtaaatatgaaacatatctgtatccgatcgtaaaatttgccgttgcactggctctttttaccgtgatcaataccaatatcggattcatggagaaaatcagccggtttccggtggcgttactgctggcgcttgtctgtgccattctgccgactggtgccatattatggattggcgcaattgtggtgcttgcggatatgtatgcgctttccatggaagtagcacttaccgcactgattttgtttgcgattctgttctttgtatattttcgtttcgcaccgaaagacggactgacggttgtgcttacaccgctgtgttttaaactgcatattccgtatgtgatgccggttggcagcagcctgctgcgcagtgcatattccgtgatcggagtggtatgcggtacggttgtctattatttcctggacggaattcaccagaatgcaggagcactgatgagtgcggcaaatgcagatgaggaacagtcttcttccaaatttgatatttcggtggggcagtttctgggaaataaagaaatgtatctggtaatcgttatctttgtgattactgccattgtagtttatctggtacgccggatggaagtggataatgcatggacactggcaattatttccggtgcgcttattcagattgccggattatttgtaggttatattgttcttggagttacaggaaagacattatggctgatagtcggcaatattatttccctgcttattgcatttatccttcagtttctgtttatgaatctggattatgcgcggaccgaacgggtgcagtttgaggatgatgattactattattatgtcaaggctgtgccgaagaaaatggtcgctgtccgtgaggttacggtaaaacatttcggaaataccgcaagcatgggaaagcggattgaccatagcagatccgtgctgtctccggaagaggaagagaacagccggaaggttattgcgaaagaactggacattgatgaggatttactcaaataaggggaacgaagcatcaaaataatgaaatgaagaaaagaggagccagatgcaaaattttctgggaacattaagccaattttatgacaatgcaacaggattgttcggtatgccggatatctctttttcctttgtggatatcgtggaaatactgatcatttccttcctgttttatcatattctgctttggattaaaaatacgcgtgcgtggaatctgttcaaaggaatcatagtgattctgctgtttgtactcgttgcagcaatctttcagatgaataccatcctctggctggcagaaaatacgttgagtgtcggactgacggccctggtgattattttccagccggaacttcggaaggcacttgagaatcttggcggaaaaaatgttttgggaaagttatttgactttggaaaagtagaggaaaataaattttccgaccacacaattgacgaactgatcaaggcttgttatgccatggggaaagtaaaaaccggtgccctgatcgtaatagaagatgaaatcctgttaaatgaatatgtgagaacaggaattgatattgatgcaattatcagcagccagctgttaattaatatatttgaaaaaaatactccacttcatgacggagctgttattgtacgtggagaccgtgtggtttccgcgacctgttatctgccattgtcggacagtatgacactgagcaaagatctgggaaccagacaccgtgcagctgtaggaatcagtgaagtgagcgattcactgacgatcgtagtttcggaggaaaccggtaaggtatcaatcgctatgcggggacagatttaccggaatgtcaatgcggattttctgagaggcaaattaaagtatctgcagaacagaaatcaacaggtgaccaaactgagactgctgaaaaggaggtttatgaatggcaaaaaagattctaaaaaccttggtgaataatctgggctttaaaattctggctgtagttcttgcatttatcttatggctggttgtatataatattgatgatccgaaaaaatcaaaaacatttacaacaaatgtaacggtagaaaatgcgtccgcagttacagatatgaacaagtgctatgaagtgctggacggaaccaacacggttacctttactgtgaccggaaaacgcagtgaacttgaaaaacttgatgacaccgatttctctgcggtggcagatatgaaccgtctgatcataaatgacaaggggaataaggcaagtgttccgatcgagatcagtgccaagcggacgtatacatccgtgagcattaacaataaaaacaaatatatggaactttctctggaagatctcatgagcagaagatttatgatttctgcggacaccagcggaaaagtggcagcgggatatgccctcggagaagtttccgtgacaaacccgaatgttttgaacgtgtcgggaccggcatctattgtgaaaaaagtagataaggttgtggctacgattgatgtggatggaatgtcatcgaatctgacggataatgtgattccggttctctatgattcggatggaaatgaagtggataccacccagctgaagctgagcaatacgacagtgacgatttcggcaaaaatactgagtgtaaaggaagtaccgcttgtattttcgacaacaggaaccccatacggggaatatcgtgtagtggagatcagcagtacaccggataccgtgaaactgaaaggggcatccaatgtactcaatccgtttgtttcacttgaaattccggcaaatgtaatcaatgtgagcggggcaagggaagatgtaaagacaacgattgatatttccgaatatctgccggacggcgtggaactggtagattcttcagcggcatccgttacggtaaccgtcagaattgaagcgtatgcgtccagaacctatcatctgccgacatctgatatcaaggttaacagtctgccggacggcctgaacttatcttttgataaggcacaggtttctgtgacgatcagtgggctgcaggatgatctgaataagctgaatgcatcggagctggcagcatccattgatgcctcccggctgagcgagggaacgcatcaggtggaactttcactgaaactggatgaagatcattatgcatatcagccgattactgtcagcgttaccgtgaaagcgaagaatacacaggacggagatacttcgacagacagcggtgaggataccggcgaatagtaaagtatataaaggagttataattattatggcaagaatgtttggaaccgatggagtcagaggagttgcggggacagagcttacaattgaacttgcaatgaagctcggtcaggcgggcgcttatgttttaacaaaggaacagtcccaccagccgacaatcatcattggatgtgatacaagaatttccggaggaatgcttgcaaatgcattgatggcaggaatttgttcagtcggagcaaatgctatttttgtgggagttgccccgacacctgcaattgcatatcttacaaggaaacataaagtagatgcaggggttgtgatttctgcttcccataatccgatggaatttaacggaatcaaattttttaatggagatggatataaattatccgatcagctggaggacgaaatcgaggcattgatccggaatgatatggaagacgttgtttttccgatcggaccgggaatcggcagggttgagtatcggtttgatattgtggatgagtatattgcgtttgagaaaaagacggttccggtagatctgtctgcgttgaagatcgttgtggactgtgcagaaggcgcaagttcctatacttcggttaagacgctgaaagatctgggggcaaatctgatcgctattcataccaatccagatggaacgaacattaattccaattgtggttctacccatatggacgaactgtgtgcaagagttgtttccgaaaaggcagatatcggtattgcatttgacggagatgcggatcgtatgcttgctgtagatgaaaacggaaagctggtagatggagatcagatcatggcgatttgcggaaatttcctgaaagaaaacggaaaacttgcaaaggacaccattgttgtcaccgtgatgacgaatctgggattcagtctgatgggagaaaaacagggaattcatgtggagaaaacaaaagtcggagaccgttatgttcttgaaaatatgctggaaaacggatataatctcggaggagagcagtccggtcatgtgatttttctggatgacaacacaactggagacggacttctttccgcattacacttattgcaggtgatggtggcaaccaaaaagaaattatcagaacttgcacagatcatggaggtgctgccacaggcactggtcaatgcaaaagtgccaaaccataaaaaagaaagttacatggagtattcagaaattgcagaagcaatcggcgaactggagaaaaaatttgccggagagggcagagtgctgattcgtccttcgggtactgagccgttggtgcgtgtcatgatagaaggcaaagagttggaagttatccagcaggaagcaaaaaagcttgcagatctgattaccagagttatgttataaggaggcgttcttatggtatctcaaaaagttaaaatcatcaatcctacaggactgcatttgcgtccggcaggaaatttatgcaaagaggcaatgaaatataaaagtaaaatcacctttgagtacagtggaaatacagcaaatgcaaagagtgtgctgagtgtactgggggcatgtatcaaatctggggacgagattacacttgtctgtgacggtgaggatgaacacgaggcacttcgggaattggtcgcttatgtagagagcggactgggagaataaaatttctgtgggtacaaccggaaaactacatgttagaggaaagttttaatgaaagataaatacaagcatttattaaattttgcagcgaatatcatatcgcttgcggtggaagcgtgtatgttcggatgggtatggtatatgctctatattccgatgctggataaagcgaatacttttttcaacagaggtaactgggcagtgattggtatgtatgtactctttgtgttctttttcacgaagatatttggaggataccggatcggatatatgcggatttcggatattatattatcccagatactggcagtggttcttgcgatgattgttgcgtatttcgagatctgtctggtcgccaacgattatctgccgccacagccattgcttctgatgacggtaacagagattatatttatcgttccgtgggtcatactggtgcgaaaggcatatacacgtctgtatccgccgcgtcagatgcttgttatttatggaaattattcgccggatgatctgatcggaaaaatcaacacaagaaaagacaagtataatatctgtgcagcggaaagttaccggattggttatgaaaagctgtatccgatgattcagaaatataatgcggtggttctgtgtgatctgccgtctgaagtgcgtaatcagattatgaaatactgttatcaggaatctatccgcacatatgttacaccaaagatttcggacattctgttccgcggagcggatgatattcatctgtttgacacgccactgtatctgtcccggaatcaggggcttggcattgtagatctgtttgtaaaacgtctgatggatattgtgatttccctgatcggaatagtgatcgcttctccgtttatgattgttattgctttgtgtatcaaactttatgatcatggtccgatattgtacaagcaggagcggctgacaaaggacggagagccgtttatgatctataagttccgcagcatgacaacacattccgaagatgcgggagcacgtttagcagccaaaggagatgcgcgcattacgccagtggggcgtgtcatccgtgccattcattttgatgagcttccacagctgtttaacattttaaaaggagaaatgtcggttataggcccgcggccggagcggcagattattgcggatcagtataccgaagaaatcccggaatttgtgctacgtctgaaagtaaaagccgggcttaccggatatgcacaggtgtatggaaagtacaatacgacaccgtatgacaagctgaaactggacttgacttatatcgaaaattattctgtctggatggatatcaagattttattcctgacatttaagattttgttccagaaagaaaacacggaaggcgtggatcaggatcagaccactgcaatcaagtaaaatgtcaaaggagacggtaatgagcgacattaaaatcagcatcattatgccggtatataaagtagaagaatatgtaggaaaggcaatcgagagtattcttgcacagacctttaccgattttgaatttttaattgtggatgatggaaccccggacagaagtggagaaatctgcgatgcgtatgctaaaaaagatcacagaatccgggtgattcataaggaaaacggaggcgcaccaagcgcaagaaacaccgctattgatatcgcacagggaaaatatgtttattttctggattcggatgactgggcagaaccacagatgcttgcggatatgtacgaacttgccgagaagcatcaggcacagcttgtggtctgtggattttatattgacacttactgcggacagaatcatttgtcagaaaaaatctgtgtggacgacagggtgtttaccgatgcaaaagattttcgggaagaggcataccggtattttgaccgaaacatgctgtatacaccgtggaataaattgtaccgcatggatgtgatccggcaatacggactgtattttccaaaaacactgtgggatgatttcccgtttaatctgagttacctggatcatgtggaatcggttgtgttttctacaaatgcctactatcatttcatacgtgcacgcgcagagtcggagaccgcggcgtatcgtgctgacatgtacgaaaagagagaggaagaacagggttggatggaagaactgtttcgcagctggggtgtgaccaatgcggcaacgcaggagatggttgccagaagatatattgagcgcatggtgggatgcattacaaatgtgaccagttcgaaatgtaccctttccgggaaagaacagcgggcagaaatcagaaagatgctgcacaatccgcgggtggacaaggcacttgcactggcaaaaccacggtcgggatatatgaaggttatgctattgcctatccggtggaaaaatgttacacttgcttggatggaatcaagcgtcatcacttttgtgaaagaacataatggaaagttatttgccagaatgaaagcgggcagatagaggtaggttgtggctattttacaaacaaacgatatttttaaaacggaattatcggaaggacagcaccgcctgtcaccggaggagattcataaggtgcagcaggttgtctatggtattacgatagatattacggaattgtgcagtgaattaaatattccctatatgcttaccgggggaaccgctcttggagccgtccggcatgggggatttattccctgggatgatgacgtggatatggttgtcgagagaaaatatattgaacgtctgcttgatgcgattgaacagaggtatccggaccggtattttgtagaggcaccgcttcggacaccggggtatctgagttcttttattcagattcaccggaaaaacacagtgtgtcgggaatatttagagatcccggaagaacgatgtggaattaaaattgatatttttgtggtggaaaacacctatgacaatgcctttttgcgccgtttgcacggtatgcgggtagaggcaggattattgctgctttcctgttatcggatgtatttatggagaaatgaattttataagttgtcccggggcaataaaaaggcagccaccatgatacatctgaaaagttttatcgggtggctgattgcaccgaccgggaaattttggtatgctcatgtacagcggctgatgcaaatgtgcagcaatgaccagtcagaatacattgttgtaccatcagggagaaagcatttttttggcgaactgaaattgcgaagtgattttttatgtgcgcaaaagcggaaatttgaggatcgcgaatttctttttcccaaaaacattgactggtatttgtcctatatgtatggaaattatatggaaattccgccggaggataagcgggaatatcatgttgtttatcagctgaaaatatagacagattgaaacaagcaagaggaagaatgatttatgaagaagagaatagatacgttttggcgttatcggaatttattatttgaattagtaaaaaaaggaattaagttaaaatacagaagatcttacctgggaattatctggtcccttctggagccggttatgacaacaatcgtacttaccattgtgtttggaacactctatggtaataaagatcacacatttccactgtatattctatcgggacgtcttctttattcctattttgcacagggcacgaaagtgtcactgaaatcgatccgacaaaattcggccatgataaagaaagtgtatgtgccgaagtatctgtatccgttatcatccgtactttataattttattatatttttaatttcgctgattgtattagtgcttctcggcatttttacaggaaattatccgacgctgcactggcttttgatcgctttccctttactggtacttctgatcatgacgtttggtgtgggaatgattctggctacgattggtgtcttcttccgtgatatggagtatttgtgggaagttgcgctgatgatcgttatgtatacctgtgctattttctattatccggagcgattgttaaagagtggttattcgtgggtacttacagtgaatccggtatataatgtcattatcaatgtaagaaatattattttccatgaggcgtttaactggagctgcatgacatatgcgtgtgtgtttgcggtagcctccgtagtggttggagtgattgtatttcataaaaatcaggataaatttattttatatatttagtaacaatatgcttgaggataaggagtatttaaacaatggcagagacagtgttgcgtgtggaacatgttggcatgcggtttaatctgagtaaagaaagagtggacagcctgaaagattatattttaaaatctattactagacagatgaaatttgatgaattctgggcattaaaagatattaattttacgttggaaaaaggagaacgtattggtattcttggaacaaacggagcaggaaagagtactcttttgaaggtaattgccggggtatttaagccaacggagggaagcgtagtccacaaaggaaagattgttccacttttggaacttggagccggatttgacaaagaatataccggtcgtgaaaatatttatctttatggagctgttcttggatattccaaagaatttatagacagtaaatttgacgagattgtaaaattctcaggtttgaagaaattcctggatgttcccctgaaaaattattcttcgggaatgaaaagccggctgggattttccattgcgaccattgtggagccggaaattctgattctggatgaggttttgtctgtaggagatgccaaattccggaaaaagagtgaaaagaagattctttccatgatggacaaaggtgtgacggtactttttgtatcgcacagtcttgagcaggtaaagagaatctgcacgaaagcaatgattctggaaaatggttcgattcgaagtattggagacattgatacggtttcggcagaatacgaagaaatgatcagtggggattagaaaggagaaaattatgatttatggagcaatgttagcaggcggcgtaggcagcagaatgaaaagtgcagtgattccgaagcagtttcttgaagtggacggaaagccgatcatcatttacacccttcagaatatgctgaaggtagaccgctttgattatatttatatcgccacacacaaggattatctggcgtatatgaaagaaatggttcaaaaatatacagataagccggaaaaagtccggattatcgagggaggaaaggaacgtatggacagtatccataatgtgaccgatgccattttaaaggacgaaggggtacatgaggatgatgtgattgtgatccatgatgcggtacgtccccttgtgacagaaaaaattttaaatgacagtattgatgcggcaggaacttatggcgcgtgtgtatgtgggttaccggcagtagatactatgctttattcggaagatggcaaagtagtgacaacgattccggagcgctctaaactgtttaacggacaggctccggacagtttctctttacctcggtttttggagatgcaggcaaatctgacagaggaacagcgggaagtgattacaggaacttcccagatctgcaccatgaataaccagccgatttatattatagagggagatcctctgaattttaagttgacaaccgatggggatctgttgatttttaaatcgatcattgatgatcagacggtataggttgaaaggagatagtaatgaaatcattaatagaaattccaaagacaatgaaggcactggttctgcatgagatcggaaagctcacacttgatgaggttccggtagagccgcttcgtccgggtacggttctggtaaagattaaagcatgcgggatctgttcttcggacgtggagcgcgtgtttatcaacggaacttatcatttcccgacaattccgggacatgagttttccggacagatcgttgccgttggagatgacgtggatgagagtctgctgggaagaagaacctgtgtattcccaatgctcccatgttttgagtgtccttcctgcaaaaagcagcagtatgcccagtgtagccattatgattattttggttcacgcagggatggcggatatgcagaatatctggttgttccgacctggaatctggtgttgtttgacgatgatttgtcttatgatgtggcagcaatgtgcgaaccggctgcggtaggaattcatgcgaacggacttgcaaatgtgcagaaaggacagtcggttcttgtaatcggaaccggaatgatcggttatgtctgcgctgcatttgccagtcagatcacagataaagttattatgtgtggaaattctgctgcaaagcttgagctggcaaagaaatacggatgggaaaccattgcactggaaacagacaattttgaagaacgtatcaacgcactgaccgatggagaaggcgtggatgtagttatggaagttgtcggttccaatcaggcaatctgcaatgctgtggcggcagcaggaccgaattcaacgatcgttctggttggaaatccaaaagcggatctgaccatggaaaagaatttatactggaaaattttaagaaaatccattactttacgtggatcctggaattccagctataatgacaaacagaatgactggaagacagcacttgaccgcctcaaaggcggagaatttgatcaactgatcacacatcgcttcccgatggaagaatcggaagaagctttccgtgtgatgagagacagaaatacattctctaccaaagttatgtttgttatggaataaatacagaagttagaaatggagatacacaatggaactcgcgatatccaaattgactgcccgcagggttatatattattttgaaggttatgtaaagggagagagaccgaaaggtttaaaatttgttttttataattatgatttgaagattaccataaaaccatccgtatttgagtgggatggggataccttccgtatgatgcttcatgtggagcaggcaaatgagaataatccgatttccagtggcgattattatccgattgctgtggatgggaagggaaagcagtatccattgcaggtggcaaaaagcattattgaagaacgggaacaggcggagtggaaaaatgatgtggtcgttaacaagggaaaaggacatcatgtaatctgtaaatccttaatggatctggatacggatgaactttttattcatgttgataccgtgctcccgaaaccgcgtaaaaattatattcgcagaaaatgtggggaattatattatggagtgcgtaacgatttaaaggattgggcccagaagctttttgtggttgtttttaatattttcaacaagtgctgtaaaaagcgtggcaataagattttattctgttccggatcacgtgctgaaattggtggaaatgaagaatttatttacaaccgtatgcttgagcgtggactggacaaaaaatataagtttgtactggatttcaaacctacgatcaataagacatacggaccatttaaaatgatacggtttatctatcgtctggcgagcagtgatgtgattttactggacgattattatccggaaatttataaaccggtttacgatcagaatgttaaagtcattcaggtatggcatgcctgcggagcatttaaggcactgggacttgagcgtatgtcaaaggcaggagctccgccgatcaatacgtcggtgcataaatgttatacccatgtaccggtcagctcctatcattcggcactgcatcatcaggaagcgtttggtatcggtatcgataagttttatccggtcggaattccaagaacagatattttctttgatgaggattacaagaaaaaaacctgtgaacgtgtatatgcggaatttccgggggcaaaagaagcgaagcgtgtgattctgtatgcgccgacattccgtggaaacagcgctgtggatgcacatttcccgatggaaaaactggattttgaagagtggggagaattatgtaagaggacagattcttacctcatagtaaagatgcatccatttgttcaggagaaaatcaatattccggaaaagtacagagactgcattgcggatgcggcacagtatcgtgaagtcaatgatattttattcattacagatttgctgattaccgactattcatccattatttatgaattctctctgttgagaagaccgatgctgttttacgcatttgatcagatcatgtatgtttctacgagagatttctatgagccatatgaggatattgtaccgggacgtatcatcaagcgttttgatcagctgatggaagctctggagaaagaagagtacaataccgacaagattgaatggtttattaagaagaatttcgcatacacagacgggaagtcaacagatagagtaattgatctgattatagggaatgacgaagagatcggaaagtattcagcagcatccatgcagggagcacttgcggcagtaagcaataatttcggaatgaatggagaacatgtagacaagcggtatcgcgatgatgaccgttctgtcgtgcaaaaccgcggagaagcacaggaaaaagattccgaaagtcagcataacgataaatattcagagtaaaaaatggaggaaaatttcgtgagagaaaaaggaaaaattgcagcatctattatgtgttcgggatttgatcaggtaatggattatgtacatgaatttgagaaaaataatattgaatttttacatgtggatgtcatggacggtacgtttgtcccaaaccttgcatatggtccggattttgtaaaaagactgcgtaagaaaacagatattacactggactgtcatctgatggtagaccgtgcggaagataagctggactggtttgatttccagccgggagagcatgtgtccctgcactatgaaggaacctgtcatatccagaagtgcctcgatcatcttgcaaagaaaggggttaagccggtgattgccattaatccgggtacaccgatccaggtactggaagaaattgtagattatattgcgggagttctggtgctgcacgttaatccgggatttgccggacagaaaattgtaccgcataccattgaaaaagcagcacgtattcgtaaatatctggatgatctgggacatccggaggtatatattgaatccgacggaaacattacctgtgagaatgcggcaaaattatacaagaatggttcggacatttttgtagcaggtacaagcagtattttccgggagggagatattgatgaactgattatgaacttaagaaaggcaattgggtggtgagaaaggagacgtaatgtcaagaatttattatagaggaggaatgtctccatttgagacattttccccgggatatattttgacgcataatgttattggaaccaatgttggtaattttttatatttaaatggggtattgcgttcattgatgatcgacgacaatacagtaattcaggcaaattattataatacaaattattataaacctgaatatgttaatgaaaacttcgattgttttgtcattccattggctgatgcgttcagagagaattttgtgaatgaattaaatgaattaacttcttttgttaaaaagttaaagattccatgttatgtaattggcgttgggttaaaggaatcctatgaaccggatttttcacaacccaaaccacaggatgaagctgtaaagaaatttgttacagcagtacttgaaaaatcaaattgtattggggtaagaggtgaattaaccggtaaatatttggagacattaggttttgcagaaggacgcgattttatggtgataggttgtccatctatgtatatgaagggaaaacgattgcatatacaaaatccgaaattagatgttaattctaaagtatgttttaattcaaatgttgcagcttctgttcctactcgtaagtttattaaattaaaaatgaaggaatttgaaaaccattattttattggacaagttgtaaatgaactcagaagtatttatttaggtgctccatatgaatataaaatcgaatataattttcgtaacgttacagataaaatttatcaggatggtcgattgagatttttttgtaatgtacctaagtggatggaattcctgaatgattcagatttgacttttggatcaaggttacatggaaatattgcagccgttttagcaggaactccagcattgcttgtgacgaaggactcaagaactagggaattggcagagtatcatcatttaaatgcgatacatgagagtaagctgaatgaaaaactgacattgcaggatcttgtggaacagcaggattttacgcagattgaaaaataccagaaacagaatcttgaccgatatgttgcatttttgaaaaagaatgatatcccgaacatttttatggatggagaagatccacaggaaactgcatttgacagaaaaataaagcagacggatttgctggagggaatagttccggtttcccaatgttctctggaagaaattgcagaaagaaatagagattactatacaaatttggatgaaaaactggatagattatcgaaaaaattaaattttacttcggatttattacaaaaagagagaattaaaaatcagaaaattgcaacagaaccccttagcaaaaaagtcgtaaataaggtaaaaggatttttgaaatgatgcaagtatatataattaggtgtttggttttatgaaaaggttattgtgaaagactgatttccagagattattgactggcattgataaaaaatattgtttaagaagcaagtggaagtatcgttcacttgcttctttttttgtaactgttcagaaccaatgtcacttagttaagcttattggttcactatgaggcaaacctctaacaaaaatttataaattatagttgacacatcaatcaaaatgtgcggccgctctcgttgctgatatatttttaaggtaacgagagcggcccttgaattagaactatatttcattctgattcaaggaggtttacctatgacatttcctgaaattgtcaaaactacactttgggacattattgatgagatgtcccgctcactttcttcttttgtaaaaaatccagataaggattttatccgcaaacgcaaacttgattttaagaaaatgatgcatctgatcatttctatggaaagcggaagcctaaatcatgaacttctcaaattttttgagtatgattcctcagttcctactggctctgctttttatcaacaacgttccaaactttccgtttctgcattccgtcaccttctcaaggaatttaaccttaaattccccttagaaaaatttcgcggaaaatactatcttattgcgtgtgatggttctgaatttaacattgccagaaatcttaaagatgcagatactttccacgaaccaaatggtaaatcggtatccggttttaatatggttcacaccatctctttatatgaggtatgttctaagcggtactttgatttagaagtccagcctgggcgtcttaaaaatgagtttcaagctatctgcaatcttatggatcggtatgcctatggggggtcccccattttcattgctgacaggggattttccagttacaacgtttttgcccatgcaatcgaaaataatgttgattttttaattcgtgctaaggatttgaatgtacagcgttttcttggcgtcgggactcttcctgacaaactggatacaaccatagagctgattctgaccagaacacaatctaaaaagaaacataaacatcccgaaaaagaatcacaataccgctatatttgtaaaaacatagctttcgactatcttaatccagctgatatttccgatgaatatctgctgaaactaagaatcgtccgcgttgaagtatccgatggtgtttttgaaaatattatcactacactttccgaagaagactttacaccggacgatataaaatactgttacaatctccgctggggcatcgaaacttcttttcgcgacctaaagcataccattggagctactaatttacactctaaaaaaacagagtatgttgcatttgaactgtggagcaagctcattttgtacaatttctgttccataattattttacatgtaccagtaaaaagcaggaatcgcaaatatgagtaccaagtcaacttttctctcgcaatgaaaatctgttttgattttctaagaggagtcgcaccaccaaatgtagaaagcctgataagtaagtatatcctacctatcaggcccgataggaactatgcccgacagcatagagtccaaaaaccaatcagcttctcttaccgatttgtataacatagagtaactgacaattctagtatacactaattttaaggcagacgaaagtctgtcttaaagtcgtgcctgatatttatatgatcttttttgaatgaagattgttttaatctttttttgtttaccacatccttttcacgctagatgcacacaaatccattaatttgtaaaaagcttaactaagtgacattggttcagaaccctgttagttgaaaatgatatctggggttccgttcagtgcttcgcggatagctgtgaaagcatttattccatgtttgcgagcagttccgatatagctcatgattgtaagatattcctgtgccccttcttcacttcggaagcatccagagaccttggtttttacttttaccattctcagatcccgctctgcctgattgttatcgaatggtacacagagattttttataaaaaggcagactgactccttgtaattatccagtctacagaccaaatttaatactttgctctttttcttgcgaccgtgttttttagcagaaatttcaggaaggggattttcctcatatgcagttttgataatggaattatactccttatcaaatttatggcggtgatagtagctgacctcattttcatctgaaagaagtgctttatcatgtacctttttcatgctaagcaaaagatttttaaatctgacggcccatgtctgctccggatggttttcaattacaccgtttaattcccggagaagatgtgcacagcagatagcatgagtcacatcctgatacttccaataagaactccagcagtcatgcacgatgattccgtgggcatgtggcagtacattcgcagcatccatgcctatctggccacgtctctgatttatggtcagataggtataatccaggtcagatgctacatgaacccagcagatttttccatccacgcggctgccagtttcatcacaatgaatcaggccgagcgtgatcatttttaggcggatctgctcataagtatcttttagcgattctgcacagcgggataccatgtttttgatggttccggttgccagtggaatgttaaacacacttggcaggatttcatgagtatgctccctggtgtgatctggattggaaatgacagagagatgaaccccatcatgaccttcctgggcaccctgtttcttccctgaggattcgcggaggcttcagttcttttttaccacaggctttttaagtccgtcagatgaaggaggtttggaactgttttttgagtttttgtttagctgttccttcaattccttgatggtttgattcagctcgttaattgtctgatccagttcgttaattgtctgattcatgctgacaacagtagctgttaatgtgttgttttgttttgtcagaaaatcaacctgtgccataagctgacgaacaaaatcttctgtgatgttaactggcattcaaaccaccttctttccgcggaattttatgtttatattgtaacggaaacgctgaaaaaaagcgaatttgttgcgaaatccgcttggcaaaatgacggtggataagtattaagtttgaaagtacgaatgctcataaatatattcaaaaccgtcttaaaagacgaaaatgaagcggataaaatgttgatggttgaggattatccacaagtttggtatacagataaaaaatcatcatttttatccacaaaataatagcaagtcagagcagaaaaagatttttcgattctctgttttgcacaacaactgacgacgaacctgagggggttttgaacagttacaaatataattcataaatgcaaagcatacggaatcacatttggaatgcaatccaaaggcaatgaaatcagcaaaaataaaataagcggttgtaagagtggaaagataggtattgcaaaagacagcagtgtcaggtatgtgaaataataacagagagaatagatgatagttcatttgttctcttttaatttggaaaatttacagtgatctttttaagcaaatgtggtatactaaaaatgttttacttggatttcacataaatgaaaggacgtatattatgcgaaagaaaggcatttgttttggattgattctggctttattacttccgtttgtattcacaactgaagtaaaggcatcagataatacagaacttaatatttatgcactttatcttaattcagaaaaaaagggggattctacactgttagaatcgaaaggacattatttgttgattgatattggcgcagacaatcacgcacctgcaatcattaaacagctacagacattgggagttactcatgtagatgtgatgtttagccatttgcacacagatcatactggaggatgttctacggatttacaggctggattgaagcagtttgcactttccgggattacgattgatacgttatatctgccagacccttcgctggcggttttatcaagaagttatccatcccgctatgcagcatttcaagcatttatgagcacacagggaacaggaagaattgtatatctgaatgttggggatcaggtcaatgttggtgatgcgactggaaaagttattgggccagtaaacacgaatgagatttccccatatgcttataccagtattacaaaagaaaaagaacgttttatacgttatgaaaataattgttcacttgcagttatttttacctgtggaaatacacgttattttacagcgggagatagttattctgatgaatcggatcggttagtctcacgttatggtacgtctttaaaatgtgatattatgaaaatgaatcatcatggaattggaagtggaaattcagtgtcattattggaggcggtacagccatcttatgcttttattccgaacactggagtttccgagacagatgcgaagacgaataaatggcgtacaggaacagcgattaagcgcatgacatcttatggtctttgttatttggtgggaaatgaagagaaaacattgattttccatattgagaatgataagattacactatatcgcggagatactgtagaaacaggtaaaaaaatgacaggatggcagtcattatatggagctgatggtctctaccgtgaccacgatatgtattattttgataaaaatggttcattgtctaccggggttaaaatgatagggaaacactactattattttcgcaaaggtggacagatggattatggaacctataattcagcgggaaattactcgggatggcatagttacaacggaaagaaacgttatttcagattgtctgatgatgaaaattatgcatatatggatgtcggcagaaagaaaattggaagtgaaacctattattttgataaaaatgggtataaattaattccggatattgttggtgatgatgaaaatgttgaggatgatatctatccgacacagataggatctgattattattatttaaatgaagatggagcaatgacagaggatgactggattaatatagacggggaagattatttctttgggaaaaatggaaaaatgtaccgtaacggagtgtatgcaattgcaggagataattatctgtttgaaagcgatggaactcttgctgtaggggattctcatacggaactttatgattttaagaatagtacatatgctgttcgggcagatggaacattagtgtcgggaaaaattgcaaagattgacgggtatcaatattattttaactcaaaaggaaaattacaaagcaataagattattcatgtgggaaaacataattattactttggtaaaaatggagtactaattaaaaataagaagattaaacgaaatggaaaaatttactatagcaataaaaacggtgttttgtcgaacaagaaataattggggatgacatatgaaaaccaaagagaaaaagaaaagcaaatggaaaatgatcgcagggattatgcttgtgatccaattgttactgagcctggcaacggtcggagttgttttgtggctgaatattgttccaacgctgtatgtgatcctgcttggattaagtctgctgctgctgctcattatagaatattgtctgttttattttggtaaaaagaaaaagaccggatgctatgtcaggcgtacgcttggtgtaattcttttccttgtatgtgtgattgtgtgtgtgggtggttcctatatgcttgtaaaggccggaaatacgctcgataatattgccggaaatgtaaagaccaccgataccgtgtccgcctatgtgatgacggatgatccggcgcagacactgatggatgcaaaagactatgtgtttgcaattaccgaaaaatacgattacgaacatacccaaaaggcaatcgaaaagatcaatgaaactgtcgggacacagatccgtacacaggtgtatgacaacattcctgatatggtacaggcattgtatgagggaagtgctgatgcaatgctgatgaatgtggcatatgtggatgtggtagaggcacaggatggatatgaaacattttcttcaagaacaagaacactgtatgaccatgaagaagaaaatgtggttacggaagattcacagactgcagaaaaatcaattacaacagatccgtttgtggtttatatcagtggttcggatactagaaaccttacacttactaccagccgcagtgatgtcaatattcttgcggttgtcaatccgtccacgaagcaggtgcttcttattaatacaccgagagattactatgtggatacggcagcgtcagcaggagcaaaagataaactgacccattgcggaatgtatggaattgactgttccatggcaacacttggaaatctgtatgatgaacatgtagattattatgtgcagatcaattttaacggatttaagacacttgtggatgcggtggggggaattaccgtagaatcggaaaaggctttccgcaccagtgagggtggattttatattaaccgcggaaccaatcagttaaacggcacagtggcactttcctatgtacgggagagaaagtcttttgcggatggggacaattccagaggaagacatcagatgcaggcaatcgaggcactgattaaaaagatttcttccggaacaacggtgcttggtaattattccgcaatcatggacagcatgtcaggaatgtttatgacaagtatgagctcgtcagatatttccgcactggtgaaaatgcaattatccgatctggctgcctggaatgtaaagtcttatgcagttacgggaacaggcggatcatcgaccacctattccatgcctacgaaacgaagctatgtcatgtatccggatgaggtgcaggtaaaatatgcagagcagcttgtcaataaagtcgttgagggacagatcctgacagatgctgatctggagattccggataatatcgtacagtagtggaaatttacagtgaggaaaagatatgaagttccgagaacaaacagctaagaaaaagagtatccggcagatcgcggggatgttcctggcagttaccgtgctgctggcggggagtccatatatcgcagaggctgcagagattgtcaaagatatggatggaactgcatatgcgcaggatgcggcaggatttgtctatcagattccaaaaggtgcaacaacgaaaaaaggctgttccatttatatgtatacgggagaaaaaagcacagttacctttcctgcaaaatgtaattcctacgtagttactaacatcggaacgaatcttggccagctgattctgacaaatttgcagacggtaaagattccatcaggatataccacgattgaaacacaggcgtttcagaatcagacggatttgtaccaaattgagattccggccagcgtaaaaacgattggaatagatgcatttgcaggatgtaacaaggcaaggcttacgatagttactccgtatggttctgcggcggaaacgtatgcgaaagcaaacgaaattcattatagcagtcagacatctttacaaatacaggcagggtatagtaaactgtatgtgggagagagccgatccattgtcgtattgaatgcttctgtggcacccgtctggaaaagttcaaatagcagtgtggtatcggtagatgcggatggaaggctgacggcgaaaaaagccggaactgtaaaaataacggcaaccattggcaaaaaaacttatacatatccctatacggtgattgcgcgttcccagaaaaacgtgcttgatattatctggaatcagtatgtgacctccgggatgagcgattatgaaaaggcagttgccgcccagcagtggatgcagcagaatgtttccccgaatggaacatcggttctggcacagaaagcactcgagcagggcaaggcaaattataaggggttttgtgaagcttatcagttgattatgaagcactatggcatatccgcaaaagtggtcaacggcaaaaaacacatggaaaattctgtcgtgatcgccggtaaaaaatatacagcatcaacgctggaaacttcagcgaatgcagataaaacatatactacaacaaccatcccgggacttgcggtgaaccgggtaaccatggttctttccaaaggcaggaccggcacgtttaaagtgaccggacaaagcaaaggaattacctggtccagcagcaacacgaaggttgcggtagtaaatgccagtggcaaagtgacggcaaagggtaccggcacagccaaagtaacattgaaagtaaacgggaaaacatttgcctgcaccgtttgcgtaaatccatgaaaagattgaaaggagaaattgaaagaatgaaaaaagtaatgaagagggtaattacggcatgtctggcttttgccatgattctggcgctggtgacaccggcatctgtggaggcagccacaaagaatgagagcttaacactttataagggagaaacctatacctggtatcttaccggtgtgaaatctttaagcagtgcgtcaagcaccaagaaagcagttgcaacagtaaaagccaataaatcgaaaaagcagtataccatttctgcaaagaaagcaggaacttcggttgtaactataaaagggaaagattattacggacatacgcagtctttaaagataaaagtaacggttgcggagccgaagtttgaccttaagcttcagaaactggatggaaattatattctgatccgtgtgaaaaacaatacgaaggcaacgtttgaccggttggcggtacgctactcattaaagaacagttccggatctgaggttgcagcaaaagatgagattgtttatcgtgtaatgagtggaaagactgcatacgaaagtatttatgtctcatctgcggcagatgttgatatttcgcagtccagtgtaaagattacggcatttgacagaaatccggaacagaaatataaagtgctgggaaaagataagctttccgttactgtcacagatgaacaggtatcagattccagtatttcatttaagctgaaaaaggtaaacaaaacaagtcagtatgtgtatggagaaatttatattatcagctatgatgcaaacggaaccatcatagatgtatctaccagctccttatacctggataaaaaggaaaccaaaactacttcggaaaccgtttccaagagcccttacagccatccgaatttcgaccattatgagatcgtatacggtggatactatacaacaaaataaatttcggtcattcttagatgattataaggataagggtggaatcattgtgattctgcccttgttttattgaaaatgagggcgataaaataaaaaattcagaaaacggttaagaaatggaaaagatgtccgatatatattgtgtaggtaaacaaaaagaacgccaatcatggaagggaggcgcgttaccgcagcaatcaaggacagatatcagacaattgtacccgtaggaagcatcattgcgattacctatcagtctccacgtgagaatcatggggaatcccagatgaagcagaagaaggcatcgtttgcaggcatgctggatcagcagatgcagatgctcagtgttggaaaggaggagaattcaacatttcagatatattgctagaacataacgaatgaacgccgtgtcgataccagtgtgtacgatgcggcgtttttgtgttatgataaaatcggcagtaaaaagactggatgaaggagtagaaaagacatgataagaaatataatctttgatgtgggaaaggtcctggtttcctacgagccggatgcatatatgcagcgtctgggaatcagcaaagaaaatcagaaaaaaattaatgaagcaatgtttcaaaacaaattgtgggatacgtccgatcagggacttgggacaccggatgaattcttacagaaatttattgcgggagcacccgaactggcagacgaaattacgaaaatccataaaaccgtcggaaataccgtggaactgttcccgtatgccctggaatggattctcgatctgaaggcaagaggatatcatgtgtatatcctttccaactacagtgaaaacatgctggatcagacaaaggataaattgaaatttctgccgcttatggatggggtagtattttcctataaaataaagaagatgaagccggatccggaaatttatgaatatctgtgtgatgaatactggctggaaccggaagaaagcgtatttattgatgatcgtccggtaaatataaaaggagcagaaacctgtggcattcatgggattgttttccggtcctatgagcaggcaaaaaaggagctggatgagtttcttaaggaattctaatatttccgtgaaaaacttttcaaaaaaccaagattgtgataaaatggcatacagcaattgagtttcagaaaattgcaagtggagagaatttaaaaatcttgggcgaagcatagaatatgtatcgcaaggagtgcagatcaggaggataggaaaatcatggattacagacaggaatatgacaagtggtgtaatgacccgtatttcgatgatcagacaagggaagaactgaaggcaattgccggtgatgacaaggagatcgaggatcgtttttatcgtacactggagtttggaaccgccggattgcgcggggtgatcggtgcgggaaccaatcgtatgaatatctacacggtccgtcaggcgacacagggactggcaaactatattctggcacagggaggacaggagaaaggtgtggcaatcgcacatgattcccgtctgatggcagatgaatttaccgatgcagcggcactttgtcttgcagcaaacggaatcaaaacatatgtgttcaagagtctgcgcccggttccggaactttcatttgctgtccggacactcggatgtattgcaggtattgttattaccgcaagccataacccgagagaatataacggatataaagtatactgggaagacggcgcgcaggtaacaccgccacatgataccggtattatggcggaagtagcaaaagtaacttcttttgacatggtaaagaccatggagaaggaaaaagcacaggcagaagggctgtatcagatcatcagcgacgatgtggatgaatcctattttgcagaactgagaaatttatccattcatccggagatcatcaaaaagatggcaaaggatatcaagattgtttatacaccattgcatggaaccggtcttggcccggttaagcgtgtgctgagtgatctgggatttgaaaatgtatacattgagccacagcaggcagttgcggatggacatttcccgaccgcaccgtatccgaacccggagaatccggatgcatgggaactggcacttaagcttgcaaaggaaaaggatgcagatctggttctggcaacggatccggatgcagatcgtcttggagtatactgtaaggatacaaagagcggggagtatgtaacctttaccggaaatatgtcagccatgctgatcgcagaatatattctgggacagaaacgtgcaaacaattctatgccggagaatccggtactggtagaatctatcgtttctaccgatatggcaaaagcaatcgcaaaagcatatgatgtggagctggtggaagtactgactggatttaagtatattggtgagcagatgctgaaatatgaaaaatcaggagagaagaactatgtgttcggatttgaagaaagctatggatgtcttccgggtacttatgcaagggataaggatgctccggcagccgtatgtatgctgtgtgaggttgctgctttctataaatcacagggaaaaacactctgggatggcatgattgatatgtatgaaaagtacggatattaccgggaaggaatcgcaaccatgacacttaagggtatcgatggtgcggcacagattcagcagattatggatcgggcaagacagagtactccggcaaagcttggagcgtttgatgtacttgcagtccgcgattataaggcagacacccgtaaggatttaaagaccggggaggtgactgctaccggacttccgtcttccaatgtcctgtattatgagttatccgataatgcatggtgctgtgtacgtccatccggaacagaaccgaagattaaattttatgtcggtgttaagggagataccctggatggtgcagatcagatgctggaagaattaaaagcagaagtgttaaagcactttgaataatcggtagacagttatgatgaaaatatacatttgtccgcaatgtggatggctccgtatggtttccagacgaaaagatgtcgaatgtcatcagtgtgggaacgcgcagatgcggctgaccaatctcgacctggagaaatatacttccatgtcggaacaggaccgcgtcagttatgcagacgcatggctgtatatacacaataggcaaaaggattaaaaaaatggcagataatagaagaagaaaaaagagaagaaagaaaaagaagagcagaaagattgtattgtttgtatttgaaattctgcttctcgcaatcctgcttgtcgctgcgtattttattggcatggtaaatcgtgtgaaatatgaaaatatgagtgagacagaggcaggaattaatgatgatctcagcaaagataccttggagtctttggaaggatataccaatattgcagtgtttggtctggataaccggagtgcaaataactaccaagagggaaattccgatgttgtcatgattgcaagtattgataataagacaaaaaatgtcaaactggtatcggtataccgtgatacatttctgtcagtcggaggcggcacttatttcaagtgtaacaatgcttatgccagaggcggggcaaaacaggcggttcagatgttaaattccaatctggatctggatatcaaggaatatgtgtgtgtggattgggcagctgtcgtagaagtgattgatgatctgggaggactggatctgaatattacccagggcgagatgaaccagatcaacaagtacaagaaagatgtggacggcgtaaccggaaagaataccccgaatgtgacacagtacggtctggtgcatctggacggaacacaggcaaccacatatgccagaatccgtaaactttccggagatgactttaaacgtgcatcccgtcagagaattgtgctgcaggcgatgctggagaaagcaaagaaggcaaatccggcaactttggtgaaaatctgcaacagtgtggtagatgatatttccacaacactttcgctggatcagatggtgagtctggcgaaagatgtaaccaagtacaaaatcagcagcaccactggttttccaacagatctgactacgaaaaacatgccgagatgcggagatacggttatcccggctgatcttgtgacgaatgtaaaaaaactgcatgaatacatgtttgatgatgccacgtatacaccatcacagacggtgcaggcaatctctgacacgattgtaaatacaaccggaatcacggcagattctgcaaaaattaacacatcggattataacgagactgtaggtgccacaggcacggatgagattcagaagggatcagaaactactggcggaacaaatgtacagtaatcaattgggaaataagagtagaccaatcggcatgattggtctactgttgtcattggagaggaaagtcaataaagataaaggagaacgtttccatgaacgaacaggtaaagaacaatattatggagtataagcagaaatatttacagaaactgacagatgcacaggtgccggagaaactggaaaaacagctggaggaaatggactggtcctgtctggaactgattcatcagaaaaaacagcaaagaggaacgtttgcgccactgcaggcgaccgaactttccgaaatccgaaagaaggaagatctgtatcgggaaacgggactgaaagcactccgggaaggaaaagtcggtgcgattcttctggcgggaggacagggtacccggctgggatttgacaaggcaaaaggcatgtttaatatcggagtgacgaaaacactctatatttttgaacagctgataaaaaatctgatgcaggtaaaacatgaggcaggcgtgtggattccgctttatattatgaccagtgaaaaaaacgatgcacagacacgggcgttttttgaagaacatgattttttcggatatgacagcagttatgtgaaattttttgtgcaggagatggttccggcggtcgattttgatggaaacatactgatggaatcggaggattctctcgcgatgtctccgaatggaaacggtggatggtttaaatccatgctccgggcgcatctggatgaagatatccggacacgtgggattgaatggctgaatgtttttgccgtggacaatgtattgcagaggattgcggatccggtgtttgtcggggcaacgattttgtctggatgtgtgtgtggttcgaaagtcgtgcgtaaggtttctccgtatgaacgtgtgggtgcaatgtgtctggaagatggaaaaccatcgattgtcgaatactatgaactgacaccggagatggcagaggctgtcaatgaaaatggttcgctgctttacgggttcggtgtgattttaaattatctgttccgtgtggataagctgatggagattgtaaaaacaaatcttccgatgcatattgtagagaagaaggttccgtatctggatgaaaacggtcagctgcagaaaccgaaggagccgaatgcctacaaatttgaaacactcatactggatatggtgtatatgatggataattgtcttccgtttgaggttgagcgggaaaaggaatttgcaccggtgaaaaatgcgctcggaactgattcggtagagtctgccagagaactgttaaagaaaaatggcattgcaatttaacagggatttacaaaatttacagaactttgtcacaatttgaacacagttgacaggtagaattctccttagaaaacaggaaaggagtttttcattatggataacaactattataataatatgaatcaaaatcagaatcagagtacacaaaataatcagaatggatacaatccgtacaatagtaacagtcagggacagacataccagaatacatcatacaatgcgtacaatccgtatcagcagccgaccggaggctcggcaccccggaaaccgcgtcgcaggtccggatttggagctaccattggtaagtgtgcggcagttgctctggtctttggtctggtagccggaggtgtatttaccggagtcagctatgtaggaaccaaagcgctgggagtttccggacagaatgtaagcagttcaaagagttcttcttccgcaaaagtcagccagacgagtaccggcaatgcagcggatctttccgatgtttccgcaatcgcaaaagaggcaatgccgagtattgtggcaattacaaataccggaacagtatcctatcagacattctgggggacacagcagcagcagagtgagagtgcagggtccggtattattatcaaacaggacagcaaatatctttacattgcgacaaacaatcacgttgttgcagatgccgattcattgaaagtgcagtttgtggataacgaaaccgtagaatgtaaggtgcagggaaccgatgcttcggatgatctggcggtagtcaaagtagcattgagtgatattaaggattctacattaaaagaaatcaaggtagctacggtaaacgaggataccgataccctggaagttggtcagggcgttatcgccatcggcaatgcacttggttacggacagtccgttaccaacggtattatcagtgcgttaggaagaaccgttaccgtgcaggatgaacagaccggagagaccgtggtcaataacaacatgatccagaccaatgcagcaattaaccctggcaacagcggtggtgcgctgctgaatgcaagcggagaggtcgttggtatcaactctgcaaaatattctgatacgagtgtagagggatttggttatgcaatcccgatgtcagatgccatgccgatcgttgaacagctgattgaaaaaggacaggtagatcagtccaaggctgcgttcctcggcattcagggacaggatatttcttccagtgttgccagtgcttataacatgccgcagggggtatatgtatatcaggttgtctccggatcaccggcagaaaaagcaggacttcgtcagggggatattattacagaatttgacggccagacaattacaggtatgacgcagctgaaacagctgatcgcatcccacaaatcaggggatgaagtaaaaatgacaatggaacggctgggaaatggctacaaggaaaaatccattaccgtgacacttgcagcacagtccgattttgtatccgagagcagttccgataattccaatgattctcggaactcacaggattccggtaactccggcaattccagaaactcggaaaattccgataattccgataattccggcaactccggtttcttcgatggatttggtggatcaaataattaatgacaaattgcataagatgcgctataatagattgtccgaacataattcgggcaatctattttgtattttaaagcaacactgcctgtggcagcaggataatgccatggggtagttgcagttttagaaacaggagtcagacaaaaatgaataggataaaagatttgatcattcagttctgcaagtttggtgcggtcggtggattgtgctttggcattgattatggactgatgatctttttgacagagacacatatcatgcattattttgcatccagtgccgtgtcgtttaccgtatccgttattgtgaattatatcctgagcatgcgttttgtttttactggaaaggaagacatgacgaaggcacaggagatggttatttttgtggcactcagtatgatcgggcttgtgatgaaccagatgatcatgtggtttgccgtagaacatttaggaatgttttatgcagtagcaaaaatattctccaccatgttagttactacgtataattttatctccagaaaaagattcctggaagcataagccggggttggagagttaggaggatgtatgaaaaagaaaagaattgtaatcgcattgggacatgaagctcttggaagtacactgccggaacagcagaaggcagctgcgcgtactgcaaaagcagttgcggattttatccgcgaagattatcaggtggttattacacacagcaatggaccgcaggttggcatgatccatacggcaatgaacgaattctgccgtctgtatccggaatatacagcaactccgacatctgtctgctctgcgatgagtcagggatatatcggatatgatctgcagaatgccattcgtaccgagttattaaaccgcggaatctataagacagtttctacggttctgacacaggttgtcgttgatccgtatgatgaggcattttatcatccaaccaaagtgatcggtcgtgtgatgacaaaagaagaagcagaggaagaagaaaagaaggggaatcatgtgacagaggtggaaggtggataccgccgtattgtggcatctccaaagccaatggatatcgtggaaattgatgcaatttccgcactgtccgatgccgatcaggttgtcattgcctgtggtggaggcggaatcccggttctggcacagaacaaccgtctgcagggagccagtgctgtcattgagaaggatcttgcagccggaaagcttgcagaacttctggatgctgatatgctggtgatccttacgagtgtagataaggtttgcctgaattatggcaaagaagacgaggtaaagctggatacactttctcttgccgatgcaaagaaatatcttgcggcaggagaattcggagaaggaaccatggcacctaagattgaagctgcaattgacttcattggagagtctgcgatccgctctgttcttgtaaccaaattaaataaagaagcaggagagattaccggtggtatgggaactctgatcaagaaatagtagttttttgcaggaggcacaaaatgaatcgaattaagagttttacaatcaatcacaatcttctgatgccgggattttatatttcccgtgaagatggggatgtgattacctatgatctgcgtacgcgcaagccgaacgcaggagattatatggacaatgcaaccatgcattccctggagcatatgtttgctacctatattcgcaattccgagatgggaaatgaagttgtctattttggaccgatgggatgtcagaccggattttatctgctggttcgtaacagcagaagtccgaaagaagtgtttgctatgacaaaagaggttttgagacagatttatgatcataaaggagaggtattcggtaagtctgcaattgagtgcggacattatgaaaatttatctctcgcagcggcaaaggcagaagcggcaacctatcttgctgtgctggaagaacagacaaatatggattttacatatccggaataaaacagattgcaggaggaaaagatacatgagaatcggagtaattggtgcgatgcagattgaggtggataacctgaaagcatccatgagtgatatcagcacgaaagaatacagtggtgtcacctatgtgtgtggaaccattggagataaggaagtggttgcagcagtgtgtggaatcggcaaggtgtttgccgcaatctgtgcggaggcaatgattctggagtttcatgtggattatgtgatcaatatcggcgtgggtggcacactttgcaaagaacttggggtaatggatgttgctgtggcagataaggtagtgcagcacgatatgaatacgacacctctgggagatccggttggacttctttccggtatcaacgaagtgtatctgccgacagacgaaaaaatgtgcagactgctgggcagctgcctggcagaaaaaggaattcactatcatgtcggaacgattgccacaggggatctgtttgtcagcacaccggagcagaagacaaagattcatgagcggtttgatgcgattgcctgtgagatggaaggcggatctatcggacatgtctgttatgtaaataaagttccgtttgcaattttacgttccatttcggatggagagggtgcttctatggattatgcaacatttgcagagaaagcagcactgcagtcaattcttgtggtgattgatttcattcagagagcggatgagctgcaggcataaattgcgtctaaatttttggaatggtacatatactctacaaagacatttgatggagttattatgttcaaaaaaatacatcgtgaattaaaaaaagagtcatgcaggaagatcggaaacggttttcttgtcatggctcttatttgctgtctgatgtttgtctcgtatcaggcgacatctgcagtgattacaagtgctaaggtcggggatcgtgaacttccgatttactgtgtagacacaacagaaaagaaagtagcactcagcttcgatgctgcatggggagcagaagattttccgcgtatcatggatgttttggataaacataaagtaaaggtgacattttttatgaccggaggctgggtagaagataacccggattgtgtgaaagagctggtaaaaagagggcatgatctgggaaaccacagtgagcatcattatgacatgacgacaatttcccaggaggaaaaagacagtgaattaaaaactgtgcatgataaggtaaaaaaactgaccggttatgagatgtatctgtttcggccgccttatggggcttacgacaatgatgtgatcaagacggcgtacgccatgcattattatccgattcagtggtcagtggatagtctggattggaagaattatggtgtggattctattatcacgacggtttgcaaccataaagcacttgcaccgggagccattatcctctgtcacaatggagcaaagtatacagcggatgcattggatgccatgctgaccaatttagaggaacagggttacaagattgtgcccatctcgaagctgatcatgaagaaaaattatcatatggatgcgacaggaaaacagattgcggatgatgccgaaaaacaaaagacgacggaggcggtaatacattgagttgtgtatttcccggatttttggttattgaaaccaacagatatacggatttcccttttcgaaacatttctgttctacataaaaacctgctgaaagaaccagacgggacatataaaggataaaggtcgaaaaatatcccagtgaataaggaaagtgggacatatagacaggagagtgaaaaaaatgtcctgctgtggcagaagcatgggacataacaaatatttttttgtatatgtccggacagacgagaaaatggggacataatataaaaattttcctctatatgtctaaatttttcacggaattcgtattccagaagccagagaagggattatgagtagaaaatatcagagcacagtaatgatacataatatttgcttctggatgaaaaagaatttcgcattgacatatcttttcgggggggtagaatcaatatgtaaaaaatattatttaaaataaggaggaaatgattatgaacaagctgaaaaaagcagtggtaatggttttagcattggcaatggttttaacatgtgctatggtaacaccggtgcaggctgcgggaaaactgaacaagaaatcggtttctatttatgaaacagagacagtttcactgactgtgaaaggagtaaaatccgtaacttggaaaacttccaataagaagattgccactgttgataaaaagggactggtaaaaggcgtaaagaaaggcacctgtactgttacagcaaaggatacaaagacaaaagctgcatattcatgtaaagttaccgtaaaagcagcaaaatcatttggaattgcagcaaaggatattagtgtattcactggtggagaaactatttcttatccgggagaggaaatcaagggcgcaacttatgtactggatggaaagaaactcgggaaaaaggattacagtacatggacagataaggatggagagcgtgtagtttcttatgttacacttacaaagaaacttacagatggaaaacatacctttgctatccagaaaaaaggttataagacagtaacaaaatccttcaaatttacagcattaaaggttgatggaatgtttccggacggagaagagccttgggtatctgacggaaccctgtacgttatctgtacaccaaagctggatggaaaagattttgtgattaaagtagatggtacagaagtaaaacctaaggatgctttcttaaatggagatggtgtatttgttatctgggtggatgctacaggactttccgcaggagagcataaggtgagcgttaccgcagaaggaattccggatggagaagcttcatttacagtaaaataatatatctgaatttcaaaggatatgaatcattgtcaggaggatgactatgaaacaaatgaaaaaactgcttgcatttgtactggcatttgcgatgatcatcacgatctatcagccatcagcggcatatgaaaaaaccaaaaaaacaagattaaatgcaaagacaatgacacttcaggtgggacagaaaaagacactgaaagtaaagaatgcagggaaaaaggccaaattgaagtggtccagcaataagaaatccattgcaaccgtttccaaaaagggagtagtaaaggcagtaaaagccggaaatgctgtcgttacctgtaaggtaacaacaaaaaatggcaagacaaccaaactcacttgcaaggttgcggttaagaaaacagcaaaagttaccagcttgaccgttggttctcagagcgaactggaaaaggctctgaaaaacaaaaatgttacaaagatcacagttgcgacacagggagctgttacgtttacggtaccgcagggcaattacagtaaggtggatctggtaatcaatgcaccgaatgcggatgttgtgaacaatggaaaattcaagtctattgatattcaggcaatcaagccgaatacttaccgcgagaatgcaaaaggaaatgttattacggtcagtgcaaccggtgatgcacgtgtgattgttgaaaccggtgctaccgttgcaaaaattatggtttccgggtcaaagggaaatgtaaaactggtggtagatggaaccctttccggcattacgattgatgctccggtgaatgtgactgtagaaggaaagacaaccgtagcagtacctgttaccgtaaatgaaaaagcggcaggtgcaaatgtaacttccagtacaccggtagaggtaaaggcagcagcgccgatcgcactgaacctgaccaaaggtgcagagggaagtaaggtagagaccacatctgataaagcagaagtaaccgtaaagaatgagacaacacaggcagtaacggttacgactccggcaggaagcaaggacgtggcaaaagataccacttcaaaagtagataatgcaggaaaagttacggatgtagcagacaatacggatgccaataatggtggtggagcaacagggggaagttcttcttccgggggaagtgtaactccgactccttctgttggaaaaatggataaggcacagaatgttgtaaaaaatattgaaaagaatgaattgtctgcatctatatcagcattacagaacccaatgatttgtcagaaagttttgtttgatgaaattcagaaaaaattcaatgaagatgaggaacttaaagatatatactttgaagtttcttataatgagccaatagagaaaaatgatccaaaattgattgcatctatgcgggttacaatttatggagagaatgatgaaagttatgagatatacggtaatgtgacttttatatgtaaagaatctgaaattcaggtatctgcgcctgaaatcaaacatattttgaaacattctctggtggtagcagttgagccaacttatgaatatgcttgtgttactagcggcacagcaatttccgctataacagagaatcagtgggtacaaggaaatgagtcggatgattttggatgttatgaaatgtccggtcttaacgaaaatacagagtatgttgtatataagagaattattggtgtagatgagtattatggaagttcaacagctacaacaggcggggaagaaactatttgtcttgcggaggctgatgagaacgcaaagaatgttaatgttggaaatgttaaggcaggtgatcgaatttctattccgctgaaaggattgaaggttgtatgttatgcaaagccgaaggacggttttgaacatggagactttgattttcggtgtgatgatgaaatgaacaagttgctttgggatggctattggtcgctgaattcttatgataaagataacaatttgcttgttacatttactgttcctgaacaactggaatcaggaaaggtatatacagttaaaatatgttataattttgagtgtagtaaggaatcagataatcctgatgagtggggagatcttattgcacaaagtgatgatttgatatatacggttacgtttactgtagaataattgaataggtgcttagtgaaaactgtccatccataacgggtgggcagtttttttacttgcagaaaaaatttattattttttgaaggggatctcaaaagtatagggggggtcctgaaattttttaggggcaatgtaatagagaaaaaatggatttataaaaatttaatttgctatcagaatcaatatcttttacaataaaatcacatacgttcttttggggagattttttgacggggatttttatgtaagaggaggttttatttgaacacagagataaagaatgccatacaggcagctgatagcgaggcacagtatgatgaaagcgcaaagcgtctgttagcacaaaagtatgtattggctcacattttagttagaacagtggaagaatttcaagggatggaaatcgaaaaagtagtttccctgatagaaggagatccatatatcagcaaagtaccggttgcgtccggactgaccaataaggacaggaatgtggaggggaaaaggattgtaggactaaatacagaagccggagaaaaaaatgaaggactggttcgttttgacattattttttatgtgcgaatgagaaacgggttggcacagatgattatcaatgtggaagcccaaaaagatgaacccggttcctatcagattttaaaccgcgctattttttatgtaagcagactgatttcttcacagaaggaacgggattttgtaaaatcaaattataatgatataaagacagtctatagtatatgggtttgcatgaatatgccggaaaacagtatgtgtcatatttatttaacaaaagaagatttactcggaaagcataattggaaaggaaatttgaatctggtaaatattgtgatgatcggcttgacgaatgcgcttccacagcgtcataatgaatatgtgctgcatagactgttatgtgccatgttttctaatgaattatcacaacagcaaaaaatgaaaattatggaacaggaatatcatattccaatggaagaaagttttaaggaggaagtgagtattatgtgtaatttgagtcagggcattaaagaagctggaattgccgaggggcgagaagccggaattgccgagggcaagcaaagagaaattgaaaaagtaattttaaatatgcataagaaagggtactcgttagaacagattatggatgcaacagaattggaagcaactgaattagaaaccataattgaaaaattaaaataaagcatcgcaaagacattagtaaaagtgtttacggtagttgaaagaattataagcaaataccttataaaaaaacgcataaaacagaataaagaataaaaatgcaggtataattgcataaaatatcaaaaaaggcgcagtgatttacaacattgcaccctttttgttttgtgcaaaatctctttcatacaacggaaatgtatgtgaaaagtgtataaaatgcataagaaaaacttggaattcccgtcaattgaataaacggttgcgcaagtggtatagtggacatatcaacaaaacaaacggttgcgcaacacgataggtctggtgataagggagaggatatcagaactatcgtgtttgtgtccaaagagggaggatcgtgtatgaaagagaaaaaacattggaacaggagagtgctcagttttcttctgacacttgctatggtgattacacagcttggggtgtggaatgccggaaaggagagcgtacaggcagcggagaatagcagttttacattgtattattacaatgaaagtcaggagccgttgtatgtgaatatatggagttggactggaatttcatttgcagaagatgtagaagtgacttctgaatttggatggaatcatgatcttgccgttatgaaagccgttgatggaaatgaaaactggtatagtgtaactattaaaattttggatgcagaggcagatgatggatttaccatttatcagaatggaacaggagatgacaatatactggtacaatatgacagtcagtataataaccaaagcgattatgcgaattttgtttccggaacggagagcgcttatgcagtaaaagatgaaaccgtatatacaaatctgtcagaagctggattgaatatggaagatcaggcagacgatgatgacaattccactgaatacaatctgcagatcacagcagataacactacagtagaagcaggtgatacagttagtctgacagccgtactgaaaaagggacagaccgaaatcaccgatttagaagcagcagggctgcatctgtactggtggaataatacaacaaacagttccggtgaatttataaattatgatgaaagtaatggttattcactcaccttgcagacaactttaggaacgcttggaaccaacgaaattcaggcaaaacttcaggacgcagagtggaaggatattgtgataaagaaaatagaaattacagtgaacgaggcatccaacagtgtaaaagatgcaccgatcgatgtaacaaaagtaaacaatttgtcttctgattttatcatgggaatggatatctcctccatgatctctgaattacagagcggtgtggtataccgtgactatgatggaaacgaactgaaaacacttgatgatatctgcaggtttatcaaagagcagggcatcaatcacattcgtgtccgtgtatggaataacccgtatgatgccaatggcaacggctatggcggaggaaacaatgatgtggcaaaagcaaaggagtttgcagatgcatgccgcaatgccggactgaaaatgttagttgatttccactgttctgatctgtggacagacccgggcaagcagcaggaacccaaagcatggaaagggtacacccttgaacagaaaaaagaggcattaaatacttatatcacaaaatccttaaataccattgatccgtcaaaagatgttgtggatatggtgcaggttggaaatgagacaacgggcggatttatcggtgagacaaatgtcagcaatatgtgtgtattattttcagcgggcgcaaccggtgtagaaacgtacaatccggatgtcaaagtcgtcatccatgtggaaagcccacacaagggaaccatggtaacatgggcagaaaatctgcagaacaacaatgttgattatgatattcttgccaccagttattatccatactggcatggaacattagataacttaaaacagcagtttcagacggtaaagaatacatattgtaaagatgtgatggttgtggaaaccagttatgcttatacgttagaagacagtgacggacatgccaatacagtgcgtgttggaaataatgataacggagctgacacaacggagccatttaccgagcagggacaggcaactgcaatccgcaatctgatcaatacggtaaacgaagcaggaggacttggggtatattactgggagccggcatggctgaccgttggaaataccaaaggacttaccggagatgcatatgatgcacaggtaaaggaaaatcaggaaaagtgggaaaaatacggaagcggatgggcttcaagttatgccaacgaatatgattcgaaagatgcaggcaaatggtatggcggttctgcagttgacaatgaagccatgttttatccggatggcactgcaactcctgcacttcatgtatggaattatgtaaaaacgggtgctgtttcgaatctggtaagtgtagaaggatttgattctgcactgacacagacgattactgcaggcagtgattttacacttccggattccgtggaagttacttattccgatagcaaaacaccggtagcagaggcggttacctgggatgaagcatctgtaaaaaaggcggatatgtcaaagcccggaacttatcagatttccggtacagtttctttgagcaaagaaattacaagaggtgcttataaaggaaaaaccagtgtagatgttacacttactttacaggtaaaatatgcaaatctgattacaaataaagaagcggttgaatttgacagtggagaatactttaccgtagacggaaccacgttcaagggaattccttccgcagagaatgcaaagagcggaaaaaacagtatgggctggtacggagcatccgcagcaaatggttctgttacatataagaaagcaattacgctggaaaaaggaacctatacattggaagcatatgcccagggggcacagtcagatgtaaccatgcagatattaaacgcagaagatgaaagtgtattatttaccggcgaagccacagcaatgaccgcatggggagactggcatacaccgaaggtaacttttacactggataagacaaagagcgtaaaacttcgtgtatgtgtagaacatgaggatggcggatggggagcagtggatgtgctgtatctgcataaggatgcatcatcttcggaaggaaaggatgatacaaatacttccggcagctcatcctccgatagctcatcctccggcagcgctgcaaccgtcactccatctgatgatacaaagaaggatgacaagccagagcagacaaccgaatcaaagaacgtaacggcaacgactgcttccggggagaaagcagaagtaacggttaccgtgacaaaagatacggctggaaaagtaacggaagcaagtgcagaagtgacaggtaccaaggcagagatttctgcagatatggtgagcaggatcgtggaaactgccggaacagaccatgtggcaattactgcaaatgttaccgataaagaaggaaatatcagatatacagtaactgcagatgcaaaagacttaaccgcaggtaaaaaactgagtgtcgttgttgtggataagaaaaccggagcgtataaactggtgaatgcaaagacgtataccgttggaaaagatggcacattacatgtgaatcttgccgcaggttcggattatcggatgctttctgcagcagaaataaaaaatgtggaaaaagcggttttaaaaacggttgccgtaaaaaagacgacagcttccatcaaagagggaaagaatacaaagatacagttaagcagtaagcttgatctggataatgtaaaaaagattacatatacatctggtaaaaagtctgttgcagcagtagataaaaacggaaagattacagcaaagaagaagggaaccgtcacgatcaaagcaaaagtaacactgaagaacggaaagacaaagacagtttccatgaaaattaaagtaaaataacattgtgaggacagtggttctgtgataaaataaaaaaaagaaattgtattctttgagacttatccgggtatcttaaaggataagacaggtgaaaaggatttggggattaattacaaaaggagatggaatcatgtcagcaacggggttatttatttttctgattgcgattatcgggattgcggtacttggggcattgatcgcagtgattgcagcagtatccggggcatctgcagctatttcggatgaagaggatggactggaggagaacgcataaagcagtcagaaaataacggacagagtacaggaaagaaagacgttcggaaacggatgtcttttttttgtttctaaaaagaaaataaagctttcggaaatcctcttgtaaaaaagaaccgattatcggtataatgaaaaaaaacaggcgctgggaactgtgttccacttccaatgcgtctgctttattcagcagaagaaaaatttacaggaggaaaacatgatttcaaagtacagtgtgaaacgtccttataccgtgcttgtggcagttgtgctggtcatcgtgctcggtgcggtctcgttgtcaaaaatgacgacagatctgcttccggatatgagttttcagtatgcgctggttgtcacaaccgatatgggagcaagtccggaacaggtggaaagtgatgtgacagcgccgattgaatcagcgatggcaacaacgtccaacattaaaaatatcagttctgtttcctataacagttattccgtcgtaacactggaatatgagcagaatgcaaatatggattcggtggtgatcgaaatccagcagagtcttgaccaggtatccgggcaatgggatgattccatcggaacacctatgattatgaaagtcaatccggacatgatgccggtgctggctgcagcggtggataaggatggcatggatgcgaacgcactttccgattatgtgaagaatgatcttgcgccggcacttgaaagtctggaaggagtggcttctgtcactacgaccgggcagctggaagaaagcgtagatgtaacactcgatcaggacaagatagacgcattaaataaaaagattcagaagaagatcgatgaacagtttgaaaagtcccagaaaaaaattgatgcggggaaaaagaaagtagagagtggaaagtcttccatcagtcagggatcggagcagttaaacagcgcgattaatcagacgatgaatcagcagaagaagctctacaagacggaacaggatctgaaaaaacaactcgcagagttaaaaaaacagaaagcttctttggaacagatccagacaggcatccagacctttatgaagtcggatgcctacaccggaatcgtgacggtattaaaagataacccacagcttgcagagagcagtgagatgcaggcacagatcaaacaggttaatgcggttgtgaaaaagcagttttcggcgttgtcctcgcttggaatcacagtaaatacctatgaggatctcccggcggcatccgcagaagtgggaaaactcctgaccaaagtcaatacaggaatgaaaaccattgaacgtgcacagcagaaggtagagagcggaaaagtcagcctggcctcggctttggatacgttaaatgccaatgcatccatgacggcacttcaggtcagtgcttcttctaccgaactggccaatgcagcctcctccttggagagcgcacagagtaaactggatgaagccaaagatacggcacatgattccgcagatctgaataaagtgctgagcaaggataccatcacaagcctgcttgccgcgcagaattttgatatgccggcgggatatgccatggatggggatactgagtatctggtacgtgtgggagatgccgtgcaggatgtcagcgaattaaaagacctgccgcttgtggatatgggaattgatggaattgatacaatccgcctttcggatgtggcagaaatcaaagtgacggataattccgacgagacgtatgcggtgattaatggcaatccgggcattatgctttcgatggaaaaacagaccggatattctaccggagaagttacgaatcgtattctggataaattcaaagcgttagaaaaagaagattccaagctccacctgaatgtattgatgaatcagggcgtatacattgacatgattgtaaactctgtaatgcagaatatgatctggggggcaatccttgctattttggtattgctgctgttcctgaaagatatcaaaccgacaatcgtgattgcatgttccataccgctttccgttgtcgctgcaatcgtgctgatgtactttaccggaattaccttaaatattatttccatgtccggactgatgcttggtattggtatgcttgtggacaactcaattgttgtcatcgaaaatatttatcgtctgcgcggagaaggctattccatccggaaagcagcggtagaaggatcaaaacaggtgacgggtgcgattattgcgtcaacgcttaccacgatcagcgtctatgcgccgattatttttacagagggaattacccggcagttgtttgtggatcttgcccttacgattgcatataccctggtagcgagtctggtcgtggcattgacgtttgtcccggcgatggcttctgttacactcagaaaaacaaaagatatccgtcatccgtggttcgatgccgtccgggaatggtatggcagagtgctggagtggtgtctgcgtttcaaaccactggtactgattattgcggtggttcttctgatcggaagtgcagcactgtcactttcaaaaggcttaaactttatggatatggatatggagacaaatcagctttccgtcacgatttctgcaaaagagggtgagaaactgacctttgaggaattaacacaggcatcggatgatgtgattcagagaatctcaaaaatcaaaggaatcaagacggtcggagcgatggctggtggagattccacgatgaatctgatgggtggaggaaatgacagcgtcagcatgtatatcctgctggatgaggactccaaagtcaaagcatcggatgtggaagaaaaaattgtcagcaggacgaaagatctggactgcaaagtagaaaccaacagttcttccatggattacagcagttatttcggcagcggtctttccgtcagaattaaaggaaatgatattgatacgctgcagaagcttgccaaagaagtggcagatgtgatgaagcagacaaagggaaccgtggatgtggacgatggtctggaagatatggaaccacagcttaccatttccgtggataaagaaaaagctgcggaatacggatacacggttgcacaggtatatcagcttgtcagtgcgaagatggcagacagcaagagcgcaaccacgatttccacagacatcaaagattataaagtctatgtgcagacacaggaacagacggatacgaaactggacgatatcagacagatgacatttacccacacagacaaagacggaaaagaaaaagagattcctcttacgaaaatctgtgagatgaaagatacgacaacactcagcaccatgaaacgggatgcacagacacgttatattacggtatcctgtggtgtggatgaagatcacaatgtcacactgcttggcaataaaattcaaaagagtatggataagctgaatgtgccggaaggctatcatatcgaaatgaccggagaggacgagacaatcagtgattccatgagccagctggttctgatgatgatactggcagttatctttatttatctgatcatggtggtacagttccagtcactggtttctccgtttatcattatgttctcgattccgcttgccttcaccggaggatttattgctctgcttctgacagggcaggaagtcaatgtccttgcaatgcttggatttatcatgctggcaggtcttattgtaaacaacggtattgtactgattgattatatcaatcaggcaagaaaagcgggtgtttctaagcatgaggcgattatttcatccggaaagacccgtgttcgtccgattctgatgacggtactgaccacagttcttgcaatgctgactacggctcttggaatcggtgacggttccgacatgatgcgtccgatggcaatcacactgattggaggactggtttatggtaccgttctgacgctgattgtcattccatgtatctacgatatgttccatcgggaaaagaacatggtagaagaggaattatagtgaatttcacagaaatcttcttgacaaaaaagagagccgcaagtaagattaaattatgtataaaaaagtgatgatggagaggagtacacatggaattcctgaaagagaaggatattcattgaagtggagcattggcagagttttcgtgcagaatgttcctgcaatggctgtaagatatccacaggatgcagtgtggaaggtagctctggaactggaatgttgaatgtggtatattgccctgtaggcattcccggatcgtccccgttaaaggacatgatgagtattacaaaggtggtaccgcgagagttttcgccctttgtgcagaaaaagaaaaggctttctgtacagagggcgtttcatttatattaaggaggaacacatgagcaaagaattaagtaaaacatacgatccgaaagatatagaggatcgtctctataagaagtgggaggacaatgggtattttcatgcagaagtagaccgcagcaagaaaccgtttaccattgtgatgccaccgccaaatattaccggtcagcttcacatgggacatgcactggataataccatgcaggatatcctgatccgctacaagagaatgcagggatacaatgcactgtggcagccgggtacggatcacgcatccatcgctacagaggtaaaggtgattcagagtttaaaagagcagggcatcaataaggcggacctgacccgtgaagagttcctggataagtgctgggagtggagaaaagaatacggcggacgtattgtaaagcagctgcgcaaacttggttcttccgcagactggcagcgtgagcgctttacgatggatgaaggatgttcccatgcggtacaggaagtattcaccaagttatataagaagggctggatttataaaggttcccgtattgtcaactggtgtccggtatgtaagacttccatttccgatgcggaagttgagcatgaagagcaggatggatttttctggcatatcaattatccggttgttggagaggaaggccgcttcgtagagattgccaccacacgtccggagacactgtttggtgatactgcggtggcagtaaacccggacgatgagcgttataaagatattgtcggaaagactttaaagcttccgatgacggaccgcgaaataccggtgatcgcagatgcttatgtagacaaggaatttggaaccggatgcgtaaagatcactccggcacatgacccgaacgattttgaggttggaaagcgtcataatctggaagaaattgttgtcatcaacgacgatgcaacgatgaatgaaaaagccggaaaatatgccggaatggaccgctacgagtgccggaaagcactggtggatgatcttaagaaagagggacttctggtaaaagttgttccacattcccacaatgtcggtgtgcatgaccgctgtcatacaacggttgagccgatgatcaagcagcagtggtttgtaaagatggatgagatgatcaagccggctgtggaaggtgtgaagaacggagatatcaaacttcttccaaagcgtatggacaagacctactttaactggaccgacaacatccgtgactggtgtatcagccgtcagctgtggtggggacaccgcattccggcatggtactgcgatgactgtggcgagatggtagtatccatcgaaaatcctggcaagtgtccgaagtgcggatgtacacatatgacacaggatccggatacgcttgatacctggttctcttctgcactgtggccattctctacgttaggctggccggaaaagaccgaggatctggattatttctatccgaacgatgtgctggtaaccggatacgatattattttcttctgggttatccgtatgattttctccggatatgagcagatgggtaaggcaccgttccataccgtactgttccacggactggtacgtgactcccagggacgcaagatgagtaaatcactgggcaatggtattgatccactggaagtcattgacaagtatggcgcagatgcacttcgtctgacactgattaccggaaatgcaccgggaaatgacatgcggttctactgggagcgtgtggaggcatcccgtaacttcgccaataaagtatggaatgcatcccgttttatcatgatgaatctggatggatttgaactccatacgccgtcaaaggatgagttacatgcagcagacaagtggattctttccaaggtgaatacccttgcaaaagatgccacagaaaatatggataaatttgaactcggaattgccgtacagaaagtatacgattttatctgggatgagttctgtgactggtacattgagatcgcaaaagtccgtacctataaaaaggatgaagatccggtatctgccaatgcggcactgtggaccttaaagaccgtactgaccgaggcattgaaactgttacatccgtatatgccatttatcacggaagaaatcttctgtacattacagtcagaggaagagacgattatgctctccaagtggccggagtacaaagaagagtggaacttcccggcagaggaagcagccattgagcactgtaaggatctcgttaagggaatccgtaatgtccgcacagaaatggatgttccgccatcaagaaaggcaaagctttatattacatctgaggatgcagggcttcgcactgtttttgaagaaaataaggaagtatatgtaaatcttgcttctaccagcgagattatagtacaggcagacaaaaacggtatcagtgaggatgcggtttccgttgtgattccgggagcagttctttatctgccgctggaggatctggtagattttgaaaaagaaaaagagcgtttgcataaagaaaaagataagctgacgaaggaacttgcacgttctaagggcatgctttccaatgaaaaattcttaaataacgcaaaaccggaaaaggtacaggaagagaaagacaagctggcaaagtatgagcagatgatggctcaggtagaagcgcggctggcacaaatgaaataaatggtttcggatttctatagcagagaggggaaaatgccatggaagatatttcaatgagaggtgcggttgtccggatttcacaggatagtatggaagcatatttgacattgcagccgccggaggccggagagggatacacattatcagagctggtgcggtatatccgcacccagcgggtaaccaatggaattgacgaagcggcgatccaggagatgatcgatggcggagtgtacatgagagatgtatgtattgcaaaaggacagccaccggtcaatgcagaaaacggccgctatgaacttcatttcaatccggatgtggatggaaaaccaaaggtcaaggaggatggttccatagattactggagcatccgtacagtggagatggtaaaagaaggtcagacaattgccacctactatccaccaaccgaggcggtaaacgggatgaatgtttcgggaaagccgatactggcagtccgtggcaagccattgcagccactccgcggaaaaggatttcactgtacagaagacggaagtacttatattgcagacctgtctggaaagattgaaatgtcaaacggaaagatccggatatccgcagtttatgaaattcccggtgatgtgggaatcggtacaggaaatgtggaatatcacggagatgttgtaatccacggtggaatcaaaccgggggcaaaggtaagtacgagtggaagtctcacggtagacggtatctgcgagaactgtgtgattgaagcgggaaaagatattgtcctgcgaagcggtgttctcggtggaaacaagaccagtattcgtgcaggtgggaatatccacgcaaaatttttcgaatactgtaaggtgaaagccgatggctttattgaagtgacttatgcattagacagtcatatgatcagttttgatcatatttatgtaaccggaaaaaagggaagtatcattggcggatatgcctacgcaatcagtggaatggatgtgaatgtaatcggaaattccacggaagtaaagacacaggtgcatgtcggagtcagtgcgcagatgcggcaggaactgtcggatctgcagaaatccattgaagaaaatggggaagtgatcaagaagattaccaccgggctgaaacagtttgaactggtggctgcgcaaaaaggaattgatgtatcgaaagatccgcgcagaactgagcttcttcgtgccaaaatgaaaacgcaggcagatattgctgaaagccaaaaagcggtagatcgtctggaagaactggtcaaacgcggggaaaatgcaaagatcagtgtcgtacgcaaagtgtattccggatgtgttgtaaccattgaccagcagacgcttaccgtaaaagaactgcaggaatccgtttgtttccagaagaaaaaagaaggggttgtgatgatctctctcaagtaaacagatgcagttcctgtaatatttccgagaaataatgcgaataaatttacttgcatatccaatgcattatattataattaagatacatgggaacgcagaacctgtatatcgcaaaaaggagcaggagaaatgattaattttgaaaaagagctgaagaattttcagccgagtctggaagtagaagaagccgaggctgcaatttataaccatgatctgacagatgtaacggatattattaccgaaatattgcgtgatgtacgtcagaatggtcagcagttaggacagtaatgaaaaagaggaagaaatgatttgttataaatgtggacaggaggttggaaatgcaaagcgctgcccgaattgcggggcagatctttccgtatttttgaaagtgcgtcacatttccaacgcatattataatctggggctggaacaggcgggcgtgagaaatctttccggagcgattgtcagcctgaaaaacagtctgaagtttaataaatataatattgatgcacgaaatcttctgggattgatttattgcgagacaggagaagtggtagatgccttaagtgaatgggtgatcagccgcagttatcagccgaaggacaatcttgccagtcattatcttgatgagatccagcaggaccggggaagattggattccgtaaatcagacgattaaaaaatataaccaggcattgcactattgcaagcaggacagtcgggatctggcaattatccagttgaaaaaggtactttcgctgaatccgaagcttgtcaaggcacatcagctgctggcgcttctttatctgcaggacaataagctggaactggcaaaaaaaactttgcgcaatgcgggaaagattgatacaaataatacaaccaccctgcgttatctgcgcgaagtgaatgcaagactgaaggaaaaaagtccttccaaaaagccgaaggatgatgatctgatttcttatcaaagtggaaatgagaccattatcatgccgaagcggtttaaggaatcttcgattggggcaacattggtatatatcgtgatcggactgattgtgggtactgcgattaccgcgtttctgatcgtgccgagcgtccgcaacaaggcaaaagaagaggcacagagaaaactggttgaggcgagtgataccatttccacgaatggacagacaatcaaagatctggaaggacaggtggaggatctgaaaaatcagctggaggagcagacgaccaacaacgaaaaggtcaaggttaagatatccacttatgaaaatctcctacaggcatgtgtttcctattatggatcaaaggatgtgacgactgcgggagagacgctggacaaagtaaagacgaagtatctgtccgataaagccaaaaccatatatgatgatatccatggggaggtacaggataagtatctgaatcagctttacaaggaaggctatagtttgtactcccgtggaaagtataaggacgccatcgatacattaaaacagattacggatgagcaggaagatttccaggacggatcagctgcctattatctggcacagtcctaccggaaaaacggggacctgaaatctgcaaaaccgtattatcagtatgtaattgaaaattatccggatacggagcgggcgagaacgtcacagaattatgtagacgcacaggaataaaaaggaacacattgcattacaaaagacactacagtacaggttactgtcggtgtctttttttgcttatttataaagaagtaagggaaaggaagaggttttatatggaagcagcatatcgaaaggaagcggactgcatgattgtgccgatgccgcgggaggtggatcatcatgtggcaggcaatatgagcagggaaatagatctgctggcggaaagctggcatgttcacaggattgtatttgattttgcggggactgattttatggacagttccggaatcggtatattaataggaagaaaaaagacgatggacatgcatgcaggaaaagtgacagcggtaaatctgggagaacgggtgtataaaatatttgaaaaatccgggttgtttcagattatttcattggaagaggaggaaaaataaaatggtgcaggaaaatcatatgcaggttcattttgatgcaaaatccgtaaatgagggattggcacgcatggttgtgaccgcatttatgacaaatatgaatccgacgctggagcagattgcagatgtaaagacagcagtgagtgaggctgtgacaaatgccattatccatggatacgaagatgaaacgaaacaggtggaactgacctgtgaccaaaatggtcagcaattggtggtaacggtggaagatcacggagttggaattgaagatcttgaacaggcattgcagcctttttttactacaaaaccggaattggaacgttccggtatgggcttttcctttatggaggcatttatggatcggattgaggtacggtcaaaaaaaggagaaggaacacgtgtggttatgtggaaatacatagaaagggaacgtgagcagtaagatatcggcaaaagaggaaaatggacgacagaacatccagagggcgcagcagggagaccggaagatcaggcagcagatgataaccgagaatatggggctggtttatatggtggcgaaacgatttgcaaaccggggaaccgatttgcaggatctgacacagatcggagtgattggtctgatcaaggcgatcgaccggtttgacacttcgctatcctactctttttctacctatgcggttccgcttattatgggggaaatccggagatttttacgggatgacggtatgattcatacgagtcgccagatgaaagaacatgcaagaaaaatagcaattgtcagagaacagatgaaaaagacacaaaataaggagccgacattgcaggaactggcggaaaagacaggaattgccattgaagatctggtggtggcaatggaagcaggaagagaggtggattctttttcacgaccggtgacggaaaatgacggaaaagtgctgactttggaagaaaagctggaggataatcaccggtttgaaactccgcttctgaatcatattgcattgaaacaggcgatcgaccagctgccggaggaagaagcacagctgataaaatttcgctatatggacaatctttcccaggcagaaacagcaaagcgcatggggaaaaatcaggtatccgtatcgcgcagtgagcggaagatattggaaaaacttcgcagaaaaatgttgtagctaccacttacaggtacagggaaaatctggtataatttgcacgtaaaagatcacaaaagggggaaattaacatgggagaatatttgcaggaagccgtgttgccggtgcagtacgacaattatgtgtttgatctgtacgggacactggtggatatccacacagaggaagattttccaaaactgtgggagaaactggcattgttttttggatattacggggccatttatgaaccgaaggaattgcagaagcgctatgcggcacttgtcagcgactgtgagcgcgcgttgaaaaagacgctggaagaggacaggcattatacgcatggggcatctccagagattgagatcggggaagtgtttgaaaaactgtatcaggaaaaagggatcgtggccgataagacccttgccatacatactggacagtttttccgtgcgctgtctaccgattatgtccgtttgtatccggggacacagcagatgcttgccagtctgaaaaaaatggacaaaaaagtgtatctgttatcgaatgcccagcgcatttttaccgcatatgaaatgaatgttttaggcattacaaaatattttgatgatattttgatttcttcggattatcacacgaaaaaaccggacaaacgtttctttcatatattgttggagcggcataagctggatgtgtctcattccctgtatatcgggaatgacagccgttgtgatgtcggtggtgcaaaaggtgtcggaatgccggtgttttatgtaaattccaatatttccccgaaaaatgatgacggaaaagaggcagactatattgtagagaatttttgtgcctggaaggaggtaaccatatgagtaaattaaaaccaggaaaagtagcaattatcggatgtggatttgtcggttctgcatctgcattcgccctgatgcagagcggattatttaccgagatggtgcttttggatgcaaaccatcagaaagcagaaggggaagccgaagatatcgtacacggaattccgtttggaagaccgatgcagatttatgccggagattatgatgatattgcggatgcagccattattgtaattacagcaggtgcaaatcagaagccggacgaaacgcggctggatctggtaaacaaaaacattgcaattttccagtcgattattccggaaattacaaaaagagattttgaaggaattcttctgattgttgcaaatccggtagatattctgacttacacggcgcagaaactgtccggttatccggaaaaccgggtaattggttccggaactgtgctggattctgccagactgaagtatcatctgggacagcatctgggagtggacagcagaagtgtacatgcttttatcgtgggagaacacggggacagtgagattgcggcatggagcagtgcgaatatatccggaataccgctggacaatttctgtgagatgcgggggcactataatcatatggaagcaacggaacgtatcgccgcggaggtaaaacagagtgcctatgagattatttccaaaaaaggagccacatattatggaattgccatgtcagttaagcgcatctgcgaagcaatcataagagatgaaaaatccattctgccgatttcgaccatgctgcacggagagtatggaatctcagacgtggtgttaagtctgccgtgtatcgttggccgcgatggctatgaaaccaaggttccaatcgatctggatcaggaggaagtttccaaactgcatgagtctgcaaatacgctgaaagaagttctttcggagttctttgccgaaaattagtttttttgtgcttgcattttttggaagaaaggggtagaataccacagtgggtagagcaaaggcgtcgtaatgtatgtacgacgccttttttatatataaagtgtatgaccatatgagaaatatacaaatatgacatatagtttatataaaaaaaacgttttactttttacaatatgacaaatataatagcttttgattcaaaagttaagaaaggaagtgagactgttggatgcgttggtaaagaatctgatggaggagctgaattgcgataccgtctttacaatcccgctgtttggtggcattccgatctatgaatcggttgttgttacatggatcatcatggcggtcattcttcttttgtgtctggttcttgtgagagggcttaaagttgagaatccaagccgtaagcaggtagtacttgaacttgctgtttcaaaactgtatggattctttgaggacacgataggggaaaacggtaaagcgtacattccgtacctggcagcagttgccatctacataggaattgccaacctcatcggcctattaggcttcaagccgccgaccaaagacatgaatgtcacggtagcgcttgcattgatgagtatcatcttaattgaagcagcaggagtgagaaagaaaggaaccaaaggctggttaaagagctttgcggaaccaatgcctgtagttcttccaattaacattcttgagatattcatcaaaccattatcactttgtatgcgattgtttggaaacgtacttggttccttcgttattatggagttactgaagatggtggttccacccgtacttccagcaatattcagttgttactttgatatttttgacggactgattcaggcatacgtatttgtgttccttacaggcttgttcatcaaggaagcaacggagtaacacactaattaactgagaaaagaaaaggagaaaacattatgtcagcatcattatttgtagcaatcggagcaggagtagcagtattaacaggtatcggagcaggtcttggaatcggtaaggcaacaggttctgcagtagacgctatcgcaagacagccggaagcagagggtaagatttccaaagcattacttcttggttgtgcacttgccgaggcaaccgctatttacggtttcgttattgcattacttatcattcttttcttaaaataatgattacctgcgtaattattacattaagaaaggagcagtaaactatgctgagtttaaatccatgggatatcttgtggacgatcgtaaatctgcttgttttatatgcaatctttcgtaagtttttgtttcagccggtcatgaatatcattcatgagagagaggacatgatcaacaaacagttcgaggatgcccaaaaacagcaggacgatgcagcgcagatgaagagtgagtatgagaaccagttaaagggtgccagagaaaaggcagatcagatcattctcgatgcgaagacgcgtgcacaggaagaatataacaataaaatggaagcaaccagagccgaagcagatcatatgcttgagaaagcaaagagtgatattgcaaatgagcaggaaaaggcaacaagagatgctcaggcaaagatcgcagagcttgctttgctggctgctaagaagattatgaagacgggtgaagcacatgacgcaggcagcagtaaatagtgccaaggtactataccggctgtctgtcagcagagaggatgtcgagaaagcggaaaaacttttctttatgacaccgcaactgcagaaagttctgacgagcccggtcgtaccggcagcaaaaaagtatgaaattatcgatcaggtatttgcactggaaacgacagaagatgtgctggtccggtacatgaagatcatgtgcaggattggtaacatgaccgagatgcaggatattttccaatattattataaatactgggatcagatgcatcatgtggttcgtgcggacctgatttatgccgagactccgagcaaagaagaggaggccgaggcgaaaaaaattctggataaaaactatccggatagtgagattaccctgacgcagagtgtggatgagtcgctgattggtggctatgtcgttaaggttggatacaaagagtttgaccatagttatgaaggacgtctgcgtcagttagaaagaaaacttacagggaggtgacccctttgggcgctattagtgcaacagatattatctccattattcagggtgagatcgaaaatatcaactgggatgaacaaagccgtgagacaggtgaggtcatctgggtcggtgatggaatcgttaccgtatacggaattgatcatgcaatgtatggcgagatcgtagcctttgaaaacggagtcaaaggaatggttcaggatgtcagacagaatgaaatcggtattattctttttggtcgtgataccggaatcaaagaaggaaccaaagtggttcgtaccaagaaaaaagccggtattccggtcggtgatgcgtttgtaggaagagtaatcaatgcactcggtgagccgattgacggaaacggtgatgtaaaagaggatgattatcgtccgatcgagcaggaagctcctggtatcatcgacagacaaagcgtagacacaccaatggagaccggtattctttccattgattccatgttcccaatcggacgtggacagcgtgagttgatcattggtgaccgtcagaccggtaagacatccattgcaacagataccattatcaaccagagaggcaaagatgtaatctgtatttacgttgccattggtcagaaggcatctaccgttgcaaagattgtaaatacattaaagaaacatgatgccatggattattccatcgtagtatcttctacagccagtgatccggcatctttacagtacatagctccatatgcaggaactgccatggcagaatattttatgcacaagggcaaggatgttctcattgtatatgatgatctgtccaagcatgcggttgcataccgtgcaatttcccttctgcttgagcgttccccgggacgtgaggcttatcctggtgatgtattctacttacactccagactgcttgagcgttccagtcatctgagtgacaagttaggtggcggttccatcaccgcactgccgattattgaaacacaggccggtgatgtttccgcatatattcctaccaacgttatttccattaccgatggtcagattttcctcgagagcaacctgttcaacgcaggtatgagaccagccgtaaacgtaggactttccgtatcccgagtcggtggtgcagcccagacaaaggcaatgaagaaagcttccggaagtatccgtatcgatctggcacagtaccgtgagatggaagtgttcacacagtttgcttctgatctggatgatgcaacaaaagcacagctgcagcacggaaaagctctgatggagctgttgaagcagccgctgagtcatccgctttccatgcatgagcaggtattaaccctgtgcatggcaacggacggtgtattcgataagatacctaccagacaggtaaaacagtatcagaaagatattctggatttcatggatctgaaacatccggagatcggaaaagaaattgagcagacaaaagctttatccgatgaactgagacagaaaatcaaagatgctgcagcagagtttgcagcagaacagtaagcaggtgttacgatggcaaatgcaaaagaaattcaggatcgaatgaagagcatcaatgatacattaaagattacaaatgcaatgtacatgatttcttcttcgaaattaaagaaatctaaaaaaatgctgacggacacagaaccgtatttctttaccctgcaatctgagatgagccgtattctgcggcatttgccggatctggacagtatttattttaggtccacagatgagattccggaagaagaaaaacggatcgcttatatggtagttacggcagataagggactggcaggatcttacaaccacaatattttaaagattgcggaagaagaacttgcaaaacacccgaaacgtcagctgtatgtgcttggtgaagtcggaagacattattttgaagaacgtggaattgagatcaacaaacagttccattatacgattcagaatccgacattgaaccgtgcacgaaatatctctgaggaacttctcgaaggttaccgtcagggagattttgatgaaatctatatcatttatacctcaatggtcaatgcgatgcaggaagaagcagaaatcctgcagctgcttccactgaaaaaagcagatttccacaacgtggagattccgctggatgtcagacgtgaggagcttgccctgcgtccatcggcagatgcagtgatgaatcgtattgttccggactatgtggtaggatttgtttatggtgcgctggtagaatccttctcctgcgagcagaatgcccgtatgatggcgatggaggcagcaaccaacagcgcaaaggatatgcttcatgagttagatattatgtataaccgtgcccgacaggcagcgattacccaggagattacagaggtaattgcgggagcaaaatcccagaagcgcaagaaaaagagataatggaggcctaggatgaaaacaggaaaaatcatacaggttatgggacctgttgtggacgttgaatttgaagacgaagaattgcctgcaatcagagacgctctggaagtacaaaatggtgacaaaaaatgtatcatggaggttgcacagcatatcggtaataatacggtacgttgtattatgcttgcagccagtgaaggacttcaccgtgatatggaagtcatcgcgaccggaagcggtatcaagacacccgttggtgaggcaacactgggacgtctgttcaacgtattaggagaaacaattgatgacggaaagccgatcgaggatgctccaaagtgggtaatccacagagagccgccagcatttgaagatcagaaccctgcagaggaaatcttagagacaggtattaaggttattgacttactggccccatatgcaaagggtggtaagattggtctgttcggtggcgccggtgtaggtaaaaccgtattgatccaggagctgatcagtaatattgcaacagagcatggtggatattccattttcaccggtgtcggagagcgttcccgtgaaggaaatgatctgtggactgaaatgggcgaatccggtgtacttgaaaaaacagccttagtgtttggacagatgaatgagccgccaggggctcgtatgcgtgtcgctgagaccggacttaccatggctgagtatttccgtgatgagcagcataaaaatgtgcttctcttcattgataacattttccgtttcacacaggccggatcagaggtatccgcactgcttggacgtatgccgtcagccgtaggttatcagccgacactggctacggagatgggtgagctgcaggagcgaatcgcttccacaaagaacggatctattacttccgtacaggctgtatatgtaccagccgatgacttgacagacccggcaccagctacgacattcgcacatctggatgctacaaccgtactttccagaaagattgttgagcagggtatttatccggctgtagatcctctggagtcttcttcccgtatccttgagccggatatcgtaggcgaggagcattacgaggttgcacgtaaagtgcaggagatccttcagaagtacaaggaattgcaggacatcatcgcaattcttggtatggaagaactggcagacgaagataaagttttggtataccgtgcaagaaagattcagaagttcctgtcacagccgttccatgtagcagagaacttcaccggtatcaagggtgtatatgttccgttgaaagaaacaattcgtggctttaaagcaattttagatggtgagatggatgaatatccggagaatgcattctttaatgcaggaactatcgaggatgttaagaagaaagctgagcagatggagcagaacgcatagcataaagaacggagatcattatggcaggcaatacattctatttaaaaattatatctgcaaaccgtgtgttcttttccggaagatgccgttctctgatcgttccggaatatgatgggcagaaagaaattctggctcatcatgaggatatggtcattgccattgatgagggcgagatgaggtttcagccggaaggcacggataactgggaatatgcagttgtcggaatgggatttgtcgagatcgtcaataaccgtgtgacacttctcgtggagactgcagagcgtccggaggaaatcgatgtggcaagagcccgcgaagcaaaagagcgtgcagaggagcagatgcgccagaagcagagtatccgtgagtattaccactcaagagcttctctttcccgtgcgatggcacgtctgaaaggaaccagcggaagaaaataaaacaataaaaaaggatgcacgttttgtgcatcctttttttatctgacattattcattcatggcaatcagtttcgcataccattgcagggaagaaacccatgcatgggaaacatccggaatttcgatgtttttaagcaccagctggcgggaaacttcctgccattctgccgattcgtattttacaataaagtgaagcacttctgccagggaaccggtgcgctctagaagggcggcgcggatcttgcccgatacacgtaccatggagagggcttcttccatagaacaatccagaataatatccagaatcgagaaaagaccggtcagaaacagttcctgggaacgcattgccatgccaaagaccggtgcaagattttctgcaaacttggcacgcagcagggaaaggcgcatcagttcattcggtttgtcagaacacagtttctcaatgacggttgtctgaatccagcgcgtcagatccttctgccccagcattgagacagcaacccgcacggaagtgatttcggaattaaaggagcgtgtatttgccagccgcagcagggagatgataagagccgtgtcctgactgataatatcagccgctttggtcaggtcaaaatcatcttcttcaatcagattcagaagggaaatgtaattgatcttcaggggcgatactttatgttcgccgcgtgtgaccggcatacggaaaaaggttccttcaaataaagaaattgtttctgcaggactgagttttccgaatgtttccatgtccggaatgttgctggcacagatacagatatccggatacagtttgcggaaatagaaagaagccttgacggcatctattttctggcagtcaatcagaatgtagtccatttgtgacagaatcggtgcgtagtcttcgtagcagtgaacaggaagattacgcattgcaaaatgatatccgaattcgcgcagttcgcggatgcggtctgtatacatggataccggaggaaatgtctggtcaatcaggagaatcggtgcatggtttgtatttttgcactcggactccagactgctgaaaatagagatattatttaaagatacaaaaatcggttttcctccggagagtgtggtggttccaagctcctgaatcagttccagcccgtctacataggcagctccgtcaaactgtctggaaccaagaaggcttgggttcataagaaagttattttttctggtaaacagagaataagcactaacggacatattccggtcaaaaaaaggaatgagtgtaagcatcataagcgtatctcctattctatcatgtaaatccctgatgtaagtttatctttggatttattatactatataatgcttaaagaaacaaatattttgtgcaatgtggtgaaaaaagaaacaaagcagttgacaaatgaaagaggatatgggtaaaatacaaaaagataataaacagggagtagtttgcatccggtgtgtccgggtgttgtgcaggccgtcatcacgttacaggaaagctggaaccgggctgtacacgaagaaacgagactttttattgcattattctggtgcaaaaaagtcccgtttctttttttgtaccacaacacagggagggcatgccatgaaaaaatactggaagtattccaaagagcagctaagagacgtattttctactacggagcagggattatccgaaatgcaggtgaaaaaaatccgggaaacatgtggggaaaatatactggaagagggaaaaagacccgggcttctgagggtgtttttgtcacagtttgcagatttactcattgtcattctgctgatcgccgcgctcatttccatgtgttccggaaatgtagagagtacgattgtaattgcagttgtcctggtgatgaatgcagttttgggaacggtgcagcaccagaaagcggaaaaatcactggacagtctgaaaaatctgtctgcaccgtgtgcaaaagtcatccgggaagggaaaaagaaagagatcccttcgcgggaactggttcctggagatcttgtggaactggaagctggcgacatggttgtggcagatggaaggattctggataattattccctgcaggtcaatgagagtgcgctgaccggagaatccaccaatgtagaaaagacacaaggcagtctgccggaggatctgccgctggcagaccgcagaaacatggtatattccggaagcctggtcacttatggacgcgcacaggttttagttacaggaacagggatgcataccgagatcggaaagattgccgggatgatgaatgatatccgggaccgtaagacaccattacaggtgagtctggatcagttcagcagaaagctggcagttctggttatgggaatttcagcagtggtattggggttatgtttataccgcaaaatgccgcttctggatgcattgatgtttgcggttgcacttgcggtagccgccattccggaagcactcagttcaatcgtgaccattgtgcaggcgatgggaacacagaagatggtaaaggaaaatgccatcgtcagaaagctgaaggcagtggagagccttgggtgtgtatcggtgatctgttcggataaaaccggaacgctgacacagaataagatgaccgtgcagaaagtttatgtggacgacagggaatatctgcccgaacagctttccatggaagagcagctgcacagatatctggtctacgatgcggtgcttagcaatgatgcaacattggagaacggaaaaggaatcggagatccgaccgaatatgccctgttggaaatgtttcgtaaaattccagcaccgaaagggggaatgatgggcgaaggcggttacagggaagaaatgcttcgaagctgtatgaaacgtctcgaagaggttccgtttgattctgagcggaaacggatgagcacaagatattacctgcacggggtcggaaccattctgaccaaaggagcaccggatgtattactggaacgctgtgaatttgtacggaaaagtaccggaattgttccacttgatccgacggaggcagaaaaaatcaaaaaaaagattgcggaattttccgggcagggactgcgtgtgctggcatttgcgtataaagagagtgaaggaccgctgaccatagaaagcgaagaaaatctgatctttctcgggctgattgccatgatggatccgccaagaccggaagccattcaggcggttgccgatgcaaagagagcaggaatccgcacggtcatgattacaggggatcacaaaattaccgcgcgtgcgattgcaaaacagcttggaatttatcaggaaggggatctggctgtgaccggaagggagttagatgccatgagtgagaaggaattgcaggaaaaattggaaaaaatctgtgtatatgccagagtttcgccggaacataagataagaattgtaaaggcatggcagaaaaaaggacggattgtttccatgacgggggatggtgtcaacgatgcaccggcattaaaatgcgcagatatcggagtggcaatggggattacaggaacagaagtggcaaaagatgcggcagacatgattcttttagatgataattttgcgaccatcattcaggcggtggtgaatggaagaaatgtataccggaatataaagaatgctattttgtttttgctgtccggcaatatggcagcgattctggcggtactgtatacttcacttgcaggacttccagttccgtttgcaccggtgcatctgctttttatcaatttgctgacggattcgcttccggcaattgcgattggcatggagccggcagatgcagcacttttagaggaaaaaccaagggatccttctgccggaatactgaccggttcgtttctggggaaaattgtggcagagggagcgttgattgcgtgtccggtcatgacttcttattatatagggctgcagcagagtaccgcgcttgccgcaacgatggcttttgcaacgctgacactggcacgcctgtttcatgggtttaactgccggagcaaaaagtccatggcgcgggttggacttgggtccaacaagtacagcatgggagcatttttgggtggatgtattcttttgggactggtactttgcgttccggtttttgagaggctgttcgatgtggcggaaatgggagtgctgatgtatgggtatattctgctgctggcatttgtgccgacattggtgattcagatggtaaaaatggtcagggaaaaaatgcaggaaggtttgtaatttactcctctttactttagcatgataacatgataatatggtaaacatgtagtaaacagaagaattaataattaatggaggaacattatgaaaaagaaacttgcagtattgctggcagcagcgctgacacttggtatgactgcctgtggtgcatccaaaggagcaggagataccggaaagagcgaaaagggcatggtatatgcagtagaggcaggatctgccggagaagaagctgcaaaagaaaagggatttcagtacaattccgtttcgtcccaggcagatgccctgatggaagttgcttccggtacatccgatgcagcaatcattgaccttctgatggcaggtgccatgattggtgagggcaccagttatccgaatctgaagcatacagacgaacttacgaccgaggagtatggtgttggatgccggaaaggatcggatctggcttcttatatcaatcaggtgtttgctgactcttataaagacggaagcatggaaaaaattgccgaaacctacggtgttcaggaagcacttgtagagcagaaagatgccacctttgaacagtccccaaaagacagtgacgtggattatatcaagggaaaaggaacactggttgttggtgtaactgatttcgagccaatggattacaaggatgacagtggaaactggatcggttttgatgctgatatggcaaaactggttggtgaaaaacttggtgttgaggtgaatttcgttgagattgactgggataataaagtgatggagctggattccaaaaatatcgatgtggtatggaatggaatgacactgaccgatgaagtaacttcttccatggagtgtaccaatgcatactgcaacaatgcacaggttgttgttgtgccggagggaaaataaagatttatgttctggatagttacacagtcgttgctgtcaggtcttgcaacgacatttgaaatttttatactgactcttatttttgcactgccgctcggactgattttagcgttcgggctgctcagcaaatttacacctcttaagcgtctggtgcagatccttgtctggattatccgtggaaccccgctgatgcttcagcttatcattatcttttacgggccgggcctgtggctgcataagaccgtctggagcggaaatgaaaccggacgtatcacagcaacggttgtggcatttgtgatcaattatgcctgctatttttcggttattttccgcggtggaatcgagggtgtaccggcagggcagagagaggccggacaggtactcggcatgacaaagcatcagatcttctttaagatcacactgcttcagatgatcaagcgtgtcgtaccaccgatgtccaatgagatcattacactggtcaaggatacttccctggctcgtatcattgcggcatatgagctgacgtttgccggtgctgcgtttatgaagtcggacggactgacctggccactgttttacactggcgtattttatctgatttttatcggtattctgacgcttttgtttggttacattgagcgcaagctggattactttaagtaggaggaagacatggcaatcttagaggtatcacatatagaaaagcatttcggcaaaacgaatgtgttaaaggatgtcagcttttccatggaggaaggcacggcacttgccatcataggttcctccggatcgggaaagaccacacttttgcgatgtctgaattttttggagcgtccgaacagtggaaccattacggtaaacggcgagacgttgtttgacgcggcatctgcgggagcggaaaaagatgcggaacttcgcaaaaagcgtctgcattttggaatggtctttcagtcctttaatctgtttccgcagtataccgcattgcagaatgtaacactggcggagcagttactggcacaggaacggccggattttaaggctgataaaaagaaaattttagaggaaatcgatgcacacggaagacagcttttagagcggatgggacttgcagagcgcatggatcattatccgcatcagttgtccggtggacagcagcagcgtgtggcgattgcacgtgcacttgccttaaagccggatatcctctgctttgacgagccgacctctgcgcttgatccggagctcaccggagaagtgttaaaagtcatccgcacgcttgccgagcagaagacgacaatgatcattgtcacccatgagatggcatttgcccgtgatgtggcagaccagctgatctttatggacggcggtgtgattgtggaacagggagatccgcatcaggtgatcgacaatccgaaagaagagcgcacgaagcagttcttgacccggtatgcacaggggtaattcttaaaaaagaaaatatggaaaagccatcgaggttcgttacagaagacggatctgcggtggcttttttaattgaatgcagcaaaattgcagaatatcaggctgattttaggacttatcgcctattgtcatgaacttcataaatgtttacaataaaatggacagacgcattacaaaatgtgatcgatctggggtaaatatgaataaaaaggagaacattatgaagaagaaattaaccgcaatattattggcggcagcgatggctgtcacaggactgtttaccgcaatgacaccggaaaaggcaaacgctgcggagtgggaagcatgtgatatacctgtgatcaaagatgtatccgaatttgatgcagtctctgccatgtattcaaagacaattacggtgactaagaaagataaaaatattgagcagggatatggttcttttcagttaaaatctgattcctgggtaattttaaagaccacctcctctcttgtgacaagtcaggaagatgggcaccagacacatattgaagtattttcagatgcgtctgcatccaacaaagttctggaaaccggagacggatattgggaatatgacggtgatcagtatacaattttaaagaaaggtacctactattttcatacaaagtcatcctgtcagaattatgacacgtttacagggaacattaatgtagttgcagcagcaattccaacgagtaagctgattcagacaggcgttaagaaaaacagcaaaaaaacaagcgcaacggtttctttttccaatgtgcttggaacacatgtaagggctgtgcagtaccagaagggaagtattggaaaatcccacaatgaggataaaaaatactggaagcagtatattatgagtggaatgtacagtggggactatgatctggcaaagggaaagagtccaaagtttgtgacagaaaaaggagagaagtattcgtttaaggtaaagaaaaacggaaaatataccatctggatcagtgatgataagggaaacatttacacaaaggtggttaccgttaagggactgaaaaaataaaaatgtggcaaatagaaggcctccggcagttgccgggggtttttcttatggatgatggtattctggcattgggcagtaaagaattcatggaggaaaatttgtcctttacaaataataaataaaagcatatgatacttttataaaatactttatttaagaggaagattatgccggaaaaaagagaaaaacgcaatatagcaagaactgaaattataaattacatgttgaaccattccgttacatcaaaggcagaactggcaaaagaactggggcttagtatgcctacagttctgacaaatgtcaatgagctgattgcaaagggactgattgtagaaaatggagagtatgcatctaccgggggaagaaaagccaaaagcataggaattaacaaggaatattgcagggcaatgggacttgtaattaccgctaatcatctggaaatggtactcgtaaatctgggatatgaaatcgaacatctgaaacgtgtccgtttaaaattttcaccggatatcgattatagtgtaaaaattgccgggcaggtacaacagtttctgaaagaatgcaaaacggagaaagatattttagggattggaattgcaattcccggaattatcgatcagaatgagaagacagttctaaaatcgcatgctcttcaggtagaaaattacagtctgcgttttttggaacaggcattgggatttccggtttattttgagaatgatgctaattccgctatgcttgcggaagatacacaaaaatataacaatgcgatatacctctccttaaatcatactcttggaggggcattttgcattgatggaaaactgtttcgtggacagaaccagaaggcaggagagtttggacatatgatcctgattcccggaggggacagatgttattgtggaaagcaggggtgtgcagatgcttattgtgcggcaagtgtgctgactggggacggaaaaaattctctggaagtatttatggaacaattgaaacagggaaataaggaagctgaacaaaaatgggaaagatatctggatcatcttgctatcctgatatccaatcttcggatggcatacgatatggatattatacttgggggagatgtcggaggtgtactgacagagtatatgattccattgggacagagggtattgtcttacaatggatttgacagggatatttcttatctgaaaaattgttcttatgaaaaagaagcatcggcggttggtgcggcaaaacattttttgtatgaatatgtaaaagaatgctgttcgtaatgatgaaattaaaaaagttccttctttactggcgtgtatatgcggtaaagagggaacttttttgtttaaaaatttagaaaaattgtacaaaaagtaaaataaaaaattgtgcaactggtaaaaactctcaaaaactattgacaaaacggaggaatgggacaataatgtaattactttaataaaacattttataaaagataaaataaaagaagaacaaatataaaggaggaaacaattatgttacagcaggtaatgacaaatccaggagaaattacatttagagaggttccggttccagaagtcaaggatgaacaggtactggtaaaaatcagaaatataggtatctgtggttctgatatccatgtatatcatggaaagcatccgtttacgaaatatccggtgacacagggacatgaggtttccggagaaatcgcagaaatagggaaaaatgtttccgggtttcagatcggacagaaagttacgattgaaccacaggtttattgtggacactgctatccgtgtcgccatggaaaatataatctttgcgaggaattaaaggttatgggattccagaccacaggtacggcttctgaatattttgcagtagatgcatctaaggtaacaccgattccggaagatatgtcttatgaagaaggggcgatgatcgagcctcttgcagttgcagttcatggagtaaagcagatgggcgatgtaaaaggaatgaatatcacagtaatcggcgcaggtccaattggaaatcttgttgcacaaacagcaaaagggatgggagcagcaaaggttatgattaccgatgtcagtgatctgcgtttggaaaaagcaaaagaatgtggaattgatgtatgtgtcaacacgctgcacaaagattttggagaggctatggtagaggcatttggtccggataaggcagatgtgatctatgactgtgcaggaaataacattacgatgggtcaggcaatcaaatatgcaagaaaaggaagtgtgatcgtactggttgcagtatttgcaggaatggcagaggtggatctggcagtcgcaaatgatcacgaactcgatattaaaagtaccatgatgtaccggcatgacgattatgtagatggtatccgtcttgtcaatgagggaaaggtacatttgaaaccattaatttcaaaaacgtttgcatttaaagattatctgaaagcataccagtatattgatgataaccgtgagacaacgatgaaagtcatcatcaatgtgcaggaggattaaacagatgaaaaacgaatatggaattgtcggagtagcccacatagggctcccgacgaatgatttaaaaaagacaatcgaattttataaaagtcttggatttgaagtgattttagaaacctataatgaaaaggcaaaagaaaaggttgcgtttttgcagattcagaattactgtatcgaatcgtttgagaacggacaggcggtaatggcagacggggcatatcagcatgtcgcactggatgtgagagatattgaagaaatgtataaaaagatctgtgaaaatggatatgaagtcattacggatggaattgagcagcttccgttttgggataatggtgtaaagtttttcatgattaaaggaccgaatgaggagagaatcgagttttgccagaaactctgatgaagtaggaggaacgtatgggtagcgagaacagaagtggaaaagtgccgctgatcagcaaaattgcatatggttttggtgatgtgggatgtaatttcagttggatgtttgtcagcaattttttaatgattttttataccgatgtatttggaatcagtatggcagcagtgtctgcactgatgctgttttcccgattctgggatgccattaatgatccgattgtcgggggactgaccgacaagacaaagacaagatggggaagataccgtccatggcttttggtggcggcaccgattacggcggtgctccttgtaatgacattctgggcaagaccagactggaatcagactgcaaaaattgtatatatggtaatcacatattgtctccttgttttgggatatacctgtgtgaatattccatatggtacactctgtggagcaatgacacaggacattgatgagcgtgcaaaaatcaacacttcccgttccgttgcagcaatgattgcaatcggtgtgttaaatatcattaccgttcctttgattaacaaatttggaagcagcagtgcaaaaaccggatatctgacggtggcagttatttatggatgcatttttgcagcatgtcatttcttttgctttgcaaagacaaaagaggctgtgatcacaccggaaaaagaaaaaatttctataaaagtccagctaaaagcggtgcttcagaatcgtccgtatctgctggctctggtaggacagattttatttggttttactttatatggaagaaatgcggatgtcctgtattattttacttatgtagaaggaaatgcctcgtattataccacttattcgatgtgcatcattattccttccattattggagcagcctgctttcagccggtattccgtaaactgaacaataaaggaagaactgccagtgtatttgcacttttgacaggaatttcgatgctttccatgtttttctttaatgtaaaagaagctccggttatcttttatgcattgtctggaattacacagtttttcttttccggattcaataccgcaatttatgcaatcattccggattgtgtggagtacggtgagtggaaaaccggattgcgcaacgatggatttcaatatgcgtttatttcgcttggaaacaagattggaatggcaattggaacagcacttcttgccggattactcggaaaatacgggtatgtggcaaaccagacacaaaatgcagccgtactttccattatgaaacatgcatttacaaccattccgggggttctctggattgtgactgctgtggtattattcttttatcggctgaataaaaagcgttataatgaaattgtggaggaattaaagaatggaaaaagaggttgatattgtagcattgggtgaactgctgatcgattttaccgaggcaggatacggaaaagatggaatgaagctgtttgagcagaatcccggtggtgcaccggcgaatttgttgacggttgtaagccatatgggataccggacatcgtttattggaaaagtcggaaaagacatgcatggtgcatttttaaaaagaaccttacaaaatgaggggattgcagtggaccatctgatcgaagatgataagtattttactacacttgtgtttgtagaaattgatgaaaacggtgagcggaaattttcatttgcaagaaaaccgggcgcggatacacaacttcggaaagaagaactggatccgacgcttttgaaaaaaggtaaaatttttcatttcggatcgctttccctgacggatgaaccggcaaaaagtgcaactttagaagccgttcatatcgcaaaagacgcgggagcattgatttcttatgatccaaattaccgtgcatccttgtggagaaatgaacagactgcagtacaggaaatgaaagcagtgattccatttgcggatgtgatgaaggtatcggatgaagaaagtctcctgctgacgggaaaaaacagctatgaagaagctgcggaggagttgctttccatgggaccagagctgattgccattacacttggcagtgacggcgtacttgtggcaactacggatggaaaagaacagatcaggggatttgcaacagaggcggttgatacaacaggagccggagattcattctggggtggattcctgagccagtttttatccctgaacaaagcaattgatgagatggactggaatgatttgcgtgcctgtgcacggcagggaaatgcagtagcatgtctgtgtgtgcaaaagagaggtggaattcctgcgattccaaagaaacgagaagtaatggagtttttaaatcaacatatcaaaaaataaatttgatttccgtgcatagaaaccggtcaggtgaatacagacaggaaacgcaaaaagaagctgacacacgaaaagaaaattcgtgtgcagcttcttttttgctggttattagcatccaaaacacttacggatcagtgctgagaaatcgcagttggaaaaaaatctaaagcacatagttaagtacctccctgtttgtatttgtattagctaagtacaaatgcattgtaacaagtttgtaatatttctgcaataggagggtatttccagtttaggaaagttctagctttccggtatacagctgataataagttcctttctgcttaatcagatccgcatgatccccgcgttcaatgatctgtccatgatcaagcacaataattgcatcactgtttcggatcgtagacaggcggtgggcgataacaaaaaccgtgcgccctttcatcaggttatccatacctttttgtacaatgctctcggtacgggtatcaatgctggacgttgcctcatcgaggataagaaccggtggatctgccacggcagctcttgcaatggaaagcagctggcgctgtccctgggaaagttcttcgccgtcaccgcttaacatggtatcataaccgtttggcagcatccggatgaactggtctgcgtgcgcaagtctggcagcttcgtagatctgctcatcggttgcatcaagatttccgtaacggatattgtcgcggatggtcccggtaaacaggtgggtatcctgcaggacaataccgagggagcggcgcagatcatcttttttgatcttggtgatattgatgccgtcatagcggatttttccttcctgaatatcgtagaaacggttgatcaggttggtaattgttgtctttccggcaccggtagagccaacaaatgccagtttctgtcccggtttggcgaacagactgatatcctttaagatgaccttatccggattgtagccgaatgtaacatcttcaaaacggacatcgccggtcagaggggtgtaagatacacttccatctgcggaatgtggatgtttccatgcccacatgccggtacgttctttacattcgatgatgttgccatcggcatctctttttgcattgacaagggttacatagccttcgtctgtctccggtttttcgtcgatcagggcaaagattctctccgctccggcaagcgccataacgatggagttgaactgctgtgccacctgcataaaaggctgggtaaaactcttggtaaactgcaggtaggaagccatgacaccgagtgtgatgccacccacgccggcaacggagaggattccaccgagtacggctgtcagtacaaactgtaaatttccgatgtttccaatcaccggccccatcatatttgcatatttgtttgcctgtgaggcactgtcaaacagtgattcgttgagctggtcgaattcttccttggatttctgctcatggttgaacacttttaccacacgctggccattcatatgttcttccacaaatccagtcacatcggcaagggaaacctgttggcgcacaaagtattttccactgtttccaccgatttttttggtgacaaacaccagaatcccgatgacgacaatggcgagcagtgtcagcagaggactaagaagcagcatggaaataaatgtaacaatgattgtgaaaaatgacatcagcgcctgcggaatcgcctggctgatcatctggcgcagggtatcggtatcatttgtgtaaagactcatgatagagccatttgtattctgatcgaaataacggatcggaagtgtctgcatgtgctcaaacatatcatcacgcacgcgttttaatacgccctggccgatataaaccatcatacgggtatagataaatgttgcgatgacgccgacgagaaaaatacagccgaggacggcaagtgcacggtaaaattcggtatagtttggtgatttttgtccgatcagtggaaggatgaaatcatcaagcatatattttaaggacaatgataccgcaatagatgcgactgcacttaagaagatacatataaacacgagaatgaaccgtgctttataagtttccgttacatatttcagcagacgttttgcggttgcaatattatctttggaaagcttaggttttttgttattcatgatcttcacctcccttgacctgagattcatatacttcacggtaaatatcattggtctttaacaattcttcagatgtaccaataccagaaatagcaccgttttccaaaacaatgatctggtcggcatcttcaatagaagaaacacgctgtgcaatgatgatctttgtggtattcgggatttcctcacggaaagccttacggatcagagcatcggttttggtatctacggcacttgtggaatcatccagaatcagaatctttggttttttcaaaagtgcacgggcaatacaaagacgctgtttctgtccaccggaaacattgtttccaccctggacaatctgtgtgttgtagccatccggaaattcccggacaaaaccatcggcctgtgccagtttacatacattttgcacttcttcgtcagaggcgttttcgttgccccagcggatattgtcgtaaattgttccggagaacaggacgtttttctgcaacaccatggaaacctgatcacgcagagcttccagattgtatttgcgtacatcgacaccgctgaccattacacttcccttcgtgacatcatacagacgtggaatcagctgtacgagagtggatttggcacttccggttccaccgatgatacccaccgtctgaccggatttgatatgcaaatttacatcttttaaggaaagatttccaccctcaccggcataactgaagctgacatggtcaaagacaatatcaccatcggcaacggaagttactgcgtctgcgggatcaatcatttccggaatttcatcgagtacctcggtgatacggtctgttgatgcaccggcaatcatgatcatgacaaacacaaatgttaccatcatcagggaaccgatgatctgtaaggcatatacaataatagaagtaagtgcaccggtttccatgattccggttacgatgccttttccgccaatgtaaataagaatcataatcacagcatacatgacaaactgcataaccggggaattccaggcaacgatcttttccgctgtggtaaaaagttgataaacatatttggaaacaccgtggaatttaccaatttcataatcttcacggacgaatgcctttacgacgcgggcggcatttacattttcctgtacggaattgtttaattcatcatattcgtcaaacaccttaatgaaatgtggatgggctttttttgcgataaataacagcgtgccaccgagtaccggaatgacgattaaaaataagagcgcagcttttctgctgagcgtcagggtcataacccaggataaaataatcatgatcggagcccttgccagcaggcggatactcatcatgtaagccatctggatattggtaatatcggtagtcatacgtgttacaagaccggacgtggaaaaatggtcaatatttttaaaggaaaaatcctgtactttataataaatatcgtgccgcaggtttttggcatatccggctccggcaattgctgcaaagtttccggcctgtacaccgaaaaacagggacatcattgccataattacaaggataagtcctctttggataatatatccgagatttccttctgcaatgccaatatcaataatttttgccatttccagaggaatcaatacttccatcagtacctctaatgtaaccaaaagaggggtaatgatggattgctttttgtattcccggacggattgtaaaagtttcttattcattttttttacatacctccttatgttctgatacgttatagagcatctggtagagcacttttttacaggtcagaacatcagcttcggaaatatctgtcgtaagctgtgtttccgactgccttatgtgtgcaaggatgctcggacggagtgcttccgctttctttgtaggaatgatgcgtttcagacgggcatcttttttttcgctttcccgcacaataaaaccatttttttcgagaagctgcagcattccggtcgccgtggatttgcggatctgaaattcttcttcgatgtctttctggtagacaaccttgtgaagggtttccagaagaagaaatttcaacacatgtttctgcatggaggtcagaccatcatcgttgatcatggagatgacacaatttttccgcttcatctgatgggatagtacctgaatcaggcggcccatatgaatttctttgagttcttcatcatcgaaatcctgcaagaaatcactcctttcttaaaatgatttttaaatagttagcaaccgaacttttatcattatagggatgaaaatttaaaatgtcaatggctttttttggaggattttgtaagttcacagaaaaaacacaaacacaaaatgcctgacaacttgtgataaaatgagtaaatttatcatattcacagaaaaaacacaaaataattaacagacagggttgacattgccagaatacagtgctataacgtaggcataacaaaggaaacaaatttgacatatgaatatgaggaaaagaggcgattactatgtcagataagaatccaaaacacccgttaaagaaaaaacaggcgaaagcaaaagataaaaagaaacacgtttacgaataaatcgtaaagtggagtcgagcgagagcatctgctgatgtcctcgcttttttcttttcccaaaagagtatgttgagaagcaaaaacggagatgttatactaaaaacagtatgaaaataaggaaagaaacgaggaaatcggtcatgacaaaaacaacgggaagtatagcggcatcaaccaatatcgtaaaggaatctgtggtgatgggggatgtatccatcggtgaggacagtaccattcttttttatgcggtactgcgtggggatgacaataaaattatcatcggaaaagggacaaacattcaggataactgcacggttcacacttccaaagtcgacccgaccatggtgggtgattatgtgacggtggggcataatgcaattcttcatggctgcacgatcggggacaacacattaatcggcatgggcgcaacggtgatgaacggcagtgtgatcggaaaaaactgtctcatcgcagcaggaagccttgtgcttgaacaccagaatatcccggacggcagcatggtcatgggcagaccggcgaaggtcacgcgggtattgacggaagaagaaattgcagggttaaaagagagtgcactttcttatatcgaagagggaaagaaactcagggaagaaggatattgcctgtaaaaaagaggtacacaagtggataaaatattaataattgaagatgatgtggaaatcaatacgctgttaacagatttcctgaaagaaaacggatatgttgtgtacagtcaatatgatggactccatgttctggatttcttacacaaagaaaaaattgatctgatcatacttgatattatgctaccctatcgaagcggcgatattattctggcagatatacgcagacaatttacgataccagttcttattatttcagcgaaagaaacgacacagaataaaattgatctgcttcgtcttggggcagatgattacattacaaaaccttttgatatggaagaagtgcttgccagaatcgaaagcaatctgcgcagagtacagtttgaaaatcgttcggctgcctgtttacaatacggggatttatgtctggatctggaaaagaatacggcatttttgaaggaagcggaattggctttaaccgcaaaagaatttgccattctggaattgctgatgaaatatccggacaaagtattctcaaagtcaaatctttttcagagtgtgtggaatacagaatattttgtggaagacaatacgcttaatgttcatatcagtaatttgcgtaacaaattaaaagcggtttgtccggataaagaatttatagatacggtctggggcattggttatcgtctgcataaggctaaggaataaaagttccctggctttatgcttttttaatgtcttcttatctcagcttaaggaattctttaagaatgttcgttatactgttttttgtaaaggaggttcggaagatgaattcagttattttagaagcccggtctttaacgaaagagtataagcagacactggcattagaccacataaatttgcagataaaaaaggggaaaatttatggttttatcggtcggaatggggctggcaagactacttttttaagactggtcacgggacttgcatttccgacaagcggcacgctttccttatggggaaaatcagaaactgtggaattacagaaacagcgtaaacggattggaagtatgatcgaaacaccggcattatttcctgcaatgaccgcatatcagaatatggaaatacagcgtattcagcgtggcataccggataaaaccgtgataaaaagaacattggatatggttgggttaaacgatacgggaaaaaagagggttcgaaatttttccttagggatgcggcagcgccttggaattgcaatggctcttttgaataccccggaatttttaattttagatgaacctgttaacggactggaccctgccggaattgtggaaatcaggaatttattaaaaacgttaaacagggaatacggaatgacaattctggtctccagtcatattttggaagaattgtatcaaacggcaacagagtttattctgcttgatcatggaaatattatagaagaaatttctgatcatgaattaaatgaacggtgcaaacgtcatattgcgattcagacaaccaatgtacagaaagcagtgatggttctggaagaaaatcttcatacagatcattttaagctgatgcccgatggtacgattcgtttgtacgatcatctggatgatctggaaatggttgcatctgttttatcagaagcgcatgtgctggttaccgggctttttgtatcgggtgatacattggaagattatttcctgagtaaaataggaggggcaaaagatggcaaatctcctgagaacggaatggtataaattatggcatagctggtacttttggggaatcgggatctttacgtttcttttaagcagtatattgttgctggacagcaaaggaaaaacttcaaatctggttatggcatctttatataatacgccacttctttatttcctgattattgtttttatagcattgtttattggaaatgatttgggaggaagaaccttaaatgcatatctgactgcaggacataagagaggttatgtattctgggcaaaagtcatggtatcccagattggctgcatcctcattctgacagttccgttactgatacatgaaatcattggccggtttggtatgaaagaaagatttccggaaatttcaggtacttttactgtggcttttcaaatactgtttgtcgtaatcaccatgtgtgcattaccggtcgttcttgcttttgttttccgcgatatgggaaaaacactggcagtttccatggttctgttttttcttatgatttttttgatgaatgggaaacatgcagaaagtctgataagaatattgcccatgggacagcttcgattaattgcattacaaaagtttgacaggacaacggttccgttaagcctggattttctgtggatgtttattttgtattatagtgccggtcgcatttttttacatgcagatttgaaatagtgggaggtgtttaggatggaaaaattattaaagatggagaaataccagtttttgcataatttcgtttactggtgtgggatgattggaatatttgttctgggcttttttactgccgatacctatgtgccggaagttatgggaccggcaggaggaaaggcatcttcccttgcagatatttttaacggaatggtgtatgattctacgtttctccttatcattatttcggggcttcttgctttgagtttcggacaggaattttccgggagaaccataacgctcgaagtcagtgccggacattccagaagcaaaatttttctgggtaaaatcatatcctatctgatcgcttttcatatcatggcgcttgtgtatccggttgcgggatgtatcagagaatttggaaagtttggtatggaagatggtggggtgtttttttataatgtaacaaaagcaatcgtttattcgcttctgttaaatagcgggatctttctgattgcaatcttaatttgctgttatttgcaagatgttgtgagagcaacttctgttacggcaattattatttttgcacttagtctttatctcggatatggaatgatgctgcaattgccggtagcgtttttaccggtttatcagatccgggtcgttgtcagcaggaacacattttttcagccggctgctattctggcaggggtgatatggtcgggcatactgatattgctttcgtggataaaatttcgtaaatgtgacttgaaatagatggaggaaagatgtctgaaataaaatggtttttattgcttctggcagtgggattcctgatattattattccgacatatacagctgaaaaaacaaattcgtaatctttccggtcaggtgaaggaatggaatcgtggaaattccggacagatgatagacatttccctgatggataaagatttagaacacctggcagctatactgaatctttataatatcaggcagagacaggccgtagcgaaaaccatacgtcatgaagaacatttaaaagaatctgttgcaaatatatcacatgatctgcgtacgccgctaacggttattcttggtcatttacaattgttacaaaaagaagatttagagccggcgcaggccaaacgcatcgcagttgtcctgcataaagcagaaaaaatgaaggaactggtggaagcattttatgacctttctgttttagaggaacagcagaccgttcccagtaaagaaacgtttaatttttccaacatgctcatagatctgataacggaacatgcaccggcattagaaaaaaagaatatcataccggaaataaaactgccagattattccatctacatatattcagaccggaatatggtagagcggattttgcaaaacctgctgacaaatgcaatgaagtattcggcagggaacataaaaataacacttatgcagaaatcggatggcggtatccggtttatgatggaaaatccagtgagtgacagcttgcaaattgatggcaaccggctgtttgaccgcttttatacaggggatacctcacgacacgatggaagtacgggggtggggcttgcggtagttaaggctctcgttctggctcttgatggtaatgtaggagcaagcgtacaggacaataacctcaagattattcttgaattataaagtattgaattaaaaataataagagtttattttgcggaattctttaaagcctgaatttgttccacggaaagtccggtaatttcagaaatttcagaatccgaatatttaccggaggaaagcatacgacgggcagatgttgtaatgcctcgttcaatgccctgctgaatgccagtttccagcccctcgcggtatttctcgtcataagccatttgcagcgtcatgtagtcatgcctccatttttcattgcgcttggcagattccacagccttggagagatcttgtgtaaaagaatcttccggctgtctgccatcaataaagttaagcagccgtttcagttccggccgaacatcatcaaaaattcctttcgtatttaaaatgattttctgtgtgccatcgttaagaggcagattcggatcttccacgcagcggttttcaaaagtatacacatgcctgccgatatggaacggatcaaaggtgcagacaaagatcacaaaactttgtttcaactgcgtgtaatccatgcccttgtcgagcaggtttaaatcaatcatcccctgataatagcgggtgcgcttcggaagatttttatggtgtccgttctgcatttcaatgttgtaaaccgtatcaaaatcgtcctcaacatacacatccagccggatgctcttcgcatccagagacagattaatcgttttctgatcctcgggatactcaatgcgtgaaatcttaatattcagtatagtttccagaaacggtttacaatatttgggatcgcgcataacaatcccaaacataaaatcatcactaatggtaaggtcttcgaactttttgctcttgtacattttcttctcctttgtagtggcggagaggaaaacgtgtgatatagcggctgttcttctatcaagattgtaacatggaagccccccagctttcaatatctgaaaataaaaacaataataaaataataactgaatttttgctctgcacgaaattcctctccaatatttaattgtttcgtacacatggaaaaaaacggatgaaatatccggtgaaatgcagcggtatataaatttagctgcaaattcgaaatgtgtaaagaaaatatagcatggaagaaacatatgcgcaataggaaaacaggactaaaattaagacgtcacaaaatcttcacaaaaaattagcactcgatacttgataatggaagtcgatttttgccctgtcttgtgtatcccggaagtgcctgttttacaggctttccggggcatcagccattttgtctggtattgtaaagcagtgtcagatttgtcgtaaatgtcgtaaatttgtggtcaaaaaatgatgagaaatggagagtgctaataaaatggaattaacgtatacaaatgtaaatggatatctgatcccgaatctcacctataaatccggtgagcagatggagcaacttggcaagtatggttttcttcgcagagattatctgaagaaccatcgaaattcaacttatcaggtgatgcttctgcaggacaccattggagagcatcttctggaagtagacaaggcagccagagaacgggaagaagtgattctgaaacagctagagaaaaaagagcctttgccggataaagagaaagatcagattgtctgggtatgatctggttacggacagtccgacaaagagaatctatgaagcagtgaagcgtattccgaaaggacatgtggcaacttatgggaagatcgcagagatggcgggagaccacagaatggcaagagccgtgggcaatgcactgcataagaatccggatccggaacatattccgtgcttcagagtggtcaatgcgaaaggtgaactggccggggcatttgcgtttggtggagaggatgtacaggcagaacttcttcgagcggatggagttgaagtgataaatggaagggtagatttggaaaaatatggaatatgtgtctgcggaaatctgggaaaaaattccggaagatattaagaagatgataaattttcagcggatcagctgttaacaatggaataaaagcttgacaaatttctaaatttttatataattatcaaaggtaattaactgtgataattactagaagtgccatgaatgcaaaagaaagtataagtggtgattttactgataatatataaggaggacagaatatgacaagtgaaataataaaaaggatgttcgatgcatgttatcaggcaaagcggacccgggagatgctcccaccgttgcccgaaggtgttcgttcatcctttattcaatatctggatacgatacagtctttggaaggacagggcgtacaggtaaaggtgtcggatatcagtgatgcaatggagcttccaagaccgggagttacaagaactgtcaaagagatggaagaaaaaggataccttaagaaaatggcttctgaagcagatggacgtgtcacatacatagctgttacaagaaagggaacaaatctttcgcagaaatatgacgaacaatattttaaaagtctgctcccttacatggaagaaatctcggacgaagatgcagaatgtatgatacggacgatagagaaattttatcagatcatgtgcgaaaggagaaaacattacgatgaacgataaggcagattttacacaaggaagcatacttaaaaaactgattgcatttatgataccggtgctgggagcattgatcctgcaggcggcatacggtgcagtggatcttctggtagttggaagattcggttctacatccgggctttcagcggtttctacgggaagtcaggtattgaatcttgtaacttttgtagtgacacagtttgcaatgggtattacggtactgattgcgagatatctcggtgaaaagagaccagagcagattggatcggtcattggcggatcagcagttgtatttacgatgattgcagtcggattatttatcgttatggttggatttgcacatccaatctcagtcctgatgcaggctccgaaagaggcggttgagctgacctcggtatatgtgcgtatctgcggaggcggtattttctttattgttgcatacaatcttttatcagcaattttccgtggactgggggacagtaaatcaccgttgctatttgtatttgttgcatgtattgtaaatgtgatcggagatatagtacttgtggcaggatttcatatggacgcagcaggtgcggcgattgcaactgttgcagcgcaggcactcagcgtagtatttgctattgttattctgatcaaaaaggaacttccatttaagattaccagaaaagatttcgggttgaatagtcagtgtaagaaattcctaaagatcggacttccgcttgcactgcaggagttcctgacacagatgtccttcctggcactttgtgcatttgtgaaccggcttggcctggaagcttcttcgggttacggtgttgcatgtaagattgtcaactttgcgatgctggttccaagtgcgctgatgcagtcgatggcatcctttgtatctcagaacatcggagcaggcaaggcaaagcgtgcgaagaaatccatgtttaccggaatcggtgttggcctggttgtgggatgtatagtatttttattggtgatgtttggaggcgatatactggcagggttcttcacaacggatgtagccgttatccagaaagggtatgcatatctgaaaggattcgcactggaaacaatcgtgacagcaattctgttcagtatggtcggatatttcaatggtaataacaagacggtatgggtaatgacacagggattaatccagacattgctggtacgtcttccatttgcctatgtgatgagtatccagccgaatgcaagcctgacgaagatcggtcttgcggcaccagtatcgacaatggtgggaatcgtgctaaatgttggattttatatttatcttgaccgtgcagagaaaaaaagtaacgctttataaatcattatatgtttaaaaaagggagcgggagagacactgcaggtaattgcttgagaccaagggaatgcttctggatgatgcatacagcgtatcagccggttatataatgtcagtgaccaggaagcagcaaagctgatagaggatacagataaaaggcgtatgacaaattataacttttataccgggcagaagtggggaaaggccagcaattacacgttgtgtctgaacagttcacagcttggatatggcagatgtgaagcggttattatggagtgcgcgaaataaaaaatccggttatagtaaaatcccatctttggcagttggaaagaaaaaatggctgcataccaagcaaaatcaaggtgtgcaaaaaaaaa

SEQ ID NO: 993 - DNA, 120401 bp, Unknown
  gut microbiota DNA sequence
aaggaagggaaccaaaagagaacgaaaggttcctgaaacatcccggttccaaagaaacaaggtaaacaagcatgagaggtccacagaccgtggacgcagaaagaaaaggagagatgacttatgttaatgcctagtatttttggagagaatttatttgatgactggtttgatgagtttccattttatgatatggataaagaaatgaataataccgaaaagaaactttacggtaagaaagccggaaggattatgaagaccgatattaaagagcagaaggatggatatgagctgatgattgatcttccgggatttaccaaggatgagattaaggcttctgtttccgatggctacctgaccatcagtgctgcaaagggactggataaggacgagaaagaaaaagacagcggtcactacatccgcagggaacgttatgccggtgcctgccagagaagcttttatgtcggtgaagatattgagcaggaggatgtcaaagcagaatttaagcatggtatcttaaagctgttcgtgccgaagaaagaggcaaagaaagcggtagaagaaaacaaatatattgcgattgaaggataatgaaatatcgaaggagccacacagcaggagtgctgtgtggctccttttttgtggcatgagtatcgatgctggcatcgctcttgggatttttcgtcataaattaacgataaacattaaaaatgtattgacaaacataaaaagtgaaattatgatatacaagaaaggagaataaacaatgtttgaaagaaagaacggaaataaagtaaaaaaacaatttgaaaatgtagggggatagccttatgttttgtaatcggatatccggttattaaatgcctgaaatatttaagtttagcagcatgccagattataaaaggggtagaatggaaaggaacggatcattttattggagcagctgttatagtaggaatctgtatttatttcattggtgtttcttttcaacatgggtacgaattgcagaaagaggttgatgaaatattatagataaagtaaaggaaatataagatgccaattgtattacggttagatcgggtgatggccgatagaaaaatttccctgcaagaacttgcagaagaagtgggaatatcgaatgtaaatttgtcgaatataaaaactggaaaggttagggcgattcggttttctacattggaagcgatttgtagagtattacagtgtcagccgggtgacattttggaatatgaagaaacgaaggaagtgtaaaggaggtgatgaaatggaatggataagagaaccgatggaagtaaatatgacgaaaagtgtatcgtggtgcccatgtatgggagcaaagtgtaggggcaataatccaccattttgcagtataaaaacatcaaactgcaaaagtgtacaaacagagcgtctgaaacaggcactgcagaaagcggaggccgtgatcattggcgtgggtgcgggattatccacttctgcaggatttacctattccggggaacgttttgaaaagtggtttggcgatttccgacaggtgcatggattttcggatatgtattccgggggctttttcccttataaaacattggaagaatattgggcgtactggagccgatatatctatatgcaacctggccggatgcagtttatgcctgcataaataagaaggaagcctgtgcgccggaggaaatccgaaagaaatccatttgcgtggaagcggatattggagcagttttggaaaaactgtatgataggaaaaatagtcagggagacgttgcggtacccgaagagatatgctaaaatattagataatatattatataaaaataagtaaaatcgcgtgaaatagataaaatattatctgacaagatggggcatgatatggaagcactggtatgggaaacagcagaagaactggataaaaaactggcagaacgtatgcgccgtattcgcagacggcggaaagtttcgcaacagaaactttcggatatgagcggagtaagttacggttctattaaacgatttgagacaacaggacagatttcgcttttgtcactgacaaaacttgctatggcgttggaacttgcagatgaactgcgggatctttttacacaggtaccatatcgaaatattcaggaggtaatcaatgagtcaaagggaaagtcttgaggttcggatggatgaccggcttgtgggaacgcttgcattgaccgcgaatcataaggtggcattttcttatagtgaagaatggctggagcatggattttcagtcagtccattttcgcttccgctaaaaaatgaagtgtttgtgcccaaaaaagattattttgacggattgttcggagtatttgcagatagtttaccggatgcatggggacagcttttattggagcgtttgctgaaagaacgtggaaaaaaggaagcacaatattcggtattggatcgtcttgccatcgtgggaaaatctggaatgggagctttgacctatcatccgcagaaggagattgggatgggacaacagatggatgatctggacgaactatctgtgcattgccagaaaatattaagcacgcaatattcggagaaattagatgaattgtaccggctgggaggaaccagtggtggtgcaagacctaagattatgacggaaatagatggagaaaactggattattaaatttccggcacatgtggacaaaaaagatgtgggaaaaatggaatacgattattctctgtgtgcaaaagcctgtggaattgtaatgagtgaaacacggcttttttcatcagatatatgtccgggatattttggaacaaagagatttgatcgaagaatagaaaagaatgaaataaaaagggcacatatgttaactgcggctgccttattggagttagattttaatcaaccaagtctggactatcatgaattgatgaagttgacaaaaattctgacaagggattgtacagaggatgtggaaaatatgtatcgtcgtatgtgttttaatgtattcgcacataatcgtgatgatcattctaaaaactttacctacatttataatgaaaaggatgatatgtggcgtttaagtcctgcctatgatctcacatacagtaatacgtattatagtgagcacacaaccactgtagatggaaatggcaaaaatccggggaaaaaggaattagtagcagttggtgtgcaggcgggtatgaaaaagacatactgtgaacgtgttgcagaggaaatccgtctgtgtgtaaatgaaaagctggaacactacttgaaataataatgttccagctatataagcctagccctgacattctagtgttggagccgcatcaataatttcctgaagcggggtccatgacaggagatcatccgtatcgtcattcgtgtcctcatcatcggaaaaatgagcattcggattgttcgtttttcttttttgggcatcttccggagtgtttggcagacgctgataagccggtgatttatgaaaatttttggaaacctcattgtaagcagccagcagatattctttgtccggatctttgtccgagaccccggcaatcgcggatgtaatcatatcatttgcttcctgtttgctttttgcatgggagagctgctgttttaaagcctccgccattcgttggacgcgtagggcgtgggcatacagaattggatcggtacgccgcagaaaatccagttctttggcagaaagtttcttcccactttttaattttcccataatgcgggagagcatttcctgttttttttcttcctgtgtatcagggtcctgtctttgcaggggagaagtccaggaagaaaatgcggcattggttgtttctctcacatagagcatgcgtccctgaggagaagaaagatcataggatgaggaatcggatgagggattcttctgggacatcagtgataaataaatctgcatgaaaagttcctttctgtaatagatcatcgtttgtgttgtctattatatcggcaaaacatccgttacaattaataacagatgtttctggagaaagagaatatcccccttcttccgtcacattgaaaaaacttatgtctaaaacaattttcagacaattcgacaatatattccaatgtttataaaaactttagaatttttgttagcactcctacttgacgagtgctaaaaacgggtgtataacaatatcgtaatcgagaaaaatagtaactgggatgcaaaaaaacagcacagttacatgatgatagttaagaggagggcttgctatgaacatacagaaatttacacaaaagtcggtagaagcgatcaataactgcgaaaagcttgcctacgactatggaaatcaggagattgagcaggagcacctgttagttgccctgttacagcaggaagagggactgatcccgaaactgatagagaaaatggaaattgacgtacagcatttcacccagaatgcgatcagcaaactggatgcgcgcgtcaaagtatccggcagcaacagcaatgtctatgtcggaaaagatttaaacaatgtgctgatccatgcagaggatgaggcaaaggcaatgggagatgaatatgtctctgtcgagcatattttccttgcaatgctcaaatatccaaatccagcgatgaaagcactgatgaaagaatatgggctgacaagggaacggtttctgcaggcactgtctaccgtccgcggcaatcagcgtgtcacttccgataatccggaagcaacatatgatacactggaaaagtacggttatgatatggtggagcgtgcaagacagcagaaacttgatccggtgatcggccgtgacgaggagatccggaatgtggttcggattctttcccgtaagaccaaaaataacccggtgctgatcggtgaacccggtgtaggtaagactgccgttgtcgagggcctggcacagcgtatcgtaaaaggcgatgtaccggaaggcttaaaagataagaaactgtttgccctggatatgggtgccctggttgccggtgcaaaatatcgtggtgaatttgaggaacgtttgaaagcggttcttgacgatgtcaaaaattcggatggacagatcattctgtttattgatgaactgcacacaatcgtcggtgccggaaaaaccgatggtgccatggatgccggacagctgttaaaaccaatgcttgccagaggcgaactgcactgtgtcggtgccacaaccttaaatgaatatcgtgagtatatcgaaaaagatgctgccctggagcggcgtttccagccggttatggtagatgagccaacggtggaagataccatttccatcctgcgtggcttaaaggagcgctacgaagtattccacggcgttaagattacggactctgcacttgttacagcagcagttctttccaaccgttatattacagaccggttcctgccggataaagcaatcgatctggtcgacgaggcctgtgcgatgatcaagacggaactggattccatgccggcagaacttgatgagatgaaccggaagatcatgcagatgcagatcgaggagacggcattaaagaaagaaaccgatcatctgagtcaggagcgtctggcagatctgcagaaagaacttgcagaattgcgtgatgagtttaataccagaaaagcgcagtggagcaccgaaaaggatgcagttgacaatgtcagcaaggtcagagagcagattgagagcacaaagaaggagatcgaggcagcacagcgtgacgcagattatgaaaaagctgcggaattgcagtacagtaaactgcctggattacagaaagaactggaaattgaggaagataaactcaaagaccgtgatctgtctctggtacacgaaaatgtcaccgatgaagagattgcaaagatcatttcccgctggacgggaatcccggttgcgaagttaagcgaaagcgagcggaacaagacactgcacctggatgaggaactccacaaacgtgtggtaggccaggacgatggtgttaccaaagtgaccgaggcgattatccgttccaaagccggaatcaaagatccgaccaaaccaattggttcgttcctgtttttgggaccaaccggtgtcggcaagaccgagcttgcaaaagcacttgctgccagcctgtttgacgatgaatccaacatggtgcgtcttgatatgagtgagtacatggagaaatactccgtgtctcgtctgatcggagcgcctccaggatatgtcggatacgatgaaggcggccagctgacagaagccgtgcggagaaaaccgtattctgttgtcctgtttgatgaggtggaaaaggcacatccggatgtctttaacgtactgttacaggtacttgatgacgggcggatcacagattcacagggacgtaccgtagatttcaagaacacgatcattattatgaccagtaaccttggatcgcagtatctgctggatggcattgatgcagacggcaacatttcgccggaggcagaaaaagaagtcatggaagatctgcagggacatttccgaccggaatttttgaaccgtctggatgagattattatgtttaagccactgtcaaaagaaaatattggtggcatcatccgtctgctgatggatgatctgaacaaacgtctttctgatcgtgagatcaaggtggcattgtcaccggaagcggaacactttgtggttgaacatggttacgatccggtttatggtgcaagaccattgaagcggttcctgcaaaagcatgtagagaccctctctgcaaaactgattctcgaagatcaggtacggcagggagatacgatcctcattgacgtgaaggatggtgcacttacagcatctgtacaaaaataaaagcaatatttatgtaaaaaaatctcaataataacttgtcaagcgtcaggaaatcatgtatccttataaggatgaaatgaatttcctgacgctttttctttcaaaatgagataagcgggaaatgaaagaataatagaaattacatagaaatatcgcaaagaacaaagcgtaaagaagtttgtggaaaaattcctgcaaagaataaaaatgcaggatacacacaaaaattattcaaaaagatcttgaatgatattcatatggggattggatacgaatggatttatttgagtatatgagacaacagaatatgaaggatgagtcaccgcttgcctcacggttgcgtccgaccacacttgatgaggttgtcgggcagcagcacatcgtcgggaaagacaaactgctgtaccgtgcgatcaaagcggataaactcagctccatcatcttttacggaccgcccggtacgggaaagacgacgctggcgaaagtgattgccaataccacaagtgcagagttcatgcagatcaatgcgacttcggcgggcaagaaagacatggaggaagtggttgccgcggcaaaaaacaatcagggcatgtatggaaagaaaacgatcctgtttatcgatgagatccatcgtttcaacaagggacagcaggactatctgcttccgtttgtcgaggacggcacgatcattctgatcggagccacaacggaaaatccgtatttcgaagtgaatcctgcgcttttgtcgcgctccgtcatttttgagttaaagaaactttccacggaggatatccgtacattgctgcttcgggcggtcaatgatacggaaaagggcatgggttcttaccatgcacagatggatgatgatgcgctggagtttttagctgacatggcaaacggagatgcgcgtgcagcgctgaccgccattgaacttggaattctgaccacggaccggagtgaggatgggatcattcacattacactggatgtggccagtgagtgcattcagaagcgggtcatcaactacgataagacgggagataatcactatgatacgatctctgcttttatcaagagcatgcgtggatcagatccggatgccgcggtgtattatctggcacggatgctttatgcgggggaagatgtgaaatttattgccagaagaatcatgattctggcatctgaggatatcgggaatgcggatccgcaggcattgcaggttgcagtagctgcggcacaggcggtggagcggctcggaatgccggaagcacggattgtactggcacaggcagttacttatatggcaagtgcgccaaagagtaattccgcgatcaatgccattgataaggccatgcgtgtagtgcaggagacaaagacaccgccggtaccggtgcatttgcaggatgcccactacaaatcggcaggaaagcttgggcacggaaaaggttacaaatatgcccatgattataaaaaccactacgtgaagcagcagtatctgccggacggactgaccggtgaggttttttatgagccgtcggaaaacggatatgagcagcagattcgcgcctattataaaaaaatcaaagaaaatccagaggaataataaggaggaaaacttaccatgaaaacctatcaggagatgagcaaagaggaactcacacaggagctgaccgcactcaaagccgaatatgaaaaaataaaaggtatgggtcttgcactggatatgtccagaggaaagccgggagcagaccagcttgatttaagcatgggaatgcttgatgtgcttgattccaagactgcattaaagagtgaaaacggcaccgatctgcgaaactatggtgtccttgatggtattccggaagctaaaaaactgatagcagatgtgatcggaacgaaaccggaaaatgtgattatatatggtaactccagcctgaatatcatgtatgatcaggttgcccgtgcagaaatgtttggtatttgtggcaacactccatggtgtaagctcgataaggtaaaattcctctgcccggttccgggatatgacagacattttgccatcacagagacattcggtatcgagatgatcaacatcccaatgacagagaatggaccggatatggatctggtagaaaaatatgtgaataacgatgagacggtaaaaggaatctggtgtgtgccgaaatattccaatccacagggtgtggtctattcggatgagacggtccgcagatttgcagccttaaagccggcagccgcagatttccgtattttctgggataatgcctatgtggtacatcatctctacaaagaggatcaggcacagattctggatattttagaggagtgcaaaaaggcaggaaatccggatatggtatttgaattctgttctaccagcaaagtcagcttcccgggttccggtattgcagcaatcgcttcctcagagacaaacattgcagatatcaagaagcgcctgacgattcagaccattggccatgataagattaaccagctgcgtcatgtgaagttttttaagaatgttgatggcatcaaggcacatatggaaaaacaggcagatctgattcgtccgaaatttgagcttgttgagaagatcttttccgatgaactggcatcccgcggaatcggtacatggatgaatccgcttggaggatattttatttccttcgaggcaccggaaggatgcgcaaaggagattgttttaaagtgtaaagaggcaggggtggtactgaccggtgcgggttccccgttcccttacaaaaaagatccgaaggattctgtcatccgtattgcaccgacgtatccgtcgcttgccgaacttgagcaggcagcaaatgtatttgttgttgtggtacgcatggttgcagcagaaaaatttctggcagaaaaatagagtgaatgactaaggtaaaagcaaaaagaagggcttcccggtgcggaagtccttttttagtaccaaagaactatttacaaaaacccaaaaaacggtatagtaaaaatatcttttttcagtacggcaatgcatgtgatgcaatcgccgcattttttgtgcccacagatattcttctgtggtttcccataagaacgtccttcatacaggaggaaaatgaaaatatgaaagaaatatttcaggaatatggcggtattttaattaccgtggtagcgattcttgcagtgatccttgtcattacagcagttgtgggaacggatacaagcggaccgatcggaagtgcgtttcagacattggtgaaaaattttattgaccaggcgaacaaaaataccggtctgccgacaccctaaggaggctgtatggaacttggaaaagagtatttcggtccattgtggaaatatattgcgaacgaagagatcacagatgtcgattacaatgggcgggagatctggctgaccaatatctataacgaacgttaccgggtgaatcaggcgtatgtggatgagaatatgaccttggcatttgtagaacagtttacccagcggattgcaaatgtggtcagtcagcagtttaacaagcagaatccggagctggaggcagaaaccagtgagctgcgggtgacagttctgcatgagtcgatcgcacgttccgggcgcagtatcagcatccggaaaacaccgccggtcattcggctgacagcagaaaaggcactgcaggaacagtattgcagcagggatattcttgcagtactggtcaattgcgtgctgacgaaaatgaatctgattttttgcgggatgccgggaattggaaagacggagtgtgtaaaatttttttcccagtatgttccgggaaatgagcgtgtcatcacaatcgaagataccatggagatccggtattccgtaacgaatccggggaaagactgtattgagatgcgggtcaatgaccggtttgattatgcggatgcgatcaaggcaagcctgcggttaaatcctaaatggatcatgctctcggaggcgcgttccaaggaggtgaaataccttttggaagggtggtcaacgggagtacggggaatgaccaccctgcatacggacgatgtccggaatatcccggaccggattttaaatatgcttgaaacgcgtgtggatgcggaccgtctggaaaacgatatctatcaggcaatggatgtcggggttctgatccgaaagaaaaagaacggggccggtcaggtgtaccgttatattgaccaggtatgtttttttgacagagaaggccaaaaaaacaaaattattatggcagtgaccgatggaaaactggtgctgaaagaatttccggaatcgctgttgcggcggtttaaaagagagggagttgacaacccgctgctttgcagtcttttgaaccagcagcttggaaaggatgcagacagggaggtggaaacatgatttatctggttgtcctgtcggcactgtatgcgctgcatctgctcttaaaacttcactggattacgacggttgtcattggcggttttctgctgcttcggatttccggacaccggaaatggtacaaaaaaaagatcgtatacgagagaaaatttgaggaggtatccgagtacctggatatgctgttgtatgctttcgtcaaagaagaaaaagtggagagagcactggtgaatgtagatgcggcgatggtggatggtccgatgcgcggagttctccaaaacgccattgatcatatgcatatgacatttgatgaaactgatgtcatgcgggattccctgcagatgatcgaacgggaatatgcctgcagccggataaaaaatgtacatgattttattgtacatgtagagatttacggaggagcaatagaaagaccggtggaattgcttctggcggataaaaagagatgggagcagcggatttgtggttctatgaaggaacgcaggaaaatgtttgtggatattgtaatgtcaattgctgcgtcattgttgatatgcgggatgattttatatctgccggttatggaaattgatatcagtaaaaatttgatttctcaggtgcttacgattgtagttgtgatccttgatgatctgatttttacgagagcacagaaatatctcgccatcgactggctggctctggatggacataccgatgaggcagatgcaaagaaaatagaagaatattaccggtatgatgagcggaaagagaaacgtttgtcggtagttctggctgttgtgacggcggcaggtgcagcagctgcatattattttggacatcagctgatgacagcggcggcactgcttctggttgctctgatggcaaatcagcaccgggtaggacgggcggttgccaaaaaaacgctggtacgcagtatcaagtgtgcatttccgggatggctgatggatattgttctgcttttgcagagtgaaaacgttcaggttgctttgcagaaatcacaggagcatgttccgccggtgctgcgacgggatctggatatactggttggccagctggaaatggaaccggagtccgtgcttccctaccatcggtttttgaaaagttttcagattccggaagtacattctgccatgagcatgctcttttccgtttccatgggaaacagtggaagggcagaccggcagatcggggaactgattgaccggaatctggagatgctggatgtcgcagaaaagggacggcttaaaaatctgagcagtggaatgtatctgttgtttcttgcaccggtattgacagcgtcattaaaacttcttgtggatatggcagtgtttatgatgacatttctgtcaggggcaggacttggataaaggggaggaggatacaaaatgagccagatcatgaaggcattcatgggagtattcctgactctttttatggcggtgacagcaatgggaattctggcagcctatatggaagtaatgaatgcgcaggatatgcaggcacggattgttgatgagatcgaaaacagtgattttaataccggtgtggtacaacagtgttttttgcagagtgaggaagccggatatcagctgaaagtaacattttttaatgaaaattccacagtggcaaccgtttcgcaggtcagtcagataccatatggaatggatggggtcaatatggcgaaagtcgaaatgcagtttccgtttcaggttgccttcctgggaattaacagacagcatacatttgtaagctatgcaaagtaaaggagaaaaataagatggaacagatcatagaagaatatggaattggtggaattttatttgtgattggtacaggggttctggcagggcttgggaaagttctgcaattgattgcggaggtatagaatatggcagcagtggtaaaagaatacggcggtgcggtactggctgcggtgggaggagttgcgttttttggcacgctgggacagtttttgctgtccagacagggattgattatgcagatgatcgaggtttggggaaacggaggctgttgatgaaagaactgatcagacaatacgcaggcacggcaatcgcggttgtgacggcactggtattgattgcgctggtgtcggaaatgagcgtggttgtggaaaagggaattccaaagagccgcgcactgtgtgaaacagacacggcagtgtttgaagggtactggaggagtcgatgaaaaacataatattaggaatactgggctgtatggttgcggtttatacaatcgtttcctgtctgagtatctacagtatttccacaagaaaaaatgaaatggaaaactgtatttctcaggtacttaaatatcatctgaaccggtattatgcgaccggagtgccggacatggaagttgaggcatttgtccggcaggaaatccggcagcagctgcatacggcatcaagggtttccattgatgtaaaaagctgtgatatggtttcgggtgttatttcagtacgggtaacagaggattttgtacttccgggaggatttcataagtccatagcatgcgataaaacgatactggtagagacggaagtaatcgaagaggaaacagagacagaagaaatatggccgcaagaggaggaggtatgaatagaaaaggaaaactgacaaccaaaggaaaacatgcagtgatcctgacactgacaattgtggcatgtgtgaccgcaatgctgttttccctgttattatctgtgctgtgtgacggaaaatatgtatcttctgcagcgcatgcaggagatatttcacatccggccctcataacaggaaaacagagacaggatacggatctgttgacaccgcaatggctgtattaccagagcgatggaagcgttactgaccgtaatatcaaaaaagaaatggatgttctgatgcgtaagtggaccaagggaaagctcgggggaaaggaattggacaggctgataaaagaatttttgcaaaaaaaggactgtccggtcaggcaaatcactatgcaggagaaagcggtgtgtgtatttccgtcggaaaaggaacttccggattatacaaaaacacttgcaaaaagagagaagatatatcagtttatcggggtatataccgggggacagcaggatgaaaacggaagattattatgtgaatactgggaggtggcaatcggttaatggaaaaaaagataaaaattgtggtgttcgggatggtcgtggcattgctggtgacatttcttccgttcagacagacagaaatttatgctggaatatcagaaaatgcatacagttattatcaggagtatggaaataatgtatgctttttcccgttctcggaaacagatgggatgatctattatgccaccaaagcaaatctggcaagttcgaatatccgctatcggacaatcggatggaagttgtcggtaaaggattcttccgggaaaaaactgcagacgatgtattttaaacttggcggaaactatatgtatgcggtgcattgtgtcagaaaaggtggtgcagaatataatctgtatgcgctgacactgggagacctgaaggaccggttgaatgcaaaggcaagtcaggcattaaataaaggcaaagcgtctatggtgatggatgcctgtatgattgtggtaaggaaaggaaaagcgcagggaaccatgaatgatcaggggccggtttctggaaaagtatatacgacttatcaggggatttccggtgcggaaagctggagcagagagtcatacacttcctttcacaattatttccacaaagaaattcagggattgtttttctgggtggatgcgattgcaggagaagggattgcatcggtttccggtggtggagagtattgttatggatacacggcatgtttaaaggcaaaagcaaagaaaggatatgattttgcagaatggagaggagattgttacggggatagagagaaacaggaattttatgtgacaaatgatgtgcggtgtgtggcctatggacagaaaaagaaactgcagattttctttcaccggaacagttcaaaagatgatacggaaatggatgtgcagacaatgacgtatggttatggaaaagtgcctttggaaaatatcgggtggaaaacgaaaggaaaaaaactggttggatgggcaatgaagccggatgcaaaaaaagcagacttaaaatgtggggcagtggtaaaggacagctggataatcagatacagtccgaaaattgatctttatggagtgtggaagacggagaacacagatgatctgacagaccctgacccgacagaccctgacccgacagaccctgatccggcaggacctgatccaacagaccctgatccggaaactccggggactgacagggaagatccgaaaccggattctggagatctcgatccggtaaaaccgaaagatccggatgaagattttccgaggggaaagattatttcgtttcactgccggtttatcagcaaaaaatattttgaggatgccggacagaatctgattccaaaagaaaggggagggcttgccggagattcgaaatggatcatggaggattctcttcgtgtgtggcttcggcacttactggcataaaaatgagggctgcaaagcagccctcagaatttacggattattcttcggattattcttcggatttttgttcggaaccggtttcctccagaggttccggaagccggatgtaaatccgttcgattctgtttttttccatccggtcaatacggagaagaatattattatctgttaaaataatttcatttttttccggcagatgatcgagaagaccaagacaatatcctcctatggtgtcataatcatccgaagtaaagtgtagggaaagcgcttcactgacatcgttgagattggcggaaccaagtacatagaattcgcggtcactgatccgggtgatatcgtcttcttcatcggcatcatattcatcacggatttcccctacaatttcttccaacaggtcttctaaagtaatgagtcctgcggttactccgtattcgtccagcacaatcgcaagggaaatggaggatttacgcatttccagaaacagatctgcagtatttttgtgctcatatgtaaaatatggctcccgcagaaggtttcgtacggaaaattccggggtatcattctgtaacaggaagtctttcatgttgatgattccgattacattgtcggtcgagtcttcataaacaggaaggcgtgtaaacatatcctgacggaagatatcaagtacttcctgataggtggcatctgcctgaacaaaagtcatgtcaattcgcggaaccatgatctccttggcttctgcatcaccgaaatcaaagagattatgaatcatatcccgttcttcatgttcgatgacaccattttcctgacttacgtcaacaatggtgcggagctcttcttctgtcatctttttctgtgcatctttgatattgacatgcagcagaaacatcagtccgagagagagcttgttgatgataaaaataacaggagtaagtattttcatcagaagtcctattggagcggctactgtcaaagacatggaatcggctttgatggttgccatggtttttggtgttacttcaccgaagatcagtatcagaaatgtaagaatacctgtggcaattcccgcacccgtgtttccaaaaagatggatggcaagggatgttgaaatggaagatgccgaaagatttacaatattgtttccgatcagaatggcagataacatttttcccggatttccggttacatgcaatacccgtgcagcgcgtttatcgccattgtctgcaagggtacgcatacgaatctggtttacggttgtaagagctgtctctgacgacgaaaaaaacgctgacagacacagcaggataattattgcaattaattgacctgtctcactggggcccaataaaattcacctcaaattatatttattatgatttatttattgtcatcggtactgtagtttggagcttcttttgtaatgtgaatatcgtgtggatggctctcacgtaaggaagcagcggaaatcttgacaaatttacctctttccttgagatcctcaatggtaggacatccgcagtaacccataccggaacggataccaccgatcagctggaagacggtatcttcaagtgttcccttgtaagcaacacggccttctacgccttccggaacaagtttctttgcaccttcctggaagtaacggtctttgcttccgttttccatggcagcgatggaacccataccacggtatactttgtattttcttccctggaagagctcaaatgtaccaggtgcttcgtcacatcctgcaaacatggaacccatcatacatacgtttgcaccggctgcgatagcctttgtcatatcaccggagtatttgataccaccatcggcgatgacagggatgccgctctgttttgcaacttcatagcagtccatgattgcggagatctgtggaacaccgataccggcaacgatacgtgtggtacagatagaaccaggtccgataccaactttaactgcatcagctccggcatcaatcagtgcctgtgcagcagcaccggttgcaatgtttccggcgataacctgcagatccgggtattttgccttgatcttctttacggcttccagaatgtttttggaatgaccgtgtgcggaatcgacaacgatgacatcgacatgggcagcaaccagggcatcgacacgctccatcatgtttccggtgataccgacaccggcaccgcagagaagacgtccctgatcatcctttgcagaaagcggatacttgatctgtttttcaatatctttgatggtgatcagaccttttaagttgaaatccttgtcaacaatcggaagtttttcttttctggcttttgcaagaatctttttggcttcttctaaggtaattccttccggagcggtgatcagaccttcggaggtcatagattcactgattttctttgtgaaatcggtttcgaactttaagtcacggttcgtgatgatgccgaccagacgaccgttctctgtgatcggaacaccggagatacggaactttgccatcaggttgtcagcatcctgtaatgtattgtctggagataagaaaaatgggtctgtgataacaccgttttctgaacgctttaccttatcgacctcatctgcctgtgcttcaatggacatgtttttatgaatgattccgataccaccctgtcttgccattgcaatcgccatttttgactccgtaacggtatccatggctgcactcatcataggaatgttcagtacgatcttctttgtcagatgtgtcttcagatcgatcatgtttggggtaacctcagaatactgaggaaccagaagaacgtcatcaaatgtaattccttcgccgataatagttcccattttctaaaatcctcgctttcttctattatatgtagtttgtatgtaattttgtgtaacgtctgttatcgtccaaaacacctattatgtacaataacgattttaatgatgatagcaaaataatggattgctgtcaagtaaaaattatgttatgatagcggagaaacagcataaacagtgaagatatacaacaataagggcaagggggcctcagcagggtctttctatgcccattttttgaaaagaggacaaaatcggatggaattcagaccatgtattgatattcacaacggaaaggtaaaacagattgtcggaagcagtctgcgggatgccggagatcaggcaagtgaaaattttgtctccgggcaggatgcaccgttttatgcacggatgtatcagagccgggggatctgcggcggacatatcattttactgaatgcaaaagacagcccttattatgaaaaaaccaaaaatcaggcgctggcggctctgcgtgcctatccggggggattgcaggtcggcggaggaattaccgatgccaatgcgtccgaatttctggaagctggcgcatctgcagtgattgtgacttcgtttgttttccgggacggacggattgactatgattgtctgaaccggctggaacaggccgtgggaaaggaacacctggtacttgatctgtcgtgcagataccgggcagatgcagaagaaccgggctattatattgtaaccgaccggtggcagaaatttaccacagagcgtgtgacgaatgaacttctggaaaaactgagttcccggtgcagcgagtttctggtgcatgccgtggatgtggaaggaaaatccggtggaattgaaaaacccctggcacagtttctgggagactggggaaaaattccgatcacctatgccggaggcgttcacagttttaaagatctggaagaaatttcacagcttggaagaaaccggctgaacgtcaccattggaagtgcgctggatctgtttggcggtccgatgtcttatgaacaggtattaacatatatcagcaaatgtaacgcagaaaaggagaaaagtatatgagcagatataccaaggaagatattttcagaattgtggaagaagaggatgtggaattcatccgtctgcagtttacggatattttcggaacattaaagaatgtagcaattacatccagtcagctggagaaagcattgaataacaagtgtatgtttgacggttcttccattgagggatttgtacggattgaggagtcagacatgtatctgtatccggatctggacacatttaccattttcccatggcgcccgcagcagggaaaagtagcacgtattatctgtgatatttactgtgcagacaaaacaccgtttacgggggactcccgttatatcttaaaacgtcagattgaggaagcaaaaaaccttggatatacatttaatgtaggaccggagtgtgagtttttcctgtttcatcaggatgagaatggccagccgacaacactttcccacgaaaaagccggatattttgatctcggtccggtagacctgggagaaaatgccagacgtgatatggtgctgacacttgaagatatggggtatgagatcgaagcttcccaccatgaggtagcacccgcacagcatgagattgactttaagtatgatgaggcactgcagacggcagataatatcatgacattcaaactggcggttaagacaattgccaagcggcacggtctgtttgcaagctttatgccgaagccgaaatacgggattaatggttccggaatgcatatcaatatgtccctgtccaaagacggacataatattttccacgatccggatggaaaaatgggcctgagtaaagaagcctattattttattggcggtatcatgaagcacatgaaaggtgtgactcttatcatgaatccgctggtaaattcctataagcggctggtacctggatatgaggcaccatgttatattgcatggtctgcgacaaaccgcagcccgctcatccgtattcctgcttcccggggagaggaaacccgtgtggaactgcgcagcccggacccggcagccaatccgtatctggcccttgcggtatgtcttgcagccggaattgacggtatcagaaataaaattgagccaccggaagaagtgccggaaaatgtctatgaactgaaggaggaagaaaaagcaagcagaggaatcgagtcgcttccggccgatcttcatgcggccatctgtgaattgcagaaagatgcttttataaaagaagtgcttggagaacatatcagcagcaaactgatcgaggcaaaagaggtagaatggatgcagtaccgtacacaggtaaccggctgggagatcgaagagtatctgtataagatttaacgggagatcggatcgtgagtaacattgtaattgccttttcgaaaccggaagtggcagcgggcataaaaaaaatattgacacagagcgggtattccgtgcaggcagtctgtactaccggtgcgcaggcactggcaagcgtaaacaatctggagtgtggaatactgatctgcggatgccggtttatggatatgatgtatatggaaattcacgattatctgccaccggagtttcagatgcttctgatcgcttctccgtcttccattcaggagagagaggtaagcaatctggtctgtctttccatgccgatgaaagtgcatgaactgttgcagacaattgaaatgatggagggagatatccagaggcgcagaaggagaatgcggcagcagccgaaacaccgttcgcaggaggatcagcagatcattcgcaaggcaaaggaactccttatggcacgaaactcttttacggaagaggaagcacataaatatattcagaaaagaagtatggacaacggaaccggactggtcgaggtggcacagatgatcttaagtcttctgcaggaagggtaaggatcttatctggcttttttggctggtctttacattaaaagaagaaaatgttaaagtgatactgatggaaaattagagaaggagaacgaaattatgtttcatgtaaatgagaattatcagaagctgccgggcagctatttattcagcacaattgcaaaaaaagtaaatgcatatcaggaggcaaatccggacaagaacattatccgtctgggaatcggtgatgttacacagccactggctcctgcaatcattgaggctatgcataaagcggtagatgagatgggacatgccgagacattccacggctatgcaccggatctgggatatgaatttctgcgcaaggcaatcgcagagaatgattatgcagcaagaggctgtgaggttgcagcagatgaaatttttgtgtctgacggagcaaagagcgattccggaaatattcaggagattttcggacaggataacaagattgcggtctgtgatccggtatacccggtttatgtggattccaacgttatggctggaagaaccggtacttacgacaaggagaccggcacatggagcgatgtcatttacatgccatgtacagcagaaaatcatttcgtaccggagtttcctaagaagacaccggacataatctatctgtgtctgccgaataacccgaccggaacaacgcttacaaaggatcagttgcaggaatgggtggactatgccaataaagttggcgccgtaatcatttatgatgccgcttatgaagcttatatcagtgaggacaatgtggcacattccatttatgagtgcaagggtgcaagaacctgcgccattgagctgcacagtttctcaaagaatgcaggatttaccggtgttcgtcttggatataccgtagttccgaaggatttaaagtgcggggaagtttctttgcacgacatgtgggcaagacgtcacggaaccaaattcaacggtgctccgtacattgtgcagcgtgccggtgaggctgtatattctgaggaaggaaaagcacagttaaaggagcaggttgcttactatatgaagaatgcaaagaccattaaggaaggattaaaggatgccggatataccgtatttggtggtgtaaatgcaccatacatctggttaaagactccggatcagatgacttcctgggagttctttgattatctgctggagaatgcaaatgttgttggtactccgggatccggtttcggaccgagcggagaaggatatttccgactgactgcatttggaaattatgaaaacaccgtaaaggcactggagcgtatcaaagctctgtaaaagagggaatatgcgtatgaatcataacatgaaaaaaagaggtctggcattgctgctggcatgctgctgtgtttttacagcggcaccggtggcggtaaaagcggacaatgtatctatttccaccaatcagacaccgaccggcacatacagcagctataccaaagcagaggtgctgaagtcagatacggtggtgtatgatacgctgtctacttccaataatgttcacttttataagtatactgcggaaaaagccggatattttactgtaaatcttgcacagacaagcggaaaaggaaagtggaatttttccgtatatgatgcggacaatggaaatcaggaactggaaacaaaacctctggcatccaattatacatcaagaatttataacctcagaccgggcaaaagcgtatatatcaaagttgagcgtgtgaaatctacggatattaccattttagattatcagctgacacaggattatcagtattcccttcaggtgaaaacaacggagagtgcacagtgggaacaggaagacaacgatacgcaggtggcagcgacaagcctgcagaacggcacctggatcaatggaagttcttacaaagctttggatgtggactggtatgagtataccattccggaaaacggatatttcacatatgattttcagggggagggatcttccgcactctggaatctgtatctgtatgatgaaaatatgaatgaactgcagaaggataccaatacaagaaccgtatcctccggtaaatatgtcctcccggtgggagcaaaagtgtatgtgaaagttacctgctacggcgttggaaaccagtacaggatccgttccaattactatgcaacggaaggctgggaaaaggaatccaacgataccatggcacttgccacggatcttaccgccggaaagacactgcatggaagtatcaacagcaaaaaagatgtggattactaccgctacgttgctacgggtagtggatatttcaatttcaaatttacaaatgcggacggtggaaacaatcagtactggaaactttccgtatatgatgagaaaaagaagctgcttcagaccgtggaaacagaggatgatctgcagatttccactgcaaagctcagtttccggaaaggcaaagagatttacctgaaggtagaacggaatatcaatgattatgcgtgcggacacgaatacacggtgacagtcaatcagtacaaggctgataattgggaacaggaatccaatgattcttttgctacagctacaactgtaaaaaagaataagacctgtagtgcgaataattatgcggtaaaggataaagattattttgtatataaggctgcaaagaagggaaaggtgaccatacaggtaagccttccggacagtggatactggaatgtgtgtgtatataatcagaaaaagaagctggtcaaacaggaagattatgcacagaccggacagaagtttaccgtaaaagctgcaaaggggcagaaactctatgtgatggtgaaggccagaacaaaatctgccgttggaaagacctatcgagtcactgtgaaacaaaaataaagcaaactataaagattctgtgaaaagaaccgatatctatagtagataccaacatagtttaaccggaaacaaatggaattgaccggtagaattcaaggaggatgagagtatgggtgtaaacacaacaggtttgttaaacacgcagacagaggtatacgcatcctataaaaacgatgcggtgaccaaaaatgagacggctgcaaagaaggactccacggcaaagacggaagaaaaaaatgagagcggtgtagtctatgataaatcagacagcagcaaggacaataagaaagcaacctattcgattaataagatgagcgctgaggatcgtgcagcactcgtacagcagatgaaagcggatacacagtccagacagcagcagctgatcagcatcgtgcagaaaatgatgaccggtcaggcagctacttcttctgttgcaaacggaacaaacagcgatgatatatggaagtttcttgcaaaaggggatttcacggttgatgcagcaacaaaggcacaggcgcagaaggatatctccgaagatggctattacggagtaaagcagacatcagagagattatttgattttgcaagtgcccttgccggagatgatgtggaaaagatgaagaagatgcagactgccatgcagaaaggattcaagcaggcaaccggtgcatggggcaaagaccttccggacatctgccagaagacactggatgctgcaaatcagaagtttgaggattattataagtccaaagagagcacaacaaagaccgaaggctgaaaacagactgctgcagcccggtgattgtttacaaaagaagggaaaaaataccggaaaaagaggtattttttcccttctttttccgtttctgatggtactgcaatgattgaagaaatgatgcagaagtggtatgataaggcattatagagagacagaaaaaggagacctgatgattatgaaatataattttgataaaataccaaaccgcagaggcacaaattccctcaagtgggatgtggatcgcaaagagctcccgatgtgggtggcggatatggattttgagacggtgccggaagtgcaggaggcactggtacagcgcgtggcgcacggggtatatggatattctgtcatcccggacgaatgggcggacagctatgtaaactggtgggaaaagcgtcatcattttcggatggaccccaagaagctgatctttacaacgggagtaatccctgcactttcttctgctgtccgaaaactgacgactccggcagaaaatgtgctgattcagacacctgtctataataatttcttcaattccattcgtaataacggaagaaatgtcgtggaaaatgaactgctttatgatggaaaagaatatcgtgtagactgggaaaaacttgaacagcagctggcagatccgcagacgacgcttatgattttgtgtaatccgcagaatccggcaggaaacatctgggatcgtgagacgctggcgcggatcggggcattatgtaagcagtatgatgtcattgttgtctcggatgaaattcactgtgatctgacaaaacccggtacagaatacattccgtttgcctctgtggatgatacctgcagggacatcagtgttacctgcattgcgccgacgaagacatttaatctggcagggctgcagacggctgccgtctatgcagaaaactcgattctgcatcacagaatgtggagacagctcaacaccgacgaagtagcagaaccgaacgcttttgcaattcaggcaacgattgcagcttttcaatacggggaagaatggctcgatgagctgcgggaatatgtggaaaagaacaagcagtatgtgacagaatttctgcaggagaaaattccactcatccatccggttgcaggagatgctacttacctcatgtggctggactgccgcaaaatcacggagagtggccggcagtttgcaaaatttatccgcaaaaccagcggtctgtatgtcagcggaggcaatcagtatggcaagggaggcgaaggatttttgcgcgtgaatgtggctacctccaagctggttgttgaagatggaatgcagcgtctgtatgagagcgttgatgcatggctgaaagaagaaaagatatcaaaataagaataattcctgattttaagcaaaccttaaaggtttgccccattggaaattaagaaaaaaaccgctacaatgtatctatgattaatcatgaatacgaggtggcggtttttttatgtataatgttttagtttgtgacgatgaaaaggatattgtttctgctttgcagatttatttaaaaagtgaaggataccaggtgttttcggcttataacggaaaggaagccttaaaaattataaaccgggaggatatccagctggttctgatggatattatgatgccggaaatggacgggatagaagcgatgtgcaaaatccgtgaaatttccaatgttccggtgatcttactgacggccaaaagtgaggataccgataaggtactcggacttaccgtgggcgcggacgattatgtgacgaaaccattcaatccagtggaactgcaggcgagagtgaaatcccagatccggcggtatatgctgcttggaagcggacagaaggtgaggacaaaactgtccgccggcggcatcgagctggatgataaattaaaggaagtcaccctggacggagaacctgtgaatctgaccagaacagagtacgatattttaaaacttctgatggaacatccgggggaagtatattcaccgaaacagatttacgaggccgtatggaaaggcagcccgtgcggtgtcgaaaacacggtagccgtacatatccggcaccttcgggaaaaactggaatataatcctgcggagccacgctatttaaaagtcgtgtggggacggggatacaagatggaggatgtagaaaatgaatgagaaaaaggataaaaaatccaaaaagccggaatgtgtgtccaaaaactggaaatcatcgcagggcatcagattactggctatggtacttgcgattgtaagcggattttttgtggccgtgaccggtgtgataacagttacattaggcatgaccagtgatttgcagggctcacagaaagacattgaaaaaacactggatacagagctgcttagaagctatgcgtactggatgggtgatgcggttaccggcatttcaaaaaagcaggacgaagcagatgccctgaaaaaatttgatgacggaaatatcgtttattcacttgtcaaaaagaagccgaaaggaaaagaaaccgaacttgtctgtggaaataataccggtaccttaaataaggaaaatgcacttgcctggctgaaatttacagatgaaaatgagtttcataccaatgatcgttctttctgggatatgctgcttgggagaaacaggggacagtacatgcaaaaagtcaagcattatacgcaggtggatcattttatctatgataatggtgtgatttattgttatgcgggcgataccctgtttcggatcaattccttttctttttacgcggttccagaggagtcggatcttgaaccgtatgtggaatatacttaccgggaatcggacgatggtggcagatattgcgcggaaaatggagaacagctgaaaaaaggtaagctcgaaccgtatttaaaatcatccgagctgcggtttgattttgatgggttagaggcaggttacttatggtcaaaaaaggatgggatttacccgatccggcaggaatccattgcggatacctatgcgaaagcaaaggtattccagtggcaggatttttcatttgcatacgaagatcaacagggtcgtatttattataatccacatcaggagaaagaagcaacggaatatacgctttatcttacggtagcggattccctgaagggaagcactgctacggtatcctctttgttttcaccggaagtcggaggtgaaacccatattgtgattgattccgggaaaacacagtttttccagaaagcacacacacttgcaggcgttgtggtacaggtgcgggaaatttcgggattgtggttgcttttgagtgttcttgtgtgggtgttttctcttggcattctatttgcatcggcaggatggaaacgtggttctgatacggtacagattcgatggattgaccgtataccatttggtatttatacaggaatctcaggacttgcgtttttgggctgcggtatggtatgcctttatatgggagatctgcttatgcaaaatgcaggaatcgtattctgtatttcattttttacaattgcgtttgcattggcagaactgattgtgtatgaatatgtgatcagtatcattgtaagaatccgtgcaggaaaattctggcattatacgcttttgcgtctgcttttaaacccgtttcgccggataaaaagagaactgcatgaaatcagactggcgcttttgaccaatctgtctatgacggtaaaagtcacagctgtatttcttgtggtcttcctcatagaagcatttcttttactgtgtgccggagcggatggcggaattatcatggtctatctcctctggaaagttgtggaatacggcgtactgttaaagattgtggtgcagtttcgacagatattcgacggaggggaacggattgcaaaaggtgattattcgcatccgatccatacagaaaaaatgatgtatgagctgcgcacacatgcggaaaatttaaataatgtacagaccggagttgcagcggcggtagaagaaaaaatgaagagtgagcggtttcgtaccgaactgatcaccaatgtctcccatgatattaaaacaccgcttacttccattatcaactatgtggatctgatcaaaaaggagccgacagagagtgaaacaatgcgggagtacattgaggtgcttgaccgacagtccaaccgtctgaaaaaactgattgaggatctgatggaggcatccaaagcatctactggaaatcttccggtgaatccggaagtatgtgatgcaacggtcgttctgacacagattgtcggggaattttcagaaaaggcagaggcaaatcagctggagatggttgtagaatgtccgcaaccacccgttgaaatctatgtggatggcagacatttgtggcggatcattgacaacctgatgggaaatatatgtaagtatgcacagccgggaacacgtgtgtatattacgttggaaaaatttcacggaatggtgattatgaccttccgcaatatttcgaaggatcgactgaaaatgaccagcgaggaacttttcggaagatttgtccgtggagacagttcccggaatacggaaggacacggactggggctttctatcgcaaaaagcctgaccgagctgatgcatggaaatcttgcggtgcagatggacggcgatctgtttaaagtaattctcagttttgaggaatatcaggaggataagaagcagtaaagaccaaaaactcctcggttgtatttctatatgccatatgctataatgtgggacgtctaaatacagaatataaacggaggacaaatctgtgaaaataataatcgccggtgatggcaaggtcggactcacgctgacgcagaaacttgctgcggcaggacacgacctgactttgatcgattcgaaccagcgtgtgctggattcgagtgtggagcgttacgatgttatgggggtacagggaaactgtgcctccatgcgcgtgttggagagtgcggatgtgaaaaaggcggatctgctcattgcagccaccagttcggatgaagtcaatctgctctgtggtatgactgcccatggtctgaatccgagaattcacaccattgcaagaatccgtaatcccgaatacggcaagcagatttttaccatgcgggatgtctattccctttcgcttatggtgaatccggaaaaacaggcggcgcgcgagattgaacggctgatccgctatccgggcttcctgcagagggaaacatttgcaaaaagccgtgtggaaatcgtggagctgcggattcaaaaaggaagtaaactctgcgatgtggcactgatgaatctggaaaatgttgtcaaatgcaaggtgcttgtctgcgcagtgagccgcggaggggttgtggagattccatccggacattttattctccgggagggggatcatctgtttattacggcaactgctgagatgctgacacagcttctgcgcaatcttggcattatcacgcacaaggcaaagcgtgtaattatctgcggtggcggaagaatcggttattatctgtcgacctggctggcaaaagaaggtgtcagtgtgctgctgattgagcaggatgaagcgcgctgtgaagaattatccggcaaacttccaccggaagtatgtatcatacacggggatgccagcagtcagtttctgcttgaaagtgaaggcatccatgattgtgacgccgttgtaaccatgaccggcatggatgaaatgaatatgattatttcgctgtatgcgcagacctgtggagtgccacaggtgatcacgaaagtcggtcatatggaaaataacagtatgcaggacagtctgggacttggcagtgtgatctgcccgaaagaactctgctgcaatacgattgtccgttatgtccgtgccatgcagaatacaacaggtgcagcactgacactgcacaatattgcagaaggacaggcagaggcattggagtttgtcgtagatgccgacacaaaacatatcggggaaccattgcgtaatatccgcctgaaacgcaatatactgatcgcatgtatcagccatggaagtaaaacggagattccaaacggagattccatgtatgaggctggaaattccgtgattatcgttgcaaagggcgggatgacacttttgcagctgaatgatattttcgagtgaggatgctatgaattataaaatgatgggaaaatttctttcccagatcttaattgtggaagcagggtttatggttccggcacttttgatcagtctgtataccggaagccgggcagcagtttatgggtttgggctgtccattttgatcactgccggagttggtgccttaatgtattatttttgcagaaattccacccgtcgtttttttgcgagggaagggatggtctgcgtagccggaagctggattgcaatcagttttttcgggtgtctgccatttgttttttccagggaaattccaaactttgtcgatgccctgtttgaaattgtatcgggatttacaaccacaggttcttcgattttgggagatgtggaagcactttctcccggaattatgtactggcggagtttcagccactggctgggcggcatgggggtacttgtatttcttctggcactttctccgaacggagagagaggcaaagggtataccatgcatctgctgcgtgcggagagtccgggaccgaatgtgaacaagctggtgccgaaaatgcgtacaacagcaagaattttgtacgtcatatacatggtgctgacattcatcaatttcctgtttctcctgttgggaaaaatgccggtttttgatgccgtatgtaccgcttttggaacggccggcacaggtggattcggaatccggaatgacagtattgcaggatacagcccatatatacagaatgtatgtacggtcttcatgtttttgtttggaatcaacttcagctgttattatctgcttttagtccggcatgtaaaggaagtgctcaaagatcaggaactgcggctgtatatcatcatatttgtggtcagtattcttttaattacgttcaatgtccggggactgtacggttcctgggaagagacgatccgccatgcggcatttcaggtttcctctatcatgacgacgaccgggtttgcaagcacggactttgatttgtggcccggattttcgaaggcactgttgctgtgcctgatgtttgtcggtgcctgtgcaggcagtacggcaggagggcttaagatgggaaggcttcttctgattctgaaaaacctgcgcagaaatatccgcagaattttaagcccgcagcgtgtggaagtggtgcgcatgaatggaaaccggatcggggaggatgtattaaataatacaaatacctatctggcggcttacggtgtgattttagtcggaagttttcttttgatttctattgatggactgtccatgacaacaaatgtgtctgcggttgctgcgtgctttaacaatatcggaccgggatttgatgtggtgggacctacctgtaatttttcggtgtattcctggttttccaaacttgtgctgatttttgacatgctggccggaagactggaaattttcccgatgcttgttctcttttcaagaagtacctggagacataaataattgaatggatttctcaattattttatgataaaatagtagggtgcttttacacaacaataaaatatggaggagagaacatgttagagaaaatgtttaagctcaaagagaacaataccacagcgaaaacagaagtgatcgccggtattacgacgtttatgaccatggcgtatatcctggctgtaaacccgaacctgctttcacaggcaggaatggacccgacagcagtgctgatcgcaacctgtctggcatcctttatcggtacgtttgcaatggcactccttgcaaattatccgtttgcacttgcaccgggtatgggactgaatgcatactttgcatttaccgtatgcggaaatatgggatattcctggaaagtagccctgatggcagtattcttcgaaggtattatctttattatcctttctcttaccaatgtgcgtgaggcaattttcaatgccattccgaccacattaaagaaaggtgtgagcgccggcattggtctgtttatcgcgtttatcggattgcagggtggacatatcgttgtaaacaacgattccacattgttatcttatgtaaatttcagagataactggcataccgaaggaatctgtgcagtacttgcactgatcggtctgcttcttactgcaattttatacatcaaaaaagtcaagggatctattctgatcggtattctggctacctggattcttggaatgatctgtcaggcagcgggtgtttaccgtatcgatgcagacgctggattttattctctgtatccgacatttgccatgactgatttttcaaaaatcggggagacgttcggacagtgttttacagcagatttccatggagtcggaattatgaacttcatcgtagtcatgttgtctttcctgtttgtagatatgtttgatacgatcggaacactgatcggtgtatcggataaggccggcatgttagacgaagatggaaaacttccgaacgtaaagcaggcactgatggcagatgcaattgctacttctgcaggtgcggtccttggtacgtctacaactacaacattcgtagagagctctgccggtgtcggagctggtgcaagaaccggtcttgcatccatcgttacaggattattattcctgcttgcaattttctttgcaccaatctttacggcaattccgggctttgcaacagcaccggcgctgatctttgtcggattcctgatggtatccgcaattgtaaaggttgatttcgaggatctgacagatgcagttcctgcatatctgtgcctcattgcgatgcctttaatgtacagtatcgcagagggtattgccattggtgtaatctcttttgtactgatcaatctgatctgtggcaagcgtaagaagattactccactgatgtatatccttgcagtactttttatctgcaaatatattttcctgtaattacgcagtggacgagccgctttccagtaggacgggaagcggcttaaagtctatctgactatataaaatataaatggaggaacaactatgaaaaaattaaacaaggcaatgtcggttgctgtggcagcagccatgatggtatccctgggcgcctgtggaaattccgcagatgcagcaaaagacgggacacagagtgcaggtgcatccggtaaagtatataacatcggaatctgccagcagctggagcatccggcactggatcaggcaacacagggatttgaggatgtcttaaaggaaaagctgggagacaatgtaaaatttgatctccagaatgcacagaacgagcaggcaaatgcttctacaattgcaaataatttcgtatctgccaatgtggatctgattcttgcaaatgcaaccactgctttacaggcatgtgcagcagcgacaaccgatattccgattctgggaacttccgttaccgattatgcaacggctttggagatcagtgactggagtggtacaaccggaagaaatatctccggtacatccgatctggctccgcttgatcagcaggaggatatgctcgtagagctctatccggatgcaaagcatgtcgcaatactttactgctctgcagaggcaaactccaaatatcaggcaaccgagtttgaaaaatacctggatgaggacggtatcagctacaaagagtttaccgcttccgattccaatgatatcggttctgtggtacagagtgcaaccgagtatgcagatgttatttacattccgacagacaataccatggcacagaacacagaagcaatcaacaatatcgcacttccggcaggaactccgattattgccggagaggaaggtatctgtaaaggatgcggagtggcaacgctttccatcagttattatgacatcggaaaaaaggccggtgaaatggcatatgacattttagtaaacggtgcggatattacaaccatgaagattgagactgcaccgaacgtaaccaaagaatacaacaaagatatctgtgatcagctgggcgttaaaattccggatgattacaaggctatcgaggctgaataattaagggggatgggtatcgtgttaatatctgcttattttgcttccttaagtccgctggcgctgtttcgtgcgctgccgggctccattgcacagggtctgatctggggccttctggcattgggagtatatattacatacaaacttctggattttgcggatctgtcggtggacggttcttttgcaaccggcggagctgtggcggttatgctgatccgcagtgatatgaatccgtgggtttcccttatttttgcatttgctgcaggaatgcttgcgggaatggtcacaggtcttctgcacaccaaactgggaattcctccaattcttgccggaattttaacgcagattgcactgtactccatcaatctgaatattatgggacagtccaatcaggcgatcagtgtggataaatattcccttgcggtatcgcttcgttatgtatccggtgatacagcagcaaaaattaaagtatttaccacctgtatcctgtttggggtagtgatcgtggcgattctttactggtatttcggaaccgagcaggggcatgccatccgggcaaccggatgtaacccgcagatggcgcgtgcacagggaatcaataccagcttctgtaaggtactggcactgatgatttccaacggactcgttggtctgtccggtgcactttatgcacagtatcagggtgcagcggatgtcaatatgggacgaggcgcaatcgttatcggtctggctgccgttattatcggagatgtactgtttggaaaactgtgtgcaggaaagaaactggcatttgcatatacgctgttttccgtgatcgttggagcgatcatttactaccttgtgctgagcatcattttgtggctgaaattcccatcggatgatctgaaactgttctcagcaatcgtggtagcaattttccttgcgattccatatctgaagaataagaaaaaagcaacaagggggctgtaaccgatgagtgagatgttaaaaattgaaaatatccggaaagtattcaatccgggtacgataaatgaaaaagtggctctggacggtgtcaacctgacacttgaggaaggcgaatttgtcacagtgatcggtggaaacggtgcaggaaaatcgacaacactgaatgccgtagccggtgtatggccggtagattccggaaaaatctatatcggcggcgaggatgtgacaaagttatccgagcatcgcagggcacaatatctgggacgtgtgttccaggacccgatgaccggtacggctaccacaatgtccattgaggaaaatatggcaattgcagcaagacgtggaaaatccaggggattgcgatggggaattaccaaagcggaacgcgagaaataccgccaaatgctttccaccctgcatcttggactggaagatcgcctgacatcaaaagtcggtctgttatccggtggacagcgtcaggcaatcacgcttctgatggcttccatccagaaaccgaagcttctgcttctcgatgagcatacggctgcgctggatccaaagactgccgcaaaggtacttgagatttcggatcagatcatttcagagaatcatctgacggccatgatggtaacacacaatatgaaggatgcgattgcccatggaaaccgtctgattatgatgcatgaaggaaaagttattttaaatatcgcaggtgaagacaaaaagaaacttacggtcggagatctgctgcatcagtttgaaaaagtaagcggtgaggaatttgcaagtgataaagcactgctttcgtagaaaataacagaattgtttatgcatgataagggtcaaaactgtttttgacccttaaatcatgtagaagggagatagatatgcctgtatttgatttcagcaatacaacggaagaaaagaaagcctgtgagtgtacctatacaacatttcagtcgaatgaaaacactgcaagtgcaaaatatccgattctggttttagataatacggcaaagcagtggaaatatcattcctgcggagtgttcacgaaccagacaaagcgcacagcatttgagtttacccaggaagacggaactgtatgtgcggatattttgcgggtggatgcccgttttgtcaatctgcttcgctggctgggggaaaaccacattaatgtccggctgtctggagagaacacaccggatggatatgccgtgtataagatccgtgaaattgcatttggcggtggaaaaaagctttccgcggaagatggctttttacagtttatgatggagcgtctgtttgccagcagtgcaccgagtgaggaagcggtggatgaggagcaggaggaagacggcgatgatatgaagctcaccagtattcagagcatcaccgattttatgacctgcgcaggacggaccatgccggataacatccggttgtgggcacgccggaatttagcagtggcacgttccaatgaagtgtctccggaagagcggcgtcatgcacagcgtgcactttccatcatgatgaatatccagtggaaaaacaattattttgaggccattgatcccaaggaagcccgtcggattttagatgaggaactgtatggcatggagcgtgtaaagcagagaatcattgagacgattattcagattaaccgcacacatacacttccggcatatggactgcttctggtgggaccggcaggaaccggaaaatcgcagattgcctatgcagttgcccgtattttaaaacttccgtggacaactcttgatatgagttccatcaacgatccggaacagctgaccggaagttcgagaatttatgccaatgcaaagccggggatcatcatggatgcatttgccattgcaggagagtcaagtctggtatttattatcaatgagctggataaggcagcttctggaaaaggaaacggaaatccggcagatgttttactgacacttctggataatctgggatttacagataactatatcgagtgtatgatcccgacatccggtgtttatccgattgccacagcaaacgacaaggagcagatcagcgcaccgattctgtcccgctttgcggtaattgatatcccggattatacgtttgaggaaaagaagattatcttctcaaaatttgcactgcctaaggtattaaagcgcatgagcttaaaggaagaggaatgtatcatcacagatgaggcattaaatacaatcgtggatctgtattcgggtaccagtggaatccgtgatttggagcaggcggcagaacatattgctgcaaatgcgctgtatcagattgaggtggatcatctgaaaactgttacctttgatgcaaagatggtgagaaaactcctcatttaaatggctggttaaaaaatatttgtgttgtaaaaagccatacaaggtggaacactatcggaaataggaggtgcatactatggcaacaaaaactgcaaatgtaacagcacgagtaccattttcacttgatattccggataaacttgctacgagagattctataacacaagctgaatttgatactatgatgcagaccggacttgcacaggcaaaaagaattgatgctgtatctgttgatgaggcttttaatcaattaaaggcggagatatagtgcattatatttcaaaggatctgatggcaccggatgcagcggataatctgcttgataagatgaaagtagagattagaacaagaaaattggaggtagcattatggcaaaagatgagctgttttctggcgaatcaaagaatattgaatacaaggtagttgtaccggataaaagcgaaaaatatatgaaaacagttgtggcttttgccaatacacagggtggcagactggtcataggtattgatgataaaacacatcaggtagttggtgttgacaatgatagtttgtttcaagctatggacgctttgacaaatgctatatcagattcttgtgaaccgcagatcataccggacattgggccgcagacggttgatggcaagacagtcattgttatcacggtggaagcaggaaaaaaccgaccatattatattaaagcccaaggtaaggcgaaaggcacctatattcgtgtggctggtacttccagacatgcgcatcaggaaaagataagtgagctggagatggaaggcgcccgtatttcttgggatgagcttacttgtgtaggatatgaagtgacggaagaagcaacgcagtctttatgcaaggatattgaagattttcgaaagaaggcaggactttcggggcatgatgtaagaaaagagcagttgtttaattggaaaattttgaagaaaagcgaaggcaatgtgcttgcatcaaatgcgtatgtgctgctaacatcagattattttccgtttgcaaagacgcagtgcgccgtattcaagggaacggatagaacggtttttcttgataaacgggaatatactggaccgatatacaagcagatagagagtgcggttgattttgttttgagaaatatcagacttggagtgacaatagatggcttagtgcgtcgggaaagctatgaactcccagtagaagcaattcgtgaaatgataatcaacgcacattgtcacagaaacctgttagatgaatcctgcatacaggtggcaatttatgatgatcgcttagaagtgacatctccaggtggactatacaatggactaacctacgaggaagtgatgaaaggtcattccaagattagaaacaagctgattgcaaatatatttggtcagatgggactggtagaagcgtggggaagtggcatcagaagaattataagtgttgctggagaatatggactgcctgttccgactgtggaagtatttgatgatatgtttcgggtgaatttatataggaatgtgcagcataatgcaaatggtggagaaaatagtggagtaaatagtggagtaaatggtggagtaaatggtggagtaaatggtggaaatgatttcggagataaagtccgtatcagagaaaaagcacagaaattgacggagactcaggagaaaatactagattgtatagcagaagataaatatatttcggtcaaaaaaatagcagacagaatagatatatctaggcggactgttgaaaataatattaaaaaaatgaaagaatcagatattgtggttcgtcatggttcaccgaaaaatgggtattgggagattatagaataaactgtaattctgaaaaagtatatcagcaaaagtgtaaaggagtgaatgtatgtcagagtggttttccctgagcttgtgaataaaaatataccaaagcagattaacactattgtaaacagagacagtaatccggaggaacccagagtgcttgcacttgaagatttagtatttgttgctacttcttcgcaaattcagtccattgacaaacctcggtaaaatagcataagataaaatggacagggagagaaaaagtgaagcggtaacgcgtaatttatagaatcagaggagatggaacatatggcaagacataagcttgagaatgaactcattgcaatcgaagtggaggaacatggggcagaattaaaatctctggtccgtaaaaataccggaaaagaatatatgtggaaagctgatccaaaattctggggacgcacctcaccggtactgtttccgtttgttggagcggtaaaagacaaacagtttcgtaccaaaggacagacttacaccatgggacagcacggatttgcccgcgatatggattttacgctggattctcagacggaggatacgctctggtttgtattaaaatccaatgaggaaaccatggcaaaatatccttatgcgtttacccttcgtattggatatcacatcgaggaaaataagctggaagtgctctggcaggtggaaaatccttcggaggaagaacttccgttttcgattggcgggcatccggcattcaatcgtccgaaaaattgtaaaatccgctttgatgtagctggtccgcttacaagtacaacgattgtggatggtctggtcggaaacggtactgtggattatgaattgaaaaatagttatctgacagttaccgatcatctgtttgatgatgatgcccttgtgattgaaaatcagaatgtgcatgaagtctctctttgtgacatggaaggaaatccctatctgaccgttacgatggatgctccattgtttggagtctggtcaccggcgggagcagatgtaccgtttatatgtgtagagccatggtatggacgctgtgacagtgctgattttaccggagatttaaaagatcgggagtggggaaatctgattgcaccgggcggtatctggaaagcccattatacggtggaggcagtatagaaagccagaaaaattctcttgacagaaaaggaaagaaagattatagtcttatacatagacaattttataaagatcttcagggcagggtgcaattccctaccggtggtatagcccacgagccgcaaggcatgattcggtgaaactccgaagccgacagtacagtctggatgaaagaagataaaggatagaaacacaagaacccgtgtatggttgtggtggatattgaaatgtttgctctggaatttatttccagagcattttttatttcctatgaataaaaggatttgaaaatatatccccggcagcagaacacggtaaaaagaagccctgagcatttgcttggggcttttgtggtatggcgaagccatatcactgatgaaaaaggagaaaaaatgacagatgaatattacatgcgccgagcaatagcactggcacaaaaaggagaaggacaggtatccccgaatcctctggtaggtgctgtgattgtaaaagatggaaaaattatcggagagggatatcacgaacactacggacagccacatgcagaacggaatgcactggctaattgtatacaatccccggaaggggctacgatttatgtgaccttagagccgtgctgtcatcatggaaaacaaccaccatgtaccgatgctctgcttgccgcaggaattcgcagagtagtgattggttcgaaagatccgaatccacttgttcatggaaagggcatccggattttgcgggaacatggagtagaagtgactgaacaggtattacaggacgaatgtgatgaaatgaatgaagtattttttcattatatccagacaaaacttccgtttgtcattttaaaatatgcgatgacactggatggaaaaattgccacgtataccggggcatcccgctgggtgacaggagaagcggcgcgtgcgcatgtacaccgtatgcggaaccgttaccatgccattatggttggcgtgggaacggtacttgcggatgatccgatgctgacctgccggctaggaaaaacagaaaatggggtaaacccggtgcgcatcatttgtgatacagtattgcggacgccattagaatcacagattgtgcgtaccgcaaaagaagttccaacgattatagcaagctgtaaccggcaggaagccatgcatatgccatatgtggaggcaggatgtcagattttagtcacaccggaaaaagatgggcaggtagatctttgggatctgatgcgacagcttggagaacaggagattgacagcgtgattctcgaaggtggtggaactttaaactggtcggctctgcaagctgggcttgtacagaaggtgcaggcatatgtggcgcctaagctgtttggcggggcaacagccaaaaccccggttgaggggcagggatttttaaaacctgcagaggccgtgacattaagccggacaaaagttacagcgttgggatcggactggctgatagagggatacccggcgacagaggggaggccattatcatgtttacaggaatcatagaggagatgggaaccattgaaaacattgcaaaaggcgcacattctgcggtgttgacgattaacgccagaaagatacttgaggatgtgcatatcggagacagcatagcggtaaacggagtctgtctgacggtcacttcctttgaccacgaaagatttactgcggatgtcatgcatgaaactttaaaccggtcggcactggcacagtgcaaaagaaaaagtcctgtgaatctggaacgtgcaatgtcggcaaacggacgctttggagggcatattgtagccggacatgtggatgcgaccggacagatagccgggcgcaagcaggatgacaatgccatatggatccgggtggaggcgccgccggaagtccttcggtatgtggtggagaaaggttccattaccatcgatggcattagtctgaccgttgccgcggtaactgcgcatgatttttcggtgtcgatgatccctcatacggcagaggtgacaacgcttggaagcaaaaaagagggagagctggtaaatttggaaaccgatatcatcggaaaatatgtggaaaaactgcttcatccacaggaagaaaaaaaggaaacccacatcacccaggcgtttcttgaaaaatatggattttgaatggttataacaaagaaaacaggaggaaagaataatggaaggatttgcgacggttgaagaagcacttgaggaattacgaaacggaaaactgattttagtcacggatgatgaagatcgtgaaaatgaaggcgattttatctgcgctgcggaatttgccacaacagaaaatatcaattttatggcaatgcatgccaaagggcttatttgtatgccgatgtctgcagaatatgtaaaaaagcttcattttccgcagatggtcgaaacgaataccgacaaccatgagacagcatttaccgtttcggtggattatgtgggaacgactacaggtatttccgctgccgagcgttccatgacggccatgcgctgtgtggcagaggatgccagaccggaggatttccggcgtccgggacatatgtttccgcttctggcaaagaagaacggagtgctggagagaaacgggcatacggaagcaaccgtggatctgtgccgcctggcaggcttaaaagaatgtgggctctgctgtgagatcatgcgcgaggatggcaccatgatgcgcacgacggaactgcttgcacttgcaaaaaggcacggtataaaaatgattaccattgccgcactccaggaataccgcaaatgccatgaaaaactggtggactgtgtggctgtgacaaagatgccgacgaagtatggaaagtttcgggcatacggttatgtgaaccgtttaaatggtgaacatcatgtggcattagtcaaaggagaaatcggggacggagaaaatgtactctgccgtgtacattccgagtgcctcaccggagatacctttggctccctgcggtgcgactgtggacagcagtttgccgctgcaatgacacagattgaaaaggagggacgagggattttactttacatgcggcaggaaggccgcggtatcggactgatcaacaaactgcgtgcatatgaactgcaggaacagggaatggacactttagatgccaatcttgccttaggatttgccggggatgagcgcgaatattacatcggcgcacagatcttaaaggatctgggtgtgcacagcatgcggcttttaaccaacaatcccgacaaagtataccagctcggagagtttggaatttccatcacagagcgcgtgccgatccagatgcaggccacaccgtatgacctgttttacttaaaaacgaagcagaatcgtatgggacatgtattaaacttttaaaatgaagaaaaggagaatgaacattatgagtacactggaaggaaaattagtagcaaacaatatgaaggtaggaatcgtcgtcgcacggttcaacgaatttatcactaacaaactgctgggcggtgccatggatggcctgctgcgtcatgatgtgaaggaagaggacattacggtggcatgggtgccgggggcatttgaaatcccattgatcgcaaagaagatggcaatgagcaaaaaatacgatgccgtgatctgtctgggtgccgtgatccgcggaagcacaagccactacgactatgtctgcaatgaagtatccaagggagtggcagcagtttcactggagagtgaaattccggttatgtttggcgtggtcacgacggaaaatatcgagcaggcgattgagcgcgcgggaagtaaagccgggaataagggatatgattgtgcactgggtgctgtggagatggtaaatctcatccgccagatttaaaaagaaaaggacaatgcaggcacgatatgaaaatataagccatgcagtattctgcaactaaccaaaattagttgataaaaactatcagaaaaaatgcttgctatttttcaatatgtcagatataatctttcttgggttagatacaactaacttccttgtgtaaatcattggaagactccttcgcaaacgcataactgctgagtgtgtttaacggaagtacagacgacgccattaccgcttccggaaggagttcttcgcatatcgaaaggagaacagaaaaatgaattatctggagattgaaaaagtagttggaagagaaattttggattcgagaggaaaccctactgttgaggcagaggttacattgatagatggtacaatcggaagaggcatggcaccaagcggtgcatccaccggtgagtttgaagccttagaacttcgcgacggagacaagagccgttaccttggaaagggcgtgcagaaagccgttgaaaacatcaacaccgtgatcaatgggacactgcagggcatggatgcatctgacacctatgcaattgacaaagccatgatcgatgcggacggaacgaaggacaagtccaaactcggagcaaatgcaattcttgccgtttccatcgcatgtgccagagcggcagcaatttcactggatattccgctttaccgtttccttggcggaacttccgggaaccgtcttccggttccaatgatgaatatcgtaaacggtggatgccacgcactgtcttccggactggatgtacaggaatttatgattatgccggtaggagccccttcctttaaagaatgtctcagatggtgtgcggaagtattccatgcactggcttctattttaaaggacagaggacttgccacatccgttggggatgagggtggttttgcaccggcactgaaatcggatgaggaagcaatcgagaccattcttgaggcagtaaagaaagccggatatgagccggggaaggactttaagattgcaatggatgccgcttcttccgagtggaagacaggaaagaagggcgagtacaaactgccaaaggccggaactgtatatacttccgagcagctgattgaccactggaaaaagcttgtggagaaatatccgatcatttccattgaggatgcactggatgaagaggactgggaaggatggcagaagcttaccaccgagctgggggacaaagtacagcttgtcggtgatgacctttttgttaccaataccgagcgtctggcaaagggaatcagccttggctgcggaaactccattctgatcaagttaaaccagatcggttccgtttccgaaactttagaggcaatcaagatggcacacaaagccggatacacagccatttcttctcaccgttccggagagacagaagataccacaatcgcagatctggctgtcgcattaaatacctgtcagatcaagaccggtgcaccgagcagaacagagcgtgtggcaaaatacaaccagttactccgtatcgaagaagaacttggcgcagcagctgtttatccgggtatgggagcatttaacgtacagaagtagtatccggatattataattgacaatatcaaatttttgttttacatacttcaattttttcttcttatttgagagagaccgtaaggtctctctcattttgtgcatgtatccgaaaaaagcagaaaaattttaaaaagtgcaaaacattgacgatacaggcataagaaactataatagggacagaaacaaaagagggagggaatcgtttgtgaaaaagaagggtaacatttctattaaagcaaaattacttggaattattattccggtagtaattgcgattatactgattctggtgtttaccgcatatcatgtatcatccggaattatcgagagttattccaaaaatttactggaatcttcggtaaacagtcaggcatcaaaaattgaggcatggcttgaggaaaatctggcatccatgcagatggcaaagaacatgattgaaaaattacacccggatgaggcgcagctgcagaccattttggatgcatcctgcggatacagtgaaaattatccggatggtcttttccttgcagatgccaatggcagctttttaaaaggtacagactccaaaaagcaggaaccgaatccgaaggaaagtatgtggtatcaggaaggtatgacaagagtgaatatggcggttggatctgcacatcagaatccggacggaacgaatgttgtcagtgcatccggacttttgaatgatggttcagataccgtgcgtgtaattgcagccgatatgacactggaccgtatttccgtgattgtaaattcttttatcgaaatgcacgatgcagaggcatttcttgtggacaaggacagcagcgtgatccttgcaagcagggattccgatctgatttccaagacactgggggcagacggacagagtgcgttttataaagatgtggagaaaaaggtttccggcaaatcgtatgatttctgtacactcgatggaaatatgacggtatttaaggaagtaaatggaaccaactggctgctggtttcctatgttcctacgaatgttgtacttgcggatctggcaggattgcggaatcttatgatcattttcagcattatttcgatccttgtattgtgtgttttgatcgaacgtgtgacgcatgtggtgattcgtccggtgaaggagatgacaagggtaattaccagcatggcatccggtgactttaccgtatccatgaaggtgaaaggaaatgatgagattgctgtgatggggcgcagcgtggaacattttattgcatcaatgaaggaaatgatccggcagatgggacatgtttccgaccgcctggaaaaacaggctggatcaagcaagaatgtttcgggtgaaatgaattctgctgcaaatatccagtcacagtccatgacggagctgaatgcaacggttgatcagctgtcggtttccgtcaatgaaatcgcacagaacgcaacccagcttgccggtgttgttgcggataccaaagaggacagcgataaagtagaagataagatgcgtaccactgtggaagtatcagaaaaaggaaaagccgatatggagagtgttggaaatgcgcttcataatatcgaaatttccatacataacctcgaagaagcggttgataaagtgggtacggcttccggagaaatcgtagatattataaaactgatcggggatattgcggaggaaaccaacctgctctccttaaatgcatcgattgaagcagcgcgtgcaggggaagccggacgtggatttgcggtagttgcctcacagattggggtgcttgcaaaaaacagtgcggattcggtagcgcatattacatcactcatcaatgaaatcaacggacttgtggatgatgccgtcaaacaaggcagaagcagtgccagcgatatcgaaagcagtgcggatctgattcatacagcggtggatacatttgaccagattttccagaatatccaggaaaccagccatctgatagagggtgtggtagaaaaaatcaaccaggtggatcaggtggcaaccaatgttgccgcaatttccgaagaacaggcggcaagttcggatgaaattcttgccacttcggaatccatgctccagcaggcaaagagtatttccaagaatagtgaacaggtcgaagaggaagccggaaatctggcagaatctgcagaccagctggcggatcaggtcaagcagtttcagatatagggagggtaaaaggtcatgaagaaagtaatcagttgtatgatatgcgccctgcttcttgtgggctgcatggcaggatgcggcagtaccggaggcaaatccggcagcggaaacggaatcaaaatcatgatgtcgttgtcacagggagatgatttccgcaacacgattgtggaacaggcaaaaaagacggcacaggaaaaaggtgcaacactggatgtctatgatgaggatggttccatggagagtcaggtggaacatatcaaacaggaagcaaaagaaaaatatgatgtgattttatgtggaccggtcaatgcagataccgcgctggaactggaatcactggcagacggaattcctgttatcttttataacagttgtccggatgcatcgtatctggaggccggaaaatatatgtatgtgggttccgatgaaaatgtagcgggacagtatcaggcagagtatattctggataagttttcttcttcggatgaaatcaatgtggcaatcttcaagggaccaaagaaccattcggcaacgaaaggacgtacaggtgcattgaaggatacattgaatgcgtccggcaagaaaatcaattatgtatttgaagataatgcagactgggatcaggcaacggcacagaagatgtttgaacttttcttaaagaccggacagtcctgtgatgttgtggcatgtaacaatgatgccatggcgatgggaattgtcgatgcatgcaaagaggcaggaataaacggcatgccgattctcggaattgatgcaacagccggcggatgtgcggcaatcgagtctggagatatggcgtttaccgtgtatcagtcaggcaccggacagggaaaaatggctatagaaacagcaattgcagttgtaaacggttcggatgtgacaaaactcgaaggagcaaccaaagatggactgtatgtatgggtaccgtttgaaaaagttgacagttcaaatgtaaaagattacgaatagacttgcaatcgtgcgtgcattttgggataataaaaaaagtttgaacaaaggtggacgtaacagtgagtcatagaataaaaataacggactttttggcaccggagctggatgtgtacgcgcggctgaccgaaaatcagctgctgaaccgtgcgcatccggaagaaggaatgtttattgctgaaagtccaaaagtgattgagcgggcactggatgcgggatgcataccggtgtctttgcttatggaaacaaaacatgctcagggagaagcaaaagaagtgatcgaaagatgcggggatattccggtgtatacggcagaatttgatgtgctgacaaagctgaccggttttgctctgaccagaggggcactttgtgccatgtaccggccgaagctgcaggaaccggaggagatttgtgccaaagccagacgcattgcagtactcgaaaacgtggtaaatccaaccaacgtcggtgctattttccgttcggcggctgcgcttcatatggatgcggtgcttctgacgccgggatgcagtgatccgctgtaccggcgcgccatccgggtaagcatgggaaccgtctttcagattccgtggacatacctgcagacagaaaacggggtgaaaaattcacccggccaggcggcaggagcagatattggacatctgcaccgaatgggatttcgtgtggcagccatggcactttccggggattcggttggaattgatgatccggcactggctgcggaagaaaagctggctgtcgtgcttggcacggaaggggatggtctggcaggacatacgattgcggactgcgattatacggtctgtattccgatgtcgcatggcgtggattcactcaatgtagcggcggcaagtgccgtggcattctggcagctagggagaaataattgtacaattaagcattaatgtggtacactatatattgtttttattagcttacaatacttttcaaaggagaaatatatatcatgaaactcggcattgtcggactcccaaacgtgggaaaaagtacattattcaactcactgaccaaagcaggtgcactgtctgcgaactatccgtttgcgaccatcgatccaaacgtaggaatcgtttcggttccggatgagagaatcgtaaagctcggtgaactttatcatacaaaaaaggtgacacctgccacgatcgaatttgttgatattgcaggacttgtaaagggtgccagcaagggagagggactcggaaaccagttccttgccaatatcagggaggtcgatgcgattgtacatgtagtgcgctgtttcgaggataccaatattatccacgtcgacggttccattgatccggcgcgtgatattgagaccatcaatctggaactgatcttttcggatattgagattctcgacagaagaattgcaaagattgccaagcaggcaagaatggataagacacttgccaaggaactggaacttgttgaggcagtcaaggcacatctggaagatggaaagatggcgagaacttttgaggtgccggatgatgatgacgcacagatctggtttaagggatacaacctcctcacggcaaagcctaccatctatgcagcaaacgtagcagaggatgatctcgccgatgatggagcctccaatccgcatgtggcaaaagtgcgtgaactggcaaaagaagaaggtgcagaagtatttgtgatctgtgcacagatcgagcaggaactttccgaactttccgatgaagagaaaaaggaatatcttgatgacctcggcgtttcatccagtggtctggataagctggtagcggcaagttacagtctgctgggactgatcagtttcctgacagccggcgaagatgagtgccgtgcatggaccattaaaaaaggaaccaaggcaccacaggcagccggaaagatccatacggattttgaacgtggatttatcaaggcagaggttgtcaattatcaggatctgctggataacggaagccttgcggcagccagagaaaaaggaatcgttggcatggaaggaaaggattatgtggttaaagacggcgatgtgattcttttcagatttaatgtctagtcaagaaatatgtgatagttatgtgggagcatatgacagagcagcagtatcaacatgaggttattgtgccggacaaaggctttccgtttaaactttttttattcgagggacacagcggaaaatatatcagggagaaacactggcaccggtcgattgagatttttgcagtgcaggaaggagaacttgattttattcttgacacaacgcattatcatctgggagaaggcgagttcatcattgtcaacagcaacgaggtgcatgcgatccatgcgaacaggccgaatcacacgattgtgctgcagattccgctgaatcagttcgcgtcgtactttacgggcgagcagtttatctggttttcgcacagtgaacggacatacgatgagcaggtggcatgtctgatctttcgtatgtatcaggtgtatcggatgcagacagatggctatgattttgaaattttaagtatgttttatcaactattacatattctggtgaagaaatacaggaagctggatgtgcaggatgaattgctcaaaagcaatcagcagctgaaccggctcggtatgattacatcctatctcaaggatcattatatggaagatatttcgcttggaaaactggcgggaatatttggatattcgccgtcttatctgtcaaaaatgtttgcacgctatgcgggaatcaattataaggattatctgcaaaatatccggctggaacatgcggtaaaggatttggaaaatacggataagcagatcgtggatattgcatttgatcatggatttgccaacagtaaagcgtttaccaatctgtttcgcaagcggtatggaatgctgacgagtgaataccgaaagcagcttgttaagaaaaagcagagggaatcatatgcccatcatcgggcattgctggaaaaagacaaaaaagtgacattgtaaagacaaagaaaggcatgtctccatggctaccaaactgttatactcagaaaaaatgagtatgaggaggtaatcatggagattttttctgttaatgatgaaaaattccgtaaatacggtaaggtttggaataacattgaatgcacaaaactgataaaggggatggagcacacaccgcttccggaggatgttatttatgtgtcatcagtcgaggagcttgaagcggttccggaagcaaagacattcagcgagcgtgtctttggcggacttccaatccagattggttactgcaacggaaacaatcacaagttaaacgcggtagaatatcatagaaattccgaaatcaacattgcggtaacggatatgatccttttattgggatggctgccggatgtaacggatgaatttacttatgatacagcaaaaatcgaggcttttaaggttccggcaggaacggtcgttgaaatgtatgagacgacacttcattatgcaccgtgcaacgcagcagacggtggatttaagtgtgttgtgatcttgccgaagggtacaaacacaccgattgattttacccttgcagcagatggtgaggacaaacttatgaccgcgaaaaacaagtggctgatcgcacatgaggaggctgccatcaagggtgcatttaatggattaagaggagagaatatatcactttaaccgtgcttgcggatgcgattgcttgtcctttgacagaaaaaaagctataataaaagaaagcttttgaagagaaggtagagttatatgaaaaagaaaatcgtatcaactttagttgtgattggattgcttattgtacttgggggatacagttacaacgttcaatataggcagaaaccggaaattaaacattttaccgcttttttcagtgttacgggcagaccactgggaacgcagaacgatataaaggaaatcattgctgacgagatcggagcagactgcgaggagaactggctggttggacaatccaaggaagaggtgctcaattcgtacattgcttcgggagaatatccggattttattcttggagagaaagcattactggaggcagatgctttgatcccgattgatgaatactgggatgattatccgaatctcagaaattatctttccgacgagcaatgggagcacttccggcaggaagacggacatatttactggattccaccgttttgtgtgtctcagggggagaatattgaagtaacgcatacgggcgaggcattctggatacagacgcgcgttttaaaatgggccggatatccgaagattacaacggtggatgaatattttgatctgatcgaagcttatgtgcaggcgaatccggtcatgccgggcggaacaaaaaatgttccgtttaccatgttgtgcgatgactggagattcttctgtctggagaatgtgccgcagtttctggatggatatcccaatgacggaagttgtatggttgatcccgggaatgatcaggtcattgattataatacgacggagactgccagacggtattttcagaagctgaacgaagagtaccgcaagggtatttttgatccgcagtcgtttaccagtacatacgaagaatatgtggataaattaggaaccggtgctgttctcggaatggttgaccaatggtggcagttctattacaatctggcagagccttatgagacaaacggactgagtgatctggggtgcgattatgttccgcttccgattacaatggacaaaggtacgtcaaaccagtggcatacaagccggaatgcagagatagatacatcgagcggactttcgattaccacatcctgtgaagatgtgcagggggcacttcagtttgtaaatgatctgctggattccgatattacgaagcttcgattctggggagaaaaagacctggactattcggtggacgaaaacggtatgttctatatgaatagtgaacagggaaaacgtcacggagacagcgcgctgaatgaatctcatttttgttcctattcgtattttccacgagtagaaggtctgcttgacgacggaatcaatgcattttcgatggagtatcagccggtggagtttatgaaaagcctaaagcccgacatacgggagtgttttgaagcgtatggtgtacaaaattatgtcgagctgctgggaacaaatgaagcgcccggcgcatggtatccgatgtattcctatacacagtctttgtcatcaaaatccaaaggcggcatgattcgtgatgaaatcgacgcggtcaagagaagctggttaccgcaggtgatcatgagcgatgacttcgcatcgacatgggatgcatatatggctgcatatcaggaatgcaatccacaggactatttcgatatcctgcagaggcatgtggatcagattcttcaataatacgacaattatgtgatataagtgatagaaataaaatcctcattcatagtgcgatatttttgatcgtacacggatggggatttttatttacgctgagcaatgaaaggacaggcagatggggagaagtaaatggaagtgttgaaattgtatattcatgtgaatggctgcgagaaggtggaatctgaatgcgctaccgtacagatgatttcgtttgacggaaggtgcgatggagattatttcagaggagagatccttccgggcggtgtggatacgcagatttattataaggatcagccatcaaaattatcggctcgttatctagtgcagggaatcgatcatacggggcgcggatgccgaatctttatcgaaaataacggaatcatgtatgccggtgagacgattaccagaccggtcatctatacggacagtattgcactgaaatggatggaaacggcatctttgtatggaacccttacggttgtggaaggacagccggtaatcacgatttatacggataagaatgaaaataatggaaaaggggaaaaagggagcggaatatgaaatttatcatagaacagagtgcgtattccggggttttgaagattgcaggaaaagttgcacatgacatggaacttgtgaccggcacgctgccggaaatccgtgttgtcgaaacgattgatcgtgaagaggtaagaagcagtgcagcccgtgaactgacgatcattgtcgcaacgatggagcatagcaggtggctggatgcacagaaaaatatcccgacggatgtgttaaaaggaaaacgggagtgctacggatggtttttcccggatgatggcttgcgggagagactgcttgtcattgttggaagcgataagcggggaacaatatacggactgtttcatttgtcggagatctttggtgtatccccgtttgtgaactggtgtcatgtggtgccggtgcatcgggatgaaatccggctgagcacggatatggcatgtatcgcaaaggaaccatcggtggaatacaggggattctttatcaatgatgagtggcctgctttcggcacctggagtgagtaccattttgggggaccgaatgcgaaggcatacgagccgatctttgaactgcttcttcgcctgaaaggaaattatctctggccggcgatgtggagtgcacggtttgaggatgacggtccgggacttctgaacgcagaacttgcggacgagtacggtgtgatcatgggaatgtcacatcatgagccgtgtctgcggcagggtgaggaatacaaatatctgcgcggaaaagacagtatttacggagatgcgtggaatttcaagacgaaccgggaaggaatcataagattctgggaagatggtctgaagcggagcggtaaatttgagaatgtgatcacggttggtatgcgtggagaagcggacaccgcgatcatgggaaaaggggcaacgcttgcggacaatattgaactgctcagggatgtgctcagaacgcagcgaaagctgatccgggagaatgtcaatgaagatctgtcgaaagttccgagaatgatcgctttgtacaaggaggtggaggctttcttctacggggatgagacgacgcaggggttgatcggatccaaggagctttatgatgtgatcctgatgctttgcgatgacaattacggaaacttaagaacgcttccgacggaggagatgcgtaagcatccgggcggatacggtatgtattatcatttcgattatcatgggtggccgacctcctatgagtggatcaacagttcctatcttccgaaaatctgggaacagatgacgcaggcctatgatttcggagtacaaaaactctggatcgtcaatgtgggagacattgcaacgcaggaatttccgttatcgttttttatggatctggcttataattttaagcgttggggaacgactgcaccaaatacgacggatgcctataccagactgtgggtaaagcggcaatttggcaggctgtcggaagtgcagcaggcgcagattgcggatatcctgacggattatacaaggatgatacacaagtgcagaccggaggcgttaagaccggaaacctatcatgcagcaaattatcgtgaaggttcacgggtgcttgcggaggtcgggcgggtgatgcagaccgcacaggatttgtacgatgagctggagcgtgttgcgcccgaaatacttcccgcttatgttgcgctcgtctggtatccggcgatgggaacgatgaatgtgctgaagcttcagctgttgtccggaatgaatcattatctggcagaaatcggtgcactcagtgccaatgattatgcgaaagaggcaaaggcatgtctggatgccgatcaaaagatcatagagcagtatcatcggacagatgatgcgcgctggtacggaatgggactgtcgcagcatatcgggtttacgaattggaatgaggatgagtgtaagaacccgcttctgatgcaggtgttaccattgcaaaaacaggcggtcattgcgacggtggacggaaccatgcagcatgtggaaggcagtccgtggctgaatcagagaatgacgatttcggatttcttgaatccggaatgtgaatgtgcttcgatcagcctgtacagcagaagcgaacttccagcatcgtttcgggtgatcgaaaagcccgaatggatcgtactgtccgcaatggacggaacgcttgacggtgaagagcacaagaggctcaccattgatgtcacagtggacgagagtgcgcttgcgatggcactcaccgatggaagaacgcagggaatgatccggctggaattgccggcgggcatctgcaagatcagcgtgccggtcgaccggtcaacgtatgaatatggaaacaatacgtttgtggatacacagggatggatcgcaatcgaggcggaacattacagcagatgcaaggacggttttgatcgggaaggacaaccgatgcaatggaaatgtcttgccggctacggaaagactttatctgcgatgaaagcatttccgacggattcctacgcagatgcagagaatggggcaccgtatatcgaatacagcatcgtgacaaagcaggcgggggattatgaagcggaattctatatgcagccgtcgaatcctgtgacaacagagaaccgattgcagtatgcagtgtccgtgaacggtgttccaatgcagattttggatgccgttacggatgattttaagatcggagatcatcagcctgtgtgggcgcgcggtgtgctggatcagatccggcgccggagtgtaccggtgcagctggaacagggaatcaatacgatcaggatcactccggtcacgccgggctttgttcttgagaagatcgtgatctatccccatggaaacaaaccggcagaagcctatcttggaccgacagaaacgtatcggtgcaggagctgatcatatatcaatacagtgaggagcatgtcagtccatttgcggaaaggaaatatggcatgggctgaccgaaagaggaaggagaaaaatatggcaggagcttatgaaacaaaacagtaccgcaatgtatttgcggagtatggttattcggaagaagaaatcgaaaaaagagtacaggagacatttgagacgatttttcatggcagcgaagaggagcgcttttaccatgaagccggggaggatatgggatttatggaagataccggcaatcatgatgcgcggaccgagggcatgtcgtatggcatgatggtctgtgtacagctggataagaaagaggaatttgaccgtctgtggaagtggacaagaacttatatgtatatggatgaaggatcgggaaagaattattttgcatggtcctgcgctttggacggcacaagaaatgcggacggaccggcaccggacggggaagagtattttgctatggccttgttctttgcatcaagaagatggggagacggagagggcatttttaattacagcagggaggcaaaagcgattctgcatgagtgtgtgcataagggagaaccgggacatccgggcgatccgatgtgggagccttccaacaaactgatcaaatttgtcccgggactggatttcagtgatccatcgtatcatctgccgcatttttacgagctttttgcggaatatgccgatgaggaggatcgtaagttctggaaaggcgctgccgaagcaagccgggcctacctgcataaagcctgtcatccggataccggattgtctgcagaatatgcggattatgacggaaccccgcacagtgcgcatcaggagatcttcggccgccacgactggtattacagtgatgcctatcgtacgatcgcaaatatcgcgatggaccatctgtggtttgacaaggacccgtggcaggtgcagattgcagagaaattccagaaattctactgcgaggatcagaaggatcactgggacggtgtctttttgaccgacggaaccagactggaggagaaagcactgcatccggtagccatcattgcggtcaatgccgaaagtgcactggctgcggacggaacttatgcgaaacaatgtgttgacaaattctggaacacacctcttagaaccggtgagagacggtattacgacaattttttgtatatgtttgcgatgcttgctttatcgggaaattaccggatctattagaaatgatgattagaaaatgagatattgggaaaggaggagaaaatgggacacagtgaggaaatgatccaaaaggcaatcgcacaggaaaacggcaaggtacatgtgaatgcacaaagcattccggaaaaatatcagcagaagagagccgatgaggccggagtgatcgagcatatccgctacccgtcaaaagattattttctagctggaaaagaaatcacaaaggaagcaaatgtttatcttccgtatggttacagccgggataaaaagtacaacgtgctctacctgatgcacggaatcggcggagacgaagccgagtggggaatggttgatgaggattcgctggtaaaaagaatgatggacaatctgatctattacaaagaaatcgagccgttcatcgtggtgacaccaaacggacgctccaccgaaaactgtgcaagagaaggttcggattataactcgttttatgtgtttggcaaagaactgcgttcggatctgatcccgtatatggaagcgcactattcgacctatgcggtggaaggcgatccaagtgcttcaagaatgcacagagcgatggcgggactttcgatgggagggatgcagacgattaacatcggaatcggagaatgtatggatctgttcagttattttggtgcattttccgcagcaccgaccagcaatctggcggagaagacggcaaaaatattagaggatactccatataccgttgattatttttacaatatctgcggaacggaggatgagatcgcatatgacagcgcggcagcagctgcaaagaatcttcctgctctatgtgataaattaaaggaatctgataatttcatctggcaggaattaaaaggcatgcatgattttcatatctggtatcttggctttttcaattttgcacagatagcttttaagtaaattgacgcgcggtgttattttactagtaaatgtaaaatttcgccgcgcgtgatttattttatgtacaacgttaaaacaagcagaataaggattggaagtgtcccagcatgtgggacaaaaatcactaaaacatcacaacaaattacactccttgttcaaaatccaagccggcaaacccgaattgttttactgcaatttgtcggctgttcttctatagtttttccctgtttttgtcggctttgattttgttactattaagatgcacgaaaatctttttaaggaggaaaataggagtgggaaaaatgtggaaaatgggggcgtgcattgcactatccgcggcaatgacactcacgagtacaggaggtatgctgccgtcggattggggtattgagacggtatatgcggatgagacacagacaacagccaagacgttcaccgcggaacaactggaagtgatttggggaaatgcagagcataaacttgaggatggacaatggaagctttcctttgcaaatcaatatgatcaggtgaaatggaaagtgccggaggcaattgcactttcggatgtgaagtctgttacgtttcatgttgcagatcaaaaaggatccgttactttaaaagtgtataatggtggagatgatgcagaagccgctaatacgcagtatggtttgacaggaagcgaagaatatacgatggaaccatctggagaaggtagtgttgatgcagttggacttatgacaactgacgaaactggatcaggttcggaagttagtctgatcagtgtaacatttgaattaaaagaaggaagcggaagcccgattacctatggcgataacatcatcaaagacggcgatttcgcaagcaacgaggcagccgcttcatggaatgcatcagttggaaattcgaagatcaccgttgaggaagaggagaacgaaatcggtgacagcggcttgaagacttatggtgtgatcaatcgtgatcctgctaccgctacatcgggagactgtttctcacaggatattacagacgctgtggaactcggtgaagagtatcagtattcgttctgggcaaaactttcggacgtatacaaagatgcaccggaagaacagcgaaatgttgattttgcgccgttttatgtatccggtggagaagcaacttatcttggaagttattcgacaggcgttctttccggagaaattacgaaaacacttaccgcaggagagtggacgaagttttccggtacattcaatgttccgaagaccgcggatcagattgtgatccgtattattgaacagggtacaaactatggacagggtgactgtgtcaagggcgcgtactgcgtgaccggtgtgtcgatgaaaaagattacacggccaaaaccggagattgaaaaggacattccggaatggaaaacatccgttacagaaagtcttggaaatgattcgatcgcaggtactgccatcatgttaagtgagatttcagatgatacgttgatggaacttgtcgagaagcatttcaatgcggtgacattcggaaacgagttaaagccggatgcactttttaattatcagattgatggcaattcagtaccaacaaagaccattacattcgaaggagaagaacttcaggttccggttgtgaacgatgcaggagacagcctggacttttcccgcgcagatgcgatggcagataagatccttgagtggaacaatgcccatccggatcagaagatccgtatccgcggacatgtgctggtatggcattcacagacacaggaatggttcttccatgagaactatgatattacaaagccatatgtgaataaagagactatgaaccgcagactggagtggtttatttccagtgtgtttgatcattattttggagaggctgcaaacggaaagtatgacggactcttctatggatgggatgttgtgaatgaggcagtcatcggtaacacctatcgtaccgataaagtgagtgccgcagaatcgctcagtgagatccggcatggaaataactcaagctggtggcatgtgtatgagagcaacgagtttatcatcaatgctttcaagtatgcaaacaaatatgcaccagcgaatgtagaactttactacaatgacttcggagagaccgacaacaccaagtgtgagggtatcgtaaaactgatcaacgatgtgaagtctgcagaaggaaccagactggatgctttggggatgcaggcacattacaatgtggacggtttctcagcagcacagtttaagagtgtagcgaagaagtatgcacaggcagccggcaaagtgcagctgactgagctggattttaaggcaagcagtacctacgacggtacagcggctacaaaggaaagcgaatacacaaagatggcatactgccataagaatctgtatgaggcgatcaaggcgttaaaggcagaaggagcaaacgtatccggccttaccgtctggggggtcattgagccgaattcatggctgcattcccagtcgaatctcggtggcggagcaagcggctctgcacagtgcccactgctttttgacggaaactataaggcaaagcctgcttattgggcttatgtggatgcaacgaaacttcagccggcgattcagaaggttaccattacagaggcgaaggatggaaatattgcaggagaaacctatacgatcgatcagggtgcggtacaggcagaatttatcccggtttgggatgcagacggtcttaccgtacaggtaaaagtaaaagatacaaccgtaaatgacgcagatgccgttacggtatatgtagatccaaaaaattcggcatcggatatcacaccacataaggtgacggttgcaagaacagctgctgctgcgatcgcaggcggatatcaggcaaccgtcaaggtttcgatgaagggtttgaaagttgcacagcagatcagtctcgatgttgttgtaaacaatgacggggagacaggaagctttaatgatctgaccggaaagcaggagtcaagcagcaagtattatgcagtggcaaccatgaagccgggcatcgagaagatcccgtacggaataatttcgattgacgcagatgcagatgccgcatggggcaatgcggtaaacatcccgcttacgatcaacaaaggctccgaggcttctgccaatgcaaaggttctctgggatgatgacaatctctatgtatatgcaaccgtaaaagacgcggtattggataaaacaggcgctcagacgcatgagcaggattctcttgaagtgttcatcgacgaggacaacggcaagaccgcttcctatggagaggacgataagcagtatcgtatcaattataacaatgagcagtccttcaatggtaaaaaatgtctggcagagaatgtcaagtctgcaacaaaaacaatcgatggcggatacgtggttgaggctgctttcaagtggacggatatcaagccggcaaacggagccaagattggtctggaattccagatcaacgatgcaaaaggcggcaagcgtatcggtacgttaagctggtatgatgagaccggaatgggttggtcaggctcaaacgtatatggtacggtcgaattaaccggaaagaccggcagcaatggcggcggctcgtctgtaaatccgggaatttcggatacgaagccggatgtgaaaccggacggaaaacaggatgcgaccattgagacaaagccggacgaatcaaccgttgagacatccaaagtggaaattacagtttccggcggtaagaaggctgaggcatcggtaaccataacaaaggatgtgcagggaaatgtgaccagcgcaaatgcaacggtatcgggatcaaagggaacacttaccgcagatgtggtaaagcagcttaccgaggcggcaggaaccgaagatcttacgatcatcgtgcaggttaagaatgcgaatggtgatgtgaaatacacggtttccgtttccgcaaagaatgtgaaaaataataaatcactgaaggcatttgttgtcaactgtaagacgggtgaatatgaactgatcaacagcaagacctataaggctaaggatggaaatctgaatgtaagttttggaaagaagggcgattatgtacttctgacgacaaaggaagcagccagaattgaaaaagaaatccttaagaccatcgctccgaagaaaacaaaggcaacggttaaaaaaggaaaaacaacggagtttaagcttgacagcaagctgaatcagaacaatgtaaagaaggtaacctacaaaacttccaagaagtcgattgctaccgtaaacaagaacggtaagatcaaagcaaacaggaaaggaacggtaacgatcaaggcgaccgtgactttaaagaatggaaaaacaaaaacggtatcaatgaagatagccgttcgatagaaaatattgacaggaatacaattactatagtttgtcggtaattattccataaaaagccctcgtgacgcaagcgggggttttttttataatcaaatcacaagaaaagcataatcccaaaagaaatcaagcagtaataataagaagtggccggagtggatcttttgaagagtgcatgcgcatgagtgatatagaaatgtataaagaaaagaaagcaaagaaagtagggaggtaatgattatgaacggaccggcagcaccaaaggatccggagaagaaaagaccatatttttacattatgaaggataaagaaatcttcggagcaaaacaggaagacggaagtgcgattcattttatctatgagagtgacggaagactgatcaacagcgcacagatcgtcggaaatattacggatgagaacatgcttcggttgttggagacggtggagggattcggcaagcttgtacacagtatcggggtgtctgttgagaccgacaatccaaaggaggagatggagttcattttccagatgtacgggaaaaaagatctctacggaggcggaaccaatctgcgatgcagcctgaccggagacggaatggaacggcgcatttatctgtcggattatacatggacagaggatgattatattccgggacagatcaagttcatcatgagcgtaccggaaaagatgggaaaagcgagcgttcggttttatctgaacgacggatatacggctccggaagaggtggaagaagaagcggtggatacgaaatcggaactgtactgcacgatgatcgagcgttctctcatgaatctgggcaacacctaccgtatccgcaaagcgatcgagaaggcgagagccggaaaagaagtaacgcttgcctatatcggaggttcgatcacgcagggggcgggagcaacaccgatcaataccgcgtgttatgcctataagtcctatcagcttttcaaaagcagatttgcgatgagagataacgttaaatttgtgaaagcgggcgttggaggaaccccgtcggagcttggaatgctccgctttgacagagatgtgttaagagacggcgagaagccggatatcgtagtcgtagaatttgcggtcaacgatgagggcgacgagacgaagggcgattgctacgaaagccttgtgcgcaagatcttaaagctggattggaatccggcggtcgttctgcttttttccgtatttgccaatgactggaatctgcaggatcgcttaagtccggtcggcagactgtatgatctgccgatggtcagtatcaaggataccgtagtggagcagtttacaaagaaaccgaatgagggaagggttctgacaaaaaatcagttcttttacgatatgtttcatccgagcaacctcggccataccattatggcagactgtttacagtatctgtttgagcgctgtgatttgagcgaacatgcaagacttgacgcttttgagagcggcctgaccgaggagggaatgcttgcacagcagctgcagatgaagccggcaatcggcaaaagctttgagcatgtacggcttctggataagaaagatgtctatgccggggctcaaatcgacgccggtggcttctgtgcaacggatgatcagctccagagtgtggagatggatgaccggttagaattgacaccggagtttccgtacaattggatgtacgatgcaacgatgccggagaatgctgtctttacaatccgcatccattgcaaagcgcttgtgttgatctttaaggattccggagaagtggacgttggaaaggcgtatgtcgatgtggacggtgagcgtcgcatgacggcggatccgcatattaacaactggcagcactgcaacgcgatgatcgtgttcaatgaggatgaaagcgccgaccatacggtacgcattgaagtcgcagaagaagacagagacaagaagtttacaattttaggatttggttacgtgttataaggaggagtaaaatggttacagttaagaatccgattttaatgggattttatccggacccttccatttgcagaaagggagaggattattatatcgtcaattcaagttttgtgtatgcaccgggagtgccgatctttcacagcagagatctcgcacattgggagcagatcggtaatattttagaccgtccgtcgcagcttcctgtggcgggagcggatatctcagatggtatttatgcgccgacgatccgctatcatgatggtttgttttatatgatcacgaccaatgtgacgcacggcaacaattttatcgtcacagcggagaatccgcaaggaccgtggtccgagccgtattatctcggcgacgatgccccgggcatcgatccgagcctttttttcgacgatgacggcaaatgttattattgcggaacccgtccgaatccggagggcgttcgctataacggggactgggagatttggattcaggaattggatcttaagaccatgaagctggtcggtgagagcatggcaatctggaaaggtgcggtaaagggatgtatctggccggaaggtccgcatatttacaagatcgatggttattattatctactccacgcagaaggcggaaccggtccggaacatagtattacggtggcacgcagtaagaagctgttccagtggtttgaaggctgtccgcgcaatccgattttcacacaccgcaatctcggtatggattatccggtcatctatgcgggacatggagatctggttgatgacggcaagggaaactggtatgttgtaatgcttgcatcaagaccttgcaaaaagcatagcagcatggggcgtgagactttccttgccagggtgatctgggagaacggctggccggtgatcgctccgggagtcggacatctggaggacgaatttacgatcgatatgcctgagcatcgctttgcggaagaaattacgaattccgatgtcattcatttctggggagaacagctggatcagcggctggtggcgatcgaggactggacatccggaatttattcgctgaccgaacgtgagggtgcacttcggatgtaccttcgcaaagaaaagatttccgagagagcaaactgtgcatatcttggtgtaagacagaagagttaccgctttgtcgcagagaccggaatggaattctatccggacaatgagtcggagacggcgggacttgtgctttaccagaataatgaaaatcatctccggtttgaagtggtgcgcgtggatggagaagtttgttttgtggttaccagctgtattcacggagatgagcagacgctggcaacaacacggctggagaagaaaggaaaattaaagatccgcctgcagtgccgcaatcagtgtgcccgtgtctggatttcggaaggcaaaggatatgtatccgttgcggaaaatctggatcttcttgcttacacgacagaggaagccggaggctttgtaggatgcacagtcggtgtatatgcgtcttccaacggcagtgacagtacaaattatgctgattttgaatggctgacatgccagtcgatggattgatagaaagtgtttaagatgagaaaatgaaataatgagtagacagacaaaagaatatgcaaagaaactggttgcacagatgacggttgaggaaaaaatgagccagatgctctatgagtcaccggcgatcgagcgacttaatattccggcatataactggtggaatgaggctttgcatggtgttgcaagagccggagttgctacggtatttccgcagtcgatcggacttgcggcgacatttgatccggagcttgtcggacaaatcggggatgtggtatcgacggaaggccgcgcaaaatttaacgagttttcacggagaggagatcacggaatctacaaagggttgacgttctgggcaccgaatgtcaatattttccgcgatccgagatggggaagaggccatgagacatatggcgaggatccgtatcttacggcggaactcggatgcgcgtacatcaagggattgcagggaccggatccggatcatctgaaatctgcagcgtgcgcaaagcattttgcggtacacagcggtccggaagcgatccgccatgaattcgatgcaaaagcgtctaagcatgatatgtatgacacttatctgtatgcgtttaagagatgtgtcaaggatgccaaggttgaggccgtcatgggcgcttacaatcgcgtgaacggagagccggcgtgtggaagcaaaactctcctgaaggatattttaagagatgaatttggttttgaaggtcatgtggtatcggactgctgggcgattcttgatttccacgagcaccatcatgtgacagagagcgtcgaggaatctgcggctatggcagtaaacaacggctgcgacctgaactgcggaagcgcctttttacatttgcaggaagcttacgagaagggacttgtttccgaggaggcgatcacaaaagcggtggagcgtctgatggaagttcgtattcgtctgggtatgatgaaggattatccgtccccgtatgaagacattacctatgataaagtagaatgtccggaacatgtgaagttgtctgttgaagcggcaagaagaagtcttgttctgttgaaaaacgagaatgcgttcctgccgttggataaaaataagatacagaccgtcgcagtcatcggtccgaatgcgaattcaagagatgcgctggtcggaaactatgtcggaacctcttcccgttacattactccactggagggaattcagcagtatgtgggggatgatgtgcgtgtattatatgcagaaggctgtcatctgtacaaagacaaagtggaatttctggcagagacgaaggatcgattcaaggaagcggtcattgcggcggagcaggcagatgttgtagttatgtgccttggtcttgacgcgacgatcgaaggcgaggaaggcgatgccagtaatgaatatgccagcggggataaactgggactcaatcttccgggacttcaggaagaactgctcgagacggttacggctgtcggaaagccggttgtgctcgtgatttcggcgggaagtgcactcgatctctcatgggcggatgcgcatgttgctgcgattattgacagtttttatccgggagcccgtggcggaaaggcagtcgcagaagcaatcttcggtgatttttcaccatccggaaagctgcctgtcaccttttatcagggaacggaaaatcttccggagtttacggattatgatatgtccgatcgcacatatcgttatacggacaagaatgtgctctatccgttcggttacggattgcattatggaacgatccgttacgagaatgcacagatttcctgtgcgcagtgcagtgtgagagatgccgtcgatgtgagtgtggatgtcataaatgagagttcctacacgatccatgagagtgttcaggcgtacattcagcatgaggaagcggatgcgtatgaaccgggatatcagttgaaaggaatacagacggttacattacagccgaaagagacgaagcgtgtgaccatatctcttaaggcacgtgactttgcgattatcacgcaggagggagaatgcgttgtaagaccgggatcttaccgcatcgcaatcggaggtcagcagccggatgcaagaagtgcaaaacttaccggaagtgacgtggctgcgctggtggtccgcagagagggtgcgcagacaccggttgagtattagcgtgcagaaatatcaagaaacaattttaaatatagtctcgtatatgttataatgaatttaatcggttgtacgaatgaggagcaggtcgaaaaatctgctcctttatcgctttgttgtgtgtgaatttagaggggttggtatgaatatcatcgaaaagttcatcaaggtattggaaagatatatggataatctttctattaagaaaaaatttatacagttatacattttctgtgttttattaccgctgatcattacggacagtgtcgtcttatatattgaagacagcatggaatcgcagcggcagtatcatgagatggcaaacgttgcgaatgcagtcagctataatatcagtgcactggtggagaatgcgggagaaattgccaaaagtatgtacaccgatagaaggatgaatacctttttggagaagcaatatgagagcacttcggattattatgcggaatatcagaatttctttcaggattcgacgttggaaaacgtactcggcatgaatcagatcgtctttaccctgtatacggataatcctaccgtggtaaagggtggaaagattgataatatgtccaatctgaaggaaacggcagcgtatgaagcgtggaaggaacgaggcgaaaatgaaggacttttttttgtatatgagcgtaagagatatgccaattcctatcatcgtaagatcatcctattgcagaatcttgattttttttccaagaataaggaaaagatgctgcaaatcgaatttgattataacagtatgatgcggatgctgagacgaatgaagtttgacaatgaagttcttatttgtcaaggggatgcgatcgtactgagtaacggacctttcagtggtgtcggtaaaaaatttgacatgatcagtgtacagcagaagatgggatacaaacagaccattacacttcacggagctaaacttgatatttatgttttaaaagcggataatagagtgcggagtaagattgtgcgttttcttccgattcttggttttctggtgatcatcaatgtggttctcccgatgggatttgtgctgcttctcaatcattcgtttacaaagagaatccgtgggctgagcaaagtgttccagtctgtcaacggtgagcatcttgttcagatggcacacgaagacggtagggatgagattggaagcatgatccggaattacaatcggatggtcaaacggaccaatgaactaatccagaccgtatacaagaacaagatcaaagaacaggaaatccttgtcggcaggaaaaatgcagaactattggcattgcaaagccagatcaatccgcattttctgtttaatgcgctggaaagtatccgcatgagaagccttttgaaggaagaaaacgagacggcagatatggtcgaaaaactggcgatcatgcaaagacaatatgtggactggggaaatgattcggtagagattgaacaggaacttgaatttgtaaaagcgtatctgtccttgcagaaatatcgttttggtgaccggctgaattacaatctcgagattgatccggaatgtgcgcagatccggataccgaaacttacaattgtaacttttgtggagaacgcctgtgtacatggaatcgaaagtaaggcatcaccgggatggattttcgtaagagcttataaaagggaagaacaattatacatcgagattgaagatacgggaagcggaattgaggagcagaagttgtatcagatgcagcatgatatgcagaatgcggatattgagatgctgaaaaacaagaaaagcgtgggaatgctcaatgcatgcctgcggcttaaaatgtacacagaagatcatgtgtgctttgaaattgaaggcgaagagggtgtgggaacatggattacgatctgcattccgatggagtatttatcatttgctgaaggctgtgttaatggaccggtgtgcaaaagggggaaagaaatatgttaaaggttttgcttgtagatgatgagccttttattattcagggattaaaagtgctgatcgactgggaacaggaaggctatatgattgcagggactgcatcaaatggaaaagaggcatatgattttctgaaaaaagagagtgtagacctgataattgcagatattcagatgccagtcatgacagggctggatctgcaggaagcgatacgaaaagaaaatctatcgaatgcatattttgtcatattaagcggatatgcggatttcgagtatgcaagaagggcgcttcaaaatgaatgtacggattatattttaaagccggttgaccgtgatatgctgctgaaactgcttaacagggtatctgcgatgcgtgatgaagatgaccggatgaggcagaagaacaataaaatggaaaaggcatatcttgcaagaaatcagattgctttgatcaagggaaaatacgatgattccaatctgcaatatgtcacatcacagatgaaatgcaaagaaggtgtccgctacgttgaaattcagatggcgggatgtgatgcggacgaagatgtgacggatcaggagatgcgcgaattccaaagacagatgtatgaatgctgtactgcattcctgaaagattatgcggagaattgtgtgtttgacgcatcggcagatgaaaaaatatatgatgtgggattgatcttttttcaatatatggcggaagaggcaggactcgatgaaaacgcttatctgaacgggttggtggaatatctgggtgagaatctgtcgcgcccggttacgatgctggtcgggaaaaaggtgcaggatatcagccttattgcaagatcatacgggaatgcctgtatgcttcgttcctttcagggatttcgaagcaaaaaggacatctatttctacgaggaagaagtgcaggtgtccaatgacggtatggttttgtgcaagaagagtcttgatgatttgctgaaggtagtggagcagaacaatcatatggaaatccgggcggcggtggaccgtttctatggagaaatgagtcagagaggcctgcgtggggaatccatgacgcttaatattaactatctgctttttcagttgatccatcttgcaagcgagcaggatgatgaggtcaatcaggaagaaatcctgcgtctgatttcggagagcagctttgaaacaggaacgatgcgcggcagtaagacacatctgatgcgtttcgcctgtgagtacggagactatctgtcccagcttcgcaagaatgtatccagaggtgttctcggaaatgtagagaaagaaattaaggaacattatgcggataacctcacactcaaggggcttagcgagaaatattatgtcaacagcgcctatctcggacaactgttccgaaagaaatacggtcagtcgtttaaggattatctgaataattaccggatggatcaggctgttgatcttcttctgcattccgataagaagattattcaggtggcggaagaggttggataccatgatctggattattttgtcaaccgctttattcaggtaaaaggatgcacaccggcaaaattccggaagcagatgcagcagtaaaatggaatagaaagagatggaaaacagggtaaattatagtccggcagaatgaactatagtttaccctgtttttgactataattcgtcggattgtttgaaatggtaaaaaaagtaaaatagttaatataaagaaggaggtacattctatgaaaagaaaaagaatgctaagtgccttgcttgtagtagcgatggcagcaaccatgttcgccggttgcggaaataaaggcggcagcaattcttccacacagggtggaaaagcagcaaatgatggagatattaaagagtttacagctttctttgctgttccgggatccgagatcaacgatgataacgaagttcagcagatcatcgctgagaagaccggcgtaaaggtaaaagagacatggctgacaggccagacggcagaagaagcaatcggaacgctggtagccggtgatgaatatccggatttcatctgtggtggaaatggtatgccgcagttatatgatgcaggtgcattggtagcattagatgattacattgacaaatatccgaatatcaagaactacttcaccgaacaggaatgggatcagcttcgtcaggacgacggacatatttactggattccacagttctccaatattaagggagaagagaaaacctgtacgcataacgatgaggcattctggattcaggcaagagttcttgagtgggctaattatccggaaatcaagacgatggatgattatttcaagctgattgaagattataatgcagcaaatcctaccatggaagatggaacggagaatattccatataccatcctttgcgaggattggagatatttctgtcttgagaatgctccacagttcttagatggttatccaaatgatggttcatgtatggttgatccggatacattaaaggtaatggattataatacatctgatactgctgtaaagtacttcaagaagttgaacgaggaatatcagaagggtattgttgatcctgagtcattcacacagacttatgatgagtacattgcaaagctttcttccggacgtgtacttggtatgatcgaccagtggtgggatttcgcctactcagcaggtgatgcaattaagtctgcaggactggatgcacagggatgcgattacattccggtacctgtaacgattgatggacgtaagaaccagtggcacaactccggcggagttttaaattccggtgatggacttgcaatcacaaaggattgtgatgatgtggaagcagctttacagtttgtagatgatcttctttcagaggaaattcacaaccttcgtttctggggcgttgaaggtgaagattatcaggttggcgacgatggacttttctatagaaccaaggagcagagagcaaaggctgcagagacggattataaggcatctcacgcatgttcttattcctattttccacagtatgacggaacctgtgatgacggtctgaatgcaacaaagccgagtggacaggcaaaagaattctttgacggattaaatgatgatgtcaagaaagcattcaaggcatatggtgttgaaacatacgttgagatgcttggaacaaacgaggcacctggtccatggtatccgatgtggtcattctcaaacaactttacaacagacacagagggtggaatggcatggaccaagattggcgaagttaagcatgagcagcttccgcaggttgtaatggcaaaagactttgacagtgcatggaaaacttatatggatgcatacaatgcatgcaatccggacgctttccttagcgagttgcaggcagagcttgataagcggatgaaagacgcagcaaaatacgaataatacatagagaatgaggttttagatgggcagatgttgtgaaaactccatctgcccgtttaaaaaaggagtgaggtcatgtctatagagagaacaaaatcaaaacagaaagtgaaagaaccgaagacgaaaattacctggaaagagattaaaagacagaaagtattattgttctgggcggcaatcatggtagtgtatggcgtggttttctattacctcccacttgcaggctggactatggcgtttcaaaactataaaccgagacttggtatctttcattcgaaatttgtaggattggataaattccggacattattctcggatatgacttttatccgggtaatcagaaatacgttggcaatgggtgttatcaatctggtggtaacatttattacagcaattgtttttgcaattttattaaatgaaattaaatccaaaggcggtaaaaaagtcgttcagacaatttcctatcttccgcatttcctttcatggatcattgtaaccggtatcttacacgatatgttatccggtggcggaattgtgaacgaattattacttaacttccatattatttcacagccgatcaatttctttgctcatccgggttatttctggccaatcgttgcatttgccaatgtctggaaagaaacaggatggaatgcaattatttatttggcagcaattacttcgatcgacccgtcactttacgaagctgcagctatcgacggtgcaggcagatgggcaaaaatcaagcatgttacacttccgggtattaaaccaaccattatcattcttcttctgatgaatgtaggtaatgtactgaacgccggttttgaagttcagtatttgttaggaaacggtctggttcagaaagtatcacagacaattgatatttacgtattaaaatggggaatcagtcagggcgatttcgcaatcggaactgcagccggtatcttcaagagtttcgtaagtattattctgatcgtgattgcaaaccagattgcaaagcgtaatggtgaagaacaattgttctaaggaggttatacaatggcagcaaaaaaagcgaaaaaaaaggtgcagatttttccgattgtcaatacgatcattatgatcctgtttgtaatcattacactgtatcctgtgttaaatacattagcaatatcattaaatgacggtacggattcccttcgtggaggtatctatctgttaccgagaaaatttacatggaagaactacattacggtacttcagaaagacaacctgatcacaggtgcttatgttacggttgcaagaactgtgatcggaacagttcttgcgctgatctccaatgcaatcctagcatttatcgtcagcagaaaaagatttatgtttaaaaagcagctctctttattctgggttatcaccatgtatgtaaacggaggtctgatcccgacattcctgttgtacaagggactgggacttaccaacagcttctgggtatatgttatccctggaatggtcagtgcgtttaacatgctggttatccgtacttatatgaacggtatcccggacagcttagaggagtcggcacagctcgacggtgctgggtatacgacgattttcctgaaaatctattcaccgctctgtaagccggtatatgcaactgttgcattgtttgttgcagttggtcagtggaattcatggtttgatgcaatgttatataaccgtatgaacggcaaactgacaacattacagtatgagttgatgaaactactgtcatccgtaacaaatacgagcagtagtgtcgaggcaatgaagaatgcagcgggaacggttacaccgacatcggttcgtgcagctgcaacgattattacgattctgccgatcatctgtatttatccattcttacagaagtatttcgtaacaggacttacgcttggtggcgtaaaagaataaaacttaaatcttccctttttataagctgtgccgcagaagtggcacagcttatatattataatgtggtagtgcgcggagtcaggcttgttgtaataaatgccatcggggcattgcaggtgcagcacagaggagataatgaagggcttccagaccgtgcacagctaaaggcggcaatctctgaaatgaagcagcgtgcataaacataaaatacagctaagacgcatagaatattccaagaaagaaaagcaggagtgttctgtgcgtttttctgatttatgtgaaaaagaagtagtcaatgtaaaagactgccgctgccttggcagcgtccgggatctggacattgacaaggaatgtgggagaattctggcactgatcgttcccggaccgggaaaatatctgggctgtttttgcagggacagcgaattttttattccatgggctaaagttatccggataggacccgatataatactcgtagagtttgatgaaaaagaaatgaaacaccggataaaaggataaaaatttgcagattgacagaaaacagggaaattgtgtattatagaaatagtcatatatttccggattgggattggatgcaggaggagaaatcctatgaaatgtccgtattgcagcagtgaaaatacaagagtgattgattcgcgtcctgcggatgacaataattcgattcgcagaagaagactttgcgatgattgcggaaagcgttttacaacctatgaaaaggtggaaaccattcccctgatcattataaaaaaagataacaatcgtgagcagtacaaccggacaaaaatcgaaaaaggcgtattgcttgcatgtcacaagcggccaatttctgcagaacagatctcaaagcttgtggatgatgtagaaatcgagatttttaaccgtgaagaaaaagagataccgagtgctttgatcggtgaaattctcatggataagttaaagaatttggatccggttgcctacgtgcgtttcgcatcggtataccgtgaattcaaagatgtaaacacatttatgaatgagctgaaaaaaatgctcggatgaatttgtaaccagaggtgcttatgaatatttcaggaatgcgcccgtatgagggcttttatgagtacaattccataaaggctgttgcgcttagaagccaacagattgcggcagtgcagaatgcctctggggatgaggaacttttcggtggcagtcagccgcagggacagacacagacgaagcgtccgcagacgtacaatgcatttgattatgcaaaggagtaccagccggatgaaacgtatgaactgaagggtgcagacagtgatctggcaggtctggatatgcagaaagcaatttccgatatggaaaaggatcaggtgttgcagcagtatcagtattttgtgggaacgcaggataccggagtgaagaagatcccgttggataccgggatttctgctttgcgttccggagagaatttttccctttagtacataacacacaaaggagagacctatgtgcgcatttctatatccggatgaatatctggattccacttacagcatagattttgatcaattatataaagaaggataccggggaattatatttgatattgataacaccctcgtaccacatggagcgcctgcggatgagcgggcgatttctttgtttacccatttaaaggaacttgggtttcattgcatgctcctttcgaataataaggagccacgggtgaaaatgttcaacgatgcagtgcacgtcaattatatttacaaggcagggaaacccaaaccggcagggtatcgcaaggcaatggaggtactgggcacggacacatcaaatactatttttgtgggagatcagatttttacggatgtgtgtggggcaaatctggcaggaatccggacaattcttgtaaaaccgatccacccgaaagaagaaatccagatcgtgttaaagcgccggctggaggcgattgtgcttttatgttaccgtctgcaccgtaaaatcgtaaaaccaaagtacccatctgctgcaaaaaaggaggattcatccattttgtaggataaattttctttttgcagaattttctatgcgtgaccgtacacagccggtcgttttctatttgacgaaagttcgttgaagcagtaagataaaagaagtgcaaaaaacgaaaaggagaattgtgatgaaagtcggaataggaaatgaccatgcagcagtagaactgaagatgcagatcaaagaatttattgagagcatgggacatgaagtggtaaactacggagttgatacagcagaaagctgtaattatccggagattggagaaaaagtaggacgtgcggtggcggacaaagaagtagactgtgccgtgttaatttgtggaacaggtgtcggaatctctattgcagccaataaagtaaacggtgtgcgtgcagccgtatgttcagatgtgacgacggcacatctggtaaaagagcacaacgatgcaaatatcatcgcgtttggtgcaagaattgtcggagtggagctggcaaaggatattgtgaaggcttatctgaatgcggaatttcttggtggacgtcatgcgacacgcgtggctatgtttacagacatcgaaaaacggaacaaataaaatacttgaaaagtattccattttatagtaaaattgtaagtcgagagactttatactcgtaatttaaggaggaagatcgaatgatttcagcaggagatttcagaaatggtgttaccatcgaacttgaaggtaacatttatcagattatcgaatttcagcatgtaaagccaggtaagggtgcagcattcgttagaacaaaattaaaaaatatcgtcagtggtggtgtagtagaaaagacattccgtccgacagagaagtgtccgactgctcatattgatcgtaaggacatgcagtatctgtattccgatgatgatttctatcatttcatggatgtagagacttatgaccagattgacctgacaaaggacagtgtcggtgatgcactgaagtttgttaaggagaacgagatggttaagatctgttctcacaagggcaatgtatttgcagtagagccacctcttttcgtagagcttgagattacagagacagagccgggattcaagggagataccgctacaggtgctaccaagcctgctactgttgagacaggtgcaaacgtaaacgttcctctgttcgtagagcagggagacaagatcaagattgatactagaacaggtgagtatctgtcccgtgtataatcgcgccttataatagaaaagtcctgataaagaaacgccggttccggcagagcgatctgtggaaaccggcgttttttctgtccgagggagatcaaaaagtgaggaatcatccggcacgggaataaggcataagcaaaagaatgtctgcaatcgcagcaaatacataggacagcagcatcccccacagatatgcatcaatgccgtactgtgggacgagaaacagaatcatgcagatcctgatcatgcatgccagcagtgtgacaaataaaacctgccgggcattgccgagtccgtgcaggatactgttcagcagactggtgacatacagcaggggacaaagccaggagagctggcagataaaattgccggccagcgtattgtgaaacagaacttcgcccatccggtcaccgaaaaccagaaacagaatcgtaaaaacaaagccaagaagcagtccgtacaggattgctttttttatcgttcgcgcaatctgtgcgtggttgtgtgcactgtgggcttccgagacagccggaagtaaaaggacggaaaaggaattggtcagtacactgggaaacagaatgatggacatggtcataccggtcaggataccaaaaatactcagggcatccgaagcactgtaaccaaatgcctgcagtttttgcgggatcagaagattctccaggctgttgaaaagagctgtcgtcacccggttgatggtaagtggaaccgccatggaagcaaacagtttgcccatcgttttccactgaccggaaagggtgtggtaggagtgtccgggaagccgtttttccaaagacatggcaatcagactggtgataagaccggaacattccccggccacaagaccggcaaccgcgtggaacgccgtcagctccatgcctttttccagcgtgtactgatagatcagccatacacttcccacgcgtgcaagctgttccaccagctgacagaacgaaggaattcccgcccgcttttttccatagtaataaccgttgatacaggcgtggatgcagcagggaagcatggaaaagctaaggagcgaaaggaggggagcgcagcggagctctccgagaaaatgcagggcgatccagtctgattgtgtgtaaagaaaaataccgacgattacagaggctgtgcaggagatgaccagaccgagcagcagatatccgcgtgcagttatttctccctgcgatgttcctgcgtttttgccgcaggcatcgccgacaaatttggaaatggatgtctggatggaggaggcagtcagggcgaaacacattgcaaaaacgggtgcaatcagctgatagattccgagcgcttctgcaccaattgtctgtgccaggaatatcctatagaagaagccgatgatacggctggcaataccggaagccgtcatcagaagggtgccggtaatcagaggattttttagcaatcgggaaatgttcaatgggaactccaaatggaaaacttgataactattgtatgaggggatggtgcagaatatgagctgtaaaatctatatggatcatgcggccacaaccgaaatgcttccgcaggtgcgcaaggctatggagccgtatctcatggaagaatatggaaacgcctccacatcttacgaaatggggcgccgcacacgggaggcattagaaggggcaagagaacagattgccatgctgattaaggcaaagccggaggagattttttttacatccggggggagcgaatcggataactgggtaatcaaaaatgtggcggcggagaaaaaggaaaaagggaaacatgtgatcacaagcaaaatcgaacatcatgcggtgctgcgctcatgtgaatatctggagaaactgggatatgaactgacttatctggatgtcgatgcatacggagtgattgatctggcacagttgcgggaggtattgcgggaagataccacgttggtttccgttatgacgggaaataacgagattggaacgatcgaaccgctggatgcggttgcatccatgctgcgggggacgggaacattatttcacaccgatgcggtgcaggccatcgggcagattccgctttccatgaaccagcttccggtggattatctgagtgcaagtgcacataaattccacggtccgaaaggggttggctttttgtttgtgagaaaagaccgggatctgccgtcgtatattcacggaggcagtcaggaaaacggcagacgggcaggaaccgagaatgtggcaggaattgtggggatggcaaaggcacttgaaattgcagtggaagagatgcaggtcgtgcgtccgcggattgtgcggttgcgtaattattttgtggagcgggtattacgggagattccgcagggaaggttaaatgggcatccgcataagcgcctgccgggaaatgtgaatttcagttttgaggggattgatgcgacgtctcttctggtacttctcgaagaagacggaatctgcgcttccgcaggatctgcgtgcaataccggacagacacggatttctcatgtgatcgaagccatacatgtgcccgaaacttatgctccgggcagtgtacggtttacgatgggacgggaaacggaccgccaacaggttgatgcagtcattgcatctttaaagaaaaatatcgggttgttgcgcggtgagtgaaattataggataaaatgttcgatggccgctgccaccccgtccttggtattcgttgtggtgacgtaatctgcccgggctttgacggcatcagtggcatttcccattgccacaccgataccggcagcctcaatgatggcaagatcattttcggtgtcaccgattgccatggtggcatccggattgacaccgagaatttcggcaagttttcgtaagccaacgcccttgtttgcatctgcacgcgtgaattccaggttgttgtatccgccgcagacggtagtaattgacggattggacacgagaaatttgcggacggtttcgcggtcaatgagtgttccatcggctgctggatagaaattcagagtcattttctggacctttaactgattttcatggataaactgcaggatattgtccagccgtgtgcgtgtggtgataatatagtttttgatcgaagaaggcacggtcagtttttgtgccgtttctacgcactggaccggggtgtagccttttccaccgataaatgcatccatatggatatcacgtgtgagaaggaagtttaaaatcggggtgaccagctcttcatccatggcattttcatacaagcattttccggtggaaatctcatagattccgctgccgtttgcggtgatggcatagttgatcccggtgcctttgatctggtcaaacgggattccctcaaacgggcggccggtggagattacgacatggatgcctttgtctgtaatgctgcggattgccgtaagattgcgctcactgatgtggctgctgttgtcaaacagcgtaccgtcgagatccagtgcaactaattttatgtctttcatgatagattctcactttcttttttttctgtgataaggtatgatattgttacgcatgacgtagaaataatctgcggtattattataaatagaacgaaacgaaactgcaagtgaggaatgcaaaatgacaaagacagaatttgccggatttatcagggaacatggtccggttattttagatggtgcaacgggaacgaatctgatggaggcaggtatgccgattggcgtgtgtccggaaagctgggtgctggaaaatccgcaggtactgctcgagctgcagaggcggtatgtagaagccggcagccatatcgtatatgcctccacgtttaccggaaaccggatcaagctggaagaatatggcctgcaggagaggctggaagaaatcaacacacagctggtagcactttctcgtcaggcagtgggcgataaagcactggttgcaggtgacatgacgatgaccggccagcagctgtttccgatgggagagctgttgtttgaagaactggtggaggtatacaaggaacaggcatcggtgctggcaaaagcaggggtggatctgtttgtggtagaaaccatgatgagtctgcaggaatgtcgtgcggcagtgattgcgatccgggaagtctgtgatcttccaatcatggtgacacttacctacaacgaagacggacggacattatttggaacacctccggagacggctgtggtcgtactgcagtctctgggcgtggatgcgatcggtgtaaactgttctaccggtccgatggagatggtacctctggtggaaaggatggcagaatatgctacgattccactcatcgcaaagccaaacgccggactcccggaactcgagggaaagaaaacggtgtaccgcatgacaccggaagaatttgccggggcaggtgtggcactggtaaaagcgggagcagccattgtaggtggatgctgcggtacaacggaaaagcatatcaaggcactttcggatgcaacgcgggggatggaacttcacaggccgcttgcatcgcatcgcaggattcttgcgtctgagcgcaaaaatgtagaagttggtctggatggcaattttctggtggtcggggaacggatcaatccgaccggaaagaaaaaactgcaggcccagctgcgcgaaggaaaactggatcttgtgcgtgagatggcaatggcgcaggaggaaaacggggcagccatccttgacatcaatatgggaatgaacggcattgacgaaaaagaaatgatgaaacaggtgatctatgaagttgcggcgacggtagattgtccgctttgcctcgataccagccatattgatgttatggaagaggcactgcgtgtctatccgggaagagcactgattaactccgtttcccttgagacagaaaaaatcgagcatatgcttccgctggcaaaaaagtacggggctatgtttgtcctgcttccgctttccgatgagggactgccaaaggatgccaaagaaaagcatgagattatcgataccgtatatgaccgtgccatggagctgggaatggcacacgaggatattgtcgtggatggactggttgccacaatcggagccaatccagaggccgcgaaagaatgttatgataccatctcttattgtaaggatatcaggaagcttccaacgatctgtggtctgtcgaatatttcgtttggcctgccggagcggagttttgtcaatacggcatttcttaccatggccatctgccgggggcttaccatggcgattgccaatccgtcgcaggaacttttgatgaatgccgcatttgcttcggacatgctgctgcatcgcccggacagtgacatccgctacatcgagcgtatgaataaactggcagaggaaaaggcaaaatatgagacggttgttgtgaaaaaagaaggtgctgcgggtggcacggcatctgtggaagaaaaagcagatcctgttacgacagcggttttaaaaggaaataaaggaaccattatagatgaagtgaaaaaggcaattgcagacggcgcaaagccggaggagatcatcaatgaccagctgattgcagccatcaataaagtcggggaattttttgaacagaaaaaatatttcctgccgcagctgattgccagtgcaaataccatgaaacttgccattgattatctcgagccgatgctggagaagaagaacgacggacaggagatgccgacgcttgtcattgcaacggtagagggggatatccatgatatcggaaaaaatcttgtcgtactgatgctgaaaaattatggctacaacgtgattgatatgggaaaagatgtgccgtgtgaagatatcgtggataccgcgattcgtgaaaatgctgcgattatcgggctgtccgcgctgatgactaccacgatgatgcgtatgcaggatgttgtggagctttgtaaggagaaaggctgcaagagcaaggtgatcattggaggagcctgcatcacacagagttttgcagatgagatcggagccgatgggtattcaaaggatgccgcggagtgtgtgcgcctggtagagcggctgcttgcatagcatgtgtgggacaatcctgcatggaaatttgtttggaatagttacaacaaatacaaaaaatacaaaaattcaaaaaaagtgttgacatatctgttctcgtacgatatactaacgaagtcggttgcgagagcagccaacacgaaatgggatcttagctcagctgggagagcatctgccttacaagcagagggtcacaggttcgagccctgtaggtcccattcatcagaaaaactgatggaactaaatatggcgaggtggctcaactggctagagcgtccggttcatacccgggaggttgagagttcgagtctctccctcgctactatacaggcttgtggtcacagatcacaagtttttttattttataaaaagaagaacaggagaaaacatatggaaaatacaaaaagcagtaccatcgaaggaaagaacgttggaaagaaatgcagaacacattatcgcggcacatttaatgatggaacacagtttgattcctcttatgacagaggagagccattggaatttgtatgtggtgcaggaatgatgatcaaaggatttgatgcagcagttgccaacatggaagtcggacagacgctggatgttcatctgatgccggaggaagcctacggactggcagatccggatgccatttttacggtggaactggcacagcttccgggggcagaagaactggaagcagggcagcaggtgtatttgcagaatgctgccggacagccatttccggtaaaagtagtagaaaaggatgaaacaaccattacatttgatgcaaatcatgagatggcaggaaaagaattgaattttacaattgaactggtttctgtcgaggagtaaatcgtttgatttagaagaaaagaagggggcatgggtggatgttacgaccgaaaatagggctggactgggacgatgtgacggcaccatttaacagcattgccgttgccatggcaaatgaaaaatatcatatcgatccgccacttcggctggaggagattgatacctgggaaaatcgtggacgtgcaggtgtcatcaaggaattttacgaggacgaagaactctatgcccgccagcaggtgccggagaagaataaaaaagcagtgcatcgtctgatggaaattgcggatgtttatttcattactgcggtagctccggcgtttatggggattcgtgcaaaacagatccttacggcatttccggaatttccaccggaaaatattattctgggaaatgccaagaatctggtgcagtttgatatcatcctggatgatgccattcataatgtgcttgaaacaccggccacgtatccggtactgatgcgcaagccgtggaactggaagatgacaggacttttgtccgtgaatcagatgagtgaatttgtttctctggtcaggcagatcatccatgcctcgcagacgcgcacgatggaaataaaaaatccatcggttctggcactggtaggaccgtccggttccggaaaagacgcattgaccaaaaaattatgtcaggaggatcgctttgtcaatccgaaaacctattgcaccaagaaaagcagcaagcatcattatctgacaaaagaacagtttgcacagcaggatttctttgaacgcaccatgtacgccggggtgcattacggaacaaaaaaggaagatatccaggcggtgcttgacgatggcaagtatgccgtcatgtccctggatatgtgtggcgcaattgccatgaagcggcattttccgaccgcaattatctatgtggcaaaagataaagaagacatgattgcggatattgtgcagtcggatttctctgtcgaggagaaaacacttcgcctgttgtcgctggatgcggagaaaaggaatcgggagatctgcgattttgttattgataaccgggatgaacaggggagtgagcgcattctccaacttctgaatttttgacaaagtgacaatcagatggtaaatgaaagatatcatcgtggtctctgcacaaataaaatagatttgaaagataccatcgtggtctctacacaaataaaattgatctgaaagataccatcgtggtacctatatactgaaaatttaacatttagataccgaaaagtctctatggagaaaaaattgctttccgagataccattttttgaaaaaaacggtatctggagaagcaatttttcttttgtaggtgacagttccttatttcacactttgaaaataagaaaatgtgtcaccttagacattaattttttgcctatagtccccaacattttatcgctgaatgtttccataacattctgtttgtcgttctgatccacaaaatttgcagaaacaattctttcccttatatttttcccaatccacaggaagaagggggacatttctttcggaagaacaaatttacaactgcgccgtagttccattgtgtaacgttaattgcgtaaacgtaaaactttttctaaaccaacctgaaatcaataccggcgctaacttgcaaatttttctgtagaaagagaatgtcccccttcttccgtcacatcgaaaaaacttatatctgaaacaatccccccccaaaaaaaaaatctgcaatccccatttaaagtactgtagtagaatcggctataagcaaaacttataaccagctataaaaataaaagactaacacttttcctacctctgtggtatgatataaccagttcaaacgaaaaccccacactttaccggatcaggtaaatgtgatttcaaaaatagcagaaaaaggagagtattaaaatgagcaaaaaacattacgcagacagaaatttaaaatttgaaacattacagttacacgtaggacaggagcaggcagacccggttaccgatgcaagagccgttccgatttatctgacttcttcttatgtattccacaactgccagcatgctgctgaccgttttggattaaaggatgccggaaatatttacggacgtctgaccaatccgacagaggatatctttgagcagagaattgcagcacttgaaggcggtgttgcggcacttgcggtaggttcgggagcagccgcattaacttatgcatttcaggcagttgcgcatgcaggggatcacattgtagctgcaaagaatatctacggtggtacctacaaccttctggcacatacgcttccggattatggcattgaggcaacatttgtagatccgttcaactatgaagagattgaagctgcaattaaggataacaccaaagccatcgagatagagacacttggaaatccaaactctgaagtagttgatattgaaaagatcgcaggaattgcacacaagcatggaattccgctgattgttgacaatacattcgcaactccgtatctggtccgcccgattgagcacggcgcagatattgtggtacattctgctacaaagttcatcggtggacacggaactaccattggtggtgtgatcatcgacagcggaaaatttgactggacacagagcagcaagtggccatggctggtagagccaaacgtatcttaccatggggtaagctttgcaaaggactgcgcaccggcagcatttgctacttatatccgtgcaattttactgcgtgacacaggtgctaccatttctccggtacacgcctttatcttcctgcagggattagagacactttcccttcgcgtagagcgtcatgtggagaatgcattaaaggttgttaaatacttagagaaccagccacaggtagaaaaagtaaaccatccatccatttccaaagacccggagcagcaggcactctacaagaagtatttcccgaatggtggcggttctatctttacatttgagatcaagggtggtgcagaaaaagcacaggaattcatcgataaccttgagctgttctcactgcttgcaaacgtggcagatgtgaagtcccttgccattcatccggcaagcaccacacattccgagtgcaatgaggcagaacttttagatcagggaatcaagccaaacacgatccgtctttctatcggtacagaaaatatcgatgatatcattgaggatctggatgaggcatttaaggcaattcagtagaaaattcagtaaaaacgtcatttgtgataaatccttcattttacaggagaccccatggagaatcagcatggggtctctttttatgcaaaatgttctcattttagaacacgtaaatgcattgaatttcgtgaataacgagtatacaattagtggtagctaataataaaattaagtatagataaaggagatttattatgtttggttttggacaactgattgaagtattaaagaaaagcccaaagaaaattgtattcacagaaggaagcgatcctcgtattctagaggcatcttcccgtctgcttgcaagcaactttttacatccaatccttgtaggcgatccggatgaaatcgaaaaggcagcagaggagagcggatttaatatccgtggggcagagatcgttgatccaaagaaatttgaccgtatggatgagatggtagatctgttctgtgaattaagaaagagcaagggagtaacaccggagcaggcaagaggcattctttcccaggcaaactactttggtaccatgcttgtaaagatgggcattgcggatgcactgcttggcggagctacatactctacggcagataccgttcgtccggcacttcagctgattaagacaaaacctggcaacagcatcgtatcttcctgctttattctggttcgtccgtctgcgacaggtgagaacgaggttcttgcaatgtctgactgtgcgatcaacatccatccgaccgaggatgaactcgtagagatcgccggtgagtcagctgcctgtgcaagaattttcggtgtagatccgaaggttgcatttttaagctactctacacttggttccggaaagggcgaggatgtagataagatgcgcaatgcagcacataaggcacgtgagaaatacccggatcttccaatcgagggagaattacagtttgatgcagcggtatcaccaagagttgcaagaacaaagtgcccggattcttccgttgccggacatgcaaatacctttattttcccggatatcaatgccggaaatatcggatacaagattgcacagagacttggtaatttcgaagcttacggtccgattttgttaggtctgaatgcgccaatcaatgatctgtcccgtggatgtaatgcatcagaagtatattccatggcaatcattacagcagcacttgcatagttgaaaactgatgcgatacttcgttcggggactgtttgatacagcccccgaatttgtgttataataaaacaggcttgaagcctgtgaaggtcatcaggctttgcctggtgacatgttatcattagaatttataaggaagctgtttgcagggggaactggaatcagcaacatcataaaaagacaggagaagaaaaatgcgtgtaggaatgggttatgatgtacacaaactggtggagggacggccactgattctcggaggtgtggagattccgcatacactgggactgctcggacattcggatgcagatgtgcttgtgcatgcaatcatggatgcactgcttggtgctgcagcactcggggatatcggaaaacattttccggataccgatccgcagtataagggaatttccagcatgaaactgctcgaacatgtgcgtcttttactggaaaagaatggttatgtggtagaaaatattgatgcgacagtgattgcacagaagccaaagctgcgtccgtatattgcgcagatggaggagaatattgcaaagacccttggcattgcaaaagagcagatcaatatcaaggcaacgaccgaggaaggacttgggtttaccggaacagaagaaggaatttcgtcacaggcaatctgtatgctgaacggattttatgagagcagtatggttgtcgggggcgggagtaaatgtgcaggatgtcccgggtgcagcagatcatagataagacgtgacttttgccggaaaatattgtacacttaaaatatataagaagaaacagatggaaggacagacacaatggacaatcaatttcgcttttacaatacactgacaagaaagattgagaccgtgataccgcacgaagatggcaaaatcaaaatgtatacctgtggaccgaccgtttatcattttgcgcatatcgggaatctgcgtacctatatcatggaggatattcttgtgcgtggactttcctatgtgggatatgatgtaaagcgcgtcatgaatatcacggacgtgggacacctttcttccgatgcggatacgggggaagacaaaatgttaaaaggtgctaagcgtgagcacaagaccgttatggaagtggcaaaattttatgcagatgcattttttgaggactgccggaaattaaatatcaaaaaagcggatgtggtagaacctgcaacccattgcattccagaatttattcacatgatcgaggtacttcttaaaaagggatatgcttatcaggccggtggaaatgtttattttgataccagcagactggaggattattttgtattttcttccgcagtcgaaaaggaacagttgcaggtcggcgtgcgtgacgatgtggaggaagatgaaaataaacggaataaaaacgattttgttctctggtttacaaaatccaaattcgaggatcaggcattgaagtgggacagcccatggggtgttggatatccgggatggcatattgagtgctcctgcatcggaatcaaacatctgggtgagtatatggatattcactgtggcggagtagataatatttttccacaccatacaaacgagattgcacagtccgaaagctatctgggacacaaatggtgcccgtactggtttcatgtaaaccacctgaatgatcagaccggaaaaatgagtaaatcaaagggcgatttcctgacggtatctctattggagagcaaagggtacgatcctctggcataccgtatgttctgtctgcagtctcattatcgtaagccactcgtattttcttatgataatctggacaacgtagagagtgcatacgaaaaattagtaaaaaagattgccaccttcaaagatgagggagagatggagcaggaagcatttgaagcattccgtaaaaagtttgcagatgcaatccgtgatgatctgaatacttccatggcactgaccatcgtctatgacgtggtaaaggcagatatcagtgaaaagacaaagctggcactgctgaatgattttgatcaggtgctggcactgaatctgacaaccgcaggtcaggagagactggacgcgggaacgagcgtggatgcagaactggaacagttcatcaatgaaaagattgcggagcgtgccggggcaaagaaagcgaaagattttgcccgtgcagatgcaatccgcgacgagcttcttgcacggggcatcaccatcaaagatacccgcgaaggtgtcgtatgggagcgcaatgcatgagtgaaggaattgacgcatacatcaagaaaaaatttgaggttccggatgtcgatatccggacctattccccactgacactggcttatatcggggatggtgtttttgatctggtgatccggtcggttgttgtgggcaagggaaatacccgtcccaaccagctgcatcaccggacgagtcagattgtaaaagcacatacgcaggcagttatcatacaatatcttgaaccgatgcttacggaggaagaagcggacatctatcgcagaggacgcaatgccaagtcggcaaccatggcaaaaaatgcaacgatggcagattaccgtaaggcaacggggctggaggcactggtgggatatctgtatctgacggaccggttcgaccggctggtttcattgattaaggaagcagcagatggtctgcatctgcgtttataaggtaaaaaattatggaagacgaaaagaaaacatttaccggaatgaaagaaaatcatattgaaggacgcaacgctgtccttgaggcatttcgttctggcaggacaatcgataaattatatgttctggacggctgtcaggatggaccggtcagatccattaccagagaggcaagaaagcacgatacaatcgtcaattatgtgacaaaagaacgcctcgatcagatttccgagacaggaaagcaccagggtgtgattgctgtcagtgcagcatatgattatgccagggtggaagatattctggcacttgcagaaaaaaagggagaaccaccgtttatcctgattttagacggaatcgaagatccacataatctgggggcaattatccgtaccgccaatcaggcaggggcacatggtgtaatcattccaaaacgccgtgccgtaggactgacaccgaccgtcgcacgtacatcggcaggtgcggttaattatgtaccggtagcaaaagtgacaaatatctccaataccatgaaagaactcaaagaccgcggtatgtggtttgtgtgtgcggatatggatggaaccttaatgtacgatatggatctgaccggaccgatcggtctggtgatcggaaatgagggagatggagtcagtccactcgtaaagaaaaactgtgatatggtggcttccattccaatgaagggagatattgattccttaaatgcatcggtggctgcaggagttctctcgtatgagattgtgcgtcagaggatgaagaagggataagaaaagaatgaagtatgatgcttgtacggatgaggaattgattgaaagactccggcagggagaaacagagatcacggactatattctcgaaaaatataagccgcttgtccgcaaatatgccaatgccatgtatctgatcggaggagaaaccgatgatctgattcaggaaggcatgattggattgtttaaggccatccgggatttttgtctggacaaagacagcagttttttccattttgcagggttgtgtattcaccgtcagctgtattctgcaatagaggcatccaacagaaaaaagcatcagcctttgaattcctatttatctttttttgagcagggggcagaaggcagtattgggtttaccagcagcccggagcagctggtgatcgaacaggaagtgtccagagagttgtggaaccgggtgaacagccggttaagtccgatggaaaaacaggtgttgcaattttatctggacggaaataactatatgcagatcgcagggctgatgaagaaaagcccgaaatctgtcgacaatgcattacagagaatacgtcaaaagatcaggcagatgaatcatctggaggaaagagggtgagcgtatgaagttttcaaaaattggaaaacataccattcgttgtgtaatatcagaacaggaaattcaggatctgggatacaccattgaggaaattatgagcaatggggagcggacgcaggaatttatgaaccagatttttgatatggcagaacagagttttgagacaaaatttgaactgggcatcaagacagtgcgtgctgattttatgtcagaccatacgctggcacttacgttttcggagcatccgggatcggatgaaatgatggagcatctgaaagatattgtcaatggactgatgaatgcaattccacagcagaagtgggcacagattaatgaagcacggcaaaacgagggaaatccggatcaggttcctgtttatgccacgattgtgtttgcggattttgataggttgctccgttatgcaaaaaacattatgccaccggatctgcctacgggtcagctttataaatacgaggatcgctatatgctgatccttacattttccggtatggaagagggcagtttaaggagactctcgaatctgacggatgaatatgcacaggatattcttgtcggagcggagcggaaagcgttcatacaggaacacggcatctgtattttgaaaaatgatgccctgcagcaactccggcaattgtaaaagaactgtattttgtcagaaaataaaaatagatgattgcaaaaacaagaaatagaaaaggagcgtccatatatggtgctccttttttaatatgataagatttatcctaatacttttcggatggactctaatacacggtctgcctgaaatggcttaacaatgaaatcctttgcaccggactggattgcctcaataaccatggactgctgtcccattgcagaacacataacgcatgtagcgtttggatcagctgctttgatctccttgagtgcctgaataccgtctttgtttggcatcgtgatgtcaagagtaaccagatctggtttcagctcgttatactttgcaacggcctctacaccgtctgctgcttcaccagcgatctcaaatccgccctttgtcagaatgtccttgagcatcattcgcatgaatgctgcatcatcaacgattaatatctttgccatttatatatcctcctgttttaaaatctgttttactatgctgatagggtataactgtatcagctcgctatcgatcaggtcttccacggtcagtcgaaaagtgaccttgacgatatccgttccattacatagttcatccggaatctcgaaagtcttgcgatcctttgaattgataagcggaaatccaatatctgtcggcctggataacagtgacgccatagatgtggcaatggatccacacatctggttcatggcttctgcaattgctgataacgtgagatcatcgagctgcagattggaaagattacgaccgtcaccgcccatcataagacttgcaatgaccagcgcatcctgaacatccagtaccataagatttgtcccgtctaagccgcttgtgtatggaactttgaccagaatatggttgtcactttccagcgtgttttctttgtccagtacttctacaagcggagtggtaatgtttgttgaacggttgatgatcatactgagggcggtagccgcagtacctgtacagatatttgcaacttcaccgatgatatcagcctgttctttcgtgatattctccatagaatttcctccatagtacctattactacatttgattatagcaaattttagcacataaagaaagaaaatctttgctttttttcacttttcattggtatcataacacagatgtggtaaaattggaataacaaaaacatggaataatcgtagaaaggagaaaaaatgggagatatcgaatatcaggaagcactcaaacttggaaaaaaagaatataaggcatgtgtttcgcaggggcgctttccctatctgccggttctggatgatattttatccagagaaaatatccagacggaacagaatatggggctgatgcagataccattggattttgtggttggtacggcgacgaaaggaagaacgtattcttttgcagccaattttatgccgatcctcgatgtggatacagagtttgcattcaaatggaccgcgctgtccgatgcacaggtaaacgaaggcatccgggatccgattattgcttatgaatatatgaaccgttattatgtggtggagggaaataagcgtgtcagtgtactgaagtattttaaggcagattccattgtcgccaacgtgacacgtaagattccaaagtattccgaggatgaggacgtaaaattatattatgaatatatgaagtttaatcagatttcgggattgaacaatatcgaattttccaaaaccggtatggcggataaactgcttgcactgatgggatccactgccatatgggatgcggatacccgaatggaatttaacagtctggttaatcatttcacaaaggcatatgagttccgcggagggcgcaaactgccgatccgggtgggggatgcgctgactgcatttatcaatgtatacggttaccatacggttcttggcatgtcggatgatgagctgagtttaaatattgtgaaatgctggaatgagtttgtcatgctcacagagaaacagagcgttggtctggtcatggatccgctggcggcagaagagcgtaagggaagaagcatcttcagttactttatgccatcgtcagcaaagaaatttaccgtggcattcctgtatccaaaatcaccggatacatccgactggatttatgcgcatgaccttgggcgcaattatctggaagagacgttcccggatcagatgaagaccatctgtgtcaatgatgtgacggaggaacgcacggagcaggtgctgaatgacgtgatccgtcagggggcagatatcatatttgaggtggcaccgcagatgatgaaagacagtctgaaagtggctgtggatcatccggatgtaaagattttaaactgcagtctgaatacttcgcataagtatatccgcacgtactatgcccggatgtatgaagcaaaattcctttcgggaatgattgcgggggcactggcagaaaatgacaggattgcatatattgcagattacccgatatacggaatgatcgcaaatattaatgcctttgcgctgggagcaagttttaccaatccacgggcaaggatttatcttgcatggtccaccagtgaaaattatgacagggaacggttcttaaaggacaacaatattcaggtggtatcggatcaggatatgattacaccgcgcgatccgggcaggcagtttgggctgtatgagtgttcggaggatggaaggaaactgaatctggtgatgccactctggaactggggtgtattctatgaaaaaatgatccagagtattcttgcgggatcttaccagtcggaagaaaattctgagggcagggcactcaactactggtggggaatgtctgcgggtgtgattgacctgatctgttcgaagaatgtaccgaccggggtcaagcgtctggtggatcacttaaagagtgatattaaaaagggagatattgtgccgttttacggagaaatccgtgcacaggacgggacactcaaaaacaagaaggataaagccatgaaaccggaagccatcatggagatggactggctgacagataatgtcattggggagataccgacaatgggagaattacgtgcagaggcacgtccggttgtccagataaaaggtgtagaggaaaaaatgaaataatgaagatactagtaatagcagatgaagaatctcagaaaatctgggatttctttcgaaaagaagactatgcggatattgacctggtaatttcctgtggtgacctgaaagcagattatctgtcatttatcgcaacgatgattgcagttccggtattgtatgtgcatggaaaccatgatgataagtacaaaagaaagcccccggagggatgtatctgtattgaagataccgtgtatatgtttcatgggataaggattctcggactgggaggatcttaccgttataaaccaggggtgaaccagtatacggaagtgcagatggaacgccgcatccggagacttttctggaaaatacgccgaaaagggggcattgatattttggtgacacatgccccggcaggcggtatgcatgatggggaagatctttgccataaagggtttgatgcattttatcgtgtgattaacaaataccatccgaaatattttgtacatggacatatgcatatgaattatggaagggatattccgcgggaggatttcatcggagataccaaagtgatcaatgcatatgagagatatgtaattgaaatttaaaaattgtctgataaccacgcgttatactgtcaggctttgcactgcggtgcaaatgattgcatgattatagccctgacccataggggcatgttttccgggctgtaatcattgcggatcacatcaggggaaaacggcaacacgctgggaattgtaatttgataaaataattaaaaaattcttgacaatttagaaaataccgtgtatgatgtaggagttgacgcggtcaacgagatgctgatgtggctcagaggtagagcacttccttggtaaggaaggggtcacgggttcaattcccgtcatcagctcgcttcataaaacggtggaatcctttggggttctgccgttttgcaatttttcagatgttttaaaggaggttttgcagatggaatcaatgaaggattatgaaaaggagctggaacgttctttccgcacgattaacgaaggagatattgtcagtggagctgtggtagcagtaaccgatgaagaagtgacacttgacctgaattattatgcaccgggaattatcaaaattgaaaatctgagcaatgatccggattttcatgccaaggaagaattacagccgggagacatcatcgaggcaacggttgtgcgtacagatgacggacacggaaacatcgaattgtcgaaaaaggaagcaaacgaagtgcttgcctgggataaactccgggagatgatggagcagcagacggttgtgactgtccggatcaaagagagtgtgccgagtggtgtggttgcattcttagaaggaatccgggcattcattccggcatcccagttgtccgcagattatgtggaagacacggatgcatggatcggaaaagatgtgcgtgtcgttgtgattaccgtagatcctgagaagaataaactggtattgtccggaaaagttgtggcaagacaggagcgcgaggaagaaagaaatcaccggattgccatgcttgtgcctggatctgtggtagagggaaccgtagaatccattatgccatacggagcattcatcaatatcgggaatggcatcagcggtctggttcatatttcacagatcagccagaagcggatctcttccgttcatgaagttttaaaagagggacagaaagtaaaggcgaagattttaaataccaacgatggaaaagtcagcctgagcatgaaagcgctggaagatattatggaaaagccgcaggaggaagaagaggcagaggcaatcgagtacagctcaaatgaaacggctggaacaagtcttggagatcttctttccagattcaaattataatcagattttctttagacagtaaaaaacccgtgaagatgaacaacagagcgttcgtctttacgggttctttttagaaattaagcgttggaattctgataataaccaagcacttttttgacataattttgtgtttccttaaacggtggaatcccaccgtacttgtcgacatttccactgccggcattgtatgcggcaagcgcaagggaaacatctccgttgtatttctttaagttctgcgccatcagtttggcaccacccataatattttcctgtgcatcgtatgcatttgtgacaccaagtcctttggcggtggacggcatcagctgcatgacacccatggcaccggcagagctggttgcggatgggttaaagttggattcctgtctggcaatggctttgagcaggttgatatccacaccgtatgtttcggaagcttctttgaaatattcttcgagattctccggagaggaaacgctgccggaggatgtggcatttgctgcggtcgtattagcagaagaactggaacttgtgaaagtatccgcgaccggagacgtatcaaccggtgcatcggtctgcggggtaaatccaaggatctgctgtaccgtatccagggaaacggcaccactgttgctggcggcaagcagtgcgtccactgccatggcctgtacgctgcgctcagcggaagccagacattccttaaatgtggtgacggcttcatccgtatttttcggtgtctgtatattggcagaagctgcttcctgcagcctggctgtctgtgtctgatcaatataaggtaaaactgttacacccatgatgttcctcatctttcgttcgcttaatctaacattcgatcatgcatatcatatcataatctgtggaaaaataaaaggaaaaggcgaaaattgcttgaatttgtaatagagttgttgtagcataacatcagacgaaaaagtgtagataaaggagccagattatggagaaaaagccgtttgtaacaaagagtcaggtggaggagatcgtcaaaacatacccgacaccgtttcatttatatgatgaaaaaggcattcgtgagaatgcaaaaaaagtaaaggaagcttttgcatggaatccgggattccgcgagtattttgcagtgaaagcaaccccaaacccatatatcttaaaaattttacaggaatatgatatgggatgtgactgttcctcttacacagaactgatgcttgcaaagtcctgtggatttgacggaaagcatattatgttttcttcaaatgatacgccggcagaggaatttgcctatgcggatgaactcggggcaatcatcaatctggatgatttcacccatattgatttcttagaagaaacgatcggtcatattccggagaccatcagctgccgttacaatccaggcggagtatttgaactgagcaacggaatcatggacaaccctggagattccaaatacggcatgacaaaggatcagctcatcgaagcgtttaagattttaaaggataagggagcaaagcatttcggtgtccatgcatttcttgccagcaataccgtcacaaacgaatactatccgaagcttgcaggagaactgtttgaactgatcgtggaattaaaggaaaagaccggatgtgatatcagattcgtaaatctttccggtggtgtgggaatcccttatacaccggacaaggagccgaatgatatcgctgtcatcggagaaggtgtgcacaaaaagttcgatgagatcttagttccggcaggacttggggatgtatccatttataccgagatgggacgtttcatgctcggaccttacggatgccttgtgacgaaggccatccatgagaaacatatctacaaagagtatattggtgtggatgcatgtgcagcaaacctgatgcgtccggcaatttacggggcatatcatcacattacggttcttggaaaagaaaatgcaccatgcgatcacgtgtatgatgtgacaggaagtctttgcgagaactgcgataagttcgcggttgaccggaaactgccagagatcgacatgggagattatcttgtgatccacgataccggagcacatggattttccatgggatataattacaatggacgtcttcgttctgcagaattactgctcaaagaagacggaagtgtgaagatgatccgccgtgcagagacaccggaagattactttgcaacatttgactgttttgatgatatcaggatcacaaaataaaagagttaggatgtacaggtaaaataacagaggacgcaaatcccggggaaaacgggatgcgtcctctgttggtttaagaaaacgatgtgccgcaaaaagaaagacctcagatttccgattggaaacctgaggtcttttatatgccggcagtgggacttgaacccacacgatgttgccatcaacagattttgagtctgcctcgtctgccaattccgacatgccggcgcgaacaaatattatattaacatatgaaagacgcatttgcaagcctttttatgatttcgggaataggacttttggttcattgacagaagttatcatatatgataactttagaatacatgagcacgatttataaaggtgtaagggggcggatatgcaggaacataatcacgccagacaggaaattgcatcccagcttcggcaggtgcgaaaggagcaggggatgacacaggaacggctcgcagaaaaagtcggtaccagaaagtcaaatatttcccgtctggagagcgggagatataatccgagtctggactttctggaaaaagttgcaggaggacttggcagggagattgaggtaaaagtcacgtaaggaggaagatgcaaaaagcatgatgatgaaacttggaaattataaggataacgacgtggaactgtgccgtaccaccaattccagagtgagtacacatacggcggaggcactgcttgaacagcacattccatttacaaagaacagtaaaaagattccttttttcaagagggaaacctaccagggggcagataccctctgggtgatcaccatcaatccacgcagatacgggcaggcacgccgcgtgatcgatggtatggatcgtgcataccgggagcgtctggtgttatccaattactagaatgaaattatgataaaaatgtgaaatgcgttttaaaagcagaatgagtgtggtaaaattctattcagataaaatcgtatgaaagcgatggaaatggaaggaatggaaggagccatactcatttttatgttagggaacatggagcagacagtcgcacgcaagcagacaaaaagggagaaaaacaacgcacagaaacggacagaagggtggaaacagaagggcatatggctgttttggtatgccgtggttccggtgtttgctttttacctgatggagtgttatgaacacaatccgtttgcggaagtgcgtgtgggagcacagctttttaatatttttttgtttgagctgatcggatggatgttatattttctgaccggaagaatgtgttttgcgtccagagtgctgtacggacttgctgtggcgtttggaattaccaatcattatgtgatgaaattccgttccacaccgtttgttccgtgggatctgttttcggctggaacagcagccagtgtggctggaaactatgattttacaccggaccggcgcatggtgattgttacacttgtttttattgcattatttgtgctgacctgcctttttaaaaaaggcccgcgtttttcctggaaaataaggctggggagtatcgtactggtgggactggtattgtgtacatttgtcaatgccctgcagcaggaatcgtttcagacaaaacattatctgtatccgtttctgttcacaccggcatatatgacaaaagtaaatggcatggcggtgacctttgccatggatcttgcctatgtggcagtggaacgtccggcaggatacgatgcggatgaagcaaaagagacactggcgaaatacgaaacgaaaacaacagaaaccgacacacaggatctgcccaacatcattgtcatcatggatgaggcattttcggatttaaaagtgctgggaccgttagaaaccaatgaggattacatgccgtttatgcaccggatgcagcagggggagaaaaacacggtcacgggatatgtccagacatctgtgtgtgggggaaacactgcggattcggaatttgaatttctgacaggcaatacgatggcattccttccgaacggaagtattccgtatcagcagtacatcaagagcaggacaccgtctttagcaggttatctgaaatccttaggatatgcgacctatgcacagcatccgtatcaggccagcggatggaaccgggataaagtgtatcctctgcttggatttgacaatctggattttatggaagattacagggatgtctcctatgtgcgcaattatatcagcgatgcatcggatatggagcacattatagaaacttatgagaaaaacaaagcctctggcaaaccggcctttattttcaatgtgacgatgcagaatcatggcggatataccgatacctatatgaatctgacgaatgatatccagtcacagtatgccagcgaaccgctcaatcagtacctgacactgatccacaagaccgatcaggcactcgaaaatctgattgattatttttccaaagtggatgacaggacgatcatcgtatttttcggggatcatcagccgaatgatacagtggcttctgtcgtggaaaacggggcacaggtagagacacaaaaacgttatctcgtaccttatctggtgtggagtaattatgggatcgagggagcgaaagataaaaatacgagtttgaattatcttgcggcgcaggtacttaccgcagcaggagtgccaacgaatgcataccagaattacctcttaagtctgagcaaaacttacccggtgatctctgcagcggggcagacaaaagggatcggagccgatgaaaaacagcttcagacttacaagaagcttcagtattatcagttgtttgaaaaaaacaaggaaaaggatgagtaagaacatgaaaaaaatgatttcgcggatggtgtcgcaccggtcatttccttatgtgatggcatttcttatgccatttataatctgtgtggtcatctgtatcggaaacggggtatatcctttcggggataactgtattctgcatatcgatatgtatcatcagtactgtccgttttttacagagtttcttcataaattaagaaccggcggaagtctgcagtattcctggaacctgggactgggatcggattttgtttccctgtatgcctattatctggcgagtccgcttaattttctgatcgtgctctgcccgaaacattatgtgatcgagtttatgacgatactggtgctggcaaagattgccctgtgcggactgacttttttcttattcttaaaatatcattttcatctgattggaaaagactcaaaactccataaaaatcaggtgattccggcacttgtatgttctacggcatatgcattgtccggatttgtggcagcctacagctgggatatcatgtggatggactgcatccttctttttcctctgatcatggtgggactggaaaaactggtacgggagcagaaaccgggactgtattttgtgacacttgcattgtcggtgtttgcaaattattacatttccatcatgatctgtatctttctggtgttttattttattcttctcttttttacgcagaaaggaggaaaactgaaagcatttttacggtttgcatggtattccctgctggcagggtctgtctcgatggtactgctattgccggagatcgccgtgctttctgcttccgggtctgctgaagacagctttccgaaaacgctggagtggtatttttctgttattgcggagctggggcgtgcggcagccgtcactacaagttatacgggaaatgatcactggccgaatctgtatgccggggcatttaccctggtactggtatggctgtatgtgctgaaccgcagaatctcctggaaggaaaaagttccgcgtatgctgatgcttgtctttttccttgtgagctttgcggataatcagctggattatatctggcatggcatgcattttccgcaggcgttgccgggcagacagtcattcctttacatttttgtgcttctggtcatgggatttgcaacgatccgcaaatggaaaggaaccagatgctggcatatcatcatagcagtgcttgccgcactgacactgatggttctctccggatattacggggatgaactggtgacggagtacatggctgtagttattaccatgctctttatcctagtttatggaatcctgcttcttttgcttaaaattgccccgaagaaaatgcggatagccctgcgggaagctgccttttgtgttgccattgcagaactggcagtcaatatggcggtaaccgggcttggcgttaccagccgcgtggcatatacggataaacaggggtactacgaagatctgctgcaacaggcaaaagaggataacggaaatgacggattttaccgggtggaggacagcgggcggaaaaccaaaaacgatgacagcctgtacggataccgttcggcaaccatattttcctccctgatgaatctggatgtcagccatctcttccagagcctgtatatggagggcggaaaaaatttctattgttacaatggtgcttccccgcttccgtcagccatgttttcggtgaagtatatgctttcctctaatccggtggatgaaagtccactgcggacacttgtgggaagcagcaatggaaattatctttatcggaataactactgcctgccgcttggctatatgatgagcgagaaggcaataaaaggctgggaatcttccatgcttgataggatcggttccctgaattccctggcacagcagctgggcgcaaaaggagacatgctttatccggcagcttgtacacagtcgcaggcagccggggatacgacaattgatatatctgaggatggatattattatgcggattatgtgacctgcaacgcggattccctgacggtatcaagagatgacggatggacgcagcagtatggaaagaccacccaccggtatctgctggatctgggagagtgcaaagccggaacaaagatccatattaccaatctcaatgtagaaacgatcgaataccatgtgtaccgcctgaatttcaaggccatgtgcactgcatatgagacgctcagcgaacagaccatgtcactcgaaaaaatgacagatcgcaggatcgttggaagtatcgatgtcaggcaggcgggaagactgattctgtcggtaccggcagatgagggatggacgttgtatgtggatgggaaaaagacgaaaataaagcctttcgcagatgcactcattggtgtacacttaaaagaaggaacgcacaaaatcgagctgcgttataccacaccgggcgtacagatcggagctgccatcagcatagctgcgcttctgttattcctgtttagtatgtggataagatataagacaagggggaaacatggggaaaaaatgcatcagtatcgtcgtaccgatgtacaatgagcaggaatctctgcagattttgtaccgggaattaaaccgcgtgacacgggaaatgggcgattatgattttgaatatttatttgtcaatgacggatcgaaggatgcaacactgcaaaagatccgggaacttgcagcagaagatgagcgcgtgcactatctttctttttcccgcaattttggaaaagaagcggcgctgctggcaggattgtcctatgcaaagggggattatgtgacgacgatggatgcggatctgcaggatccgccatcgctcttgccacagatggctgcgatgttagaagccggagactgtgacaatgtggcaacccgccgggtgaaccggcagggagagccaaagatccgttcgttttttgcacgcatgttttataaagttatgcggaaactttcccacattgagattgcagacggggcaagggattaccgtctgatgaaccgtgcaatggtagattccattctttctgtcagtgaatataaccggttttccaaaggaatctttgcctgggtcggatatgataccaaatggctggaatttgaaaatgtaaaacgttctgcgggagaaaccaagtggaatttctggaaacttgtgcgctattcgtttgatgggattatcaatttttcggatgttccgctgaagatttcctcgtatctggggctggtgctcaccgtggtttcttttattgcaatcatcgcggaaatcgtacgcgcattggtattcggggatccggttgccggctggccgtcgctggtatgtatcgtgacatgcattggcggaatccagctgttttgtatgggaattatgggacagtatattgcaaaaacctatatggaagtcaaaagacgtccgcattacatcataaaggagagtaactgtacccggaacaaaaagaacaacgcacagaattgacgcagatatgctttttctatataatgatacagaaagactgcactgcatttgggatgccgcgcagtcagatcataacaggtgaggaagaatatgcgaaagataaaacgctttttgagtgccctgctttgtggggcatttcttataacaggaacgcttgccggagtcagtgtgcgtacagatgcagcagccagcagttatgccgtgcagctgcgtgcggcaggatttccggatagttacatcagtgcactttccgcacttcacacagcatatccgcagtggcagtttcaggcggttaagaccgggcttgactggaataccgtggtcagcaaagagagtgtaaacggagtcaatcttgttccgaagaccggaaatgacgcaaccaaatccaccgcagacggtgcatatgactggaccaccaatgtgtggacggtctatgacggatcttcgtgggtcggtgctgatgcagactatatcgcttattatttagatccacggaattttctcaatgaaaccgatatttttcaatttgaaagtttaagtttcagcaaggtgcagaccaggcagggagtttcttctatcctgaaaggaacctttatggagaatatggttgaggacagcgacggatctgcgctggattatgcgcaggcatttatggatatcggtgaggaaaccggggtcagcccgtatcatcttgcatccagagtgcgtcaggagcaggggttaaaaggaaccagttccctgatttccggaacttatagcggttataaggggtactataactattttaatgtgggggcagcgggcattacctccacactggtcatcaaaaacggactggcatatgcaaaaaaagcgggatggaatacccggtatgcagcacttgaaggaggcgcaaaaattctggcgaaaaactacattggcgtgggtcaggataccttgtatttccagaagtttaatgtagtaaacaagaagaatctgtacagccaccagtatatggcaaaccttgcggctgcttacaacgagggcagaaagcttggacaggggtatgcggacaagcagcaggcatttgtattccgtattccggtttattccggtatgccggcatcagcagtgacatttacagccagtggaaatccgaataactatctgaaatcgctcagcgtaaccggacagacactgacaccggtatttcgcggggacacgacttcgtattcccttctggtggacagcaaagtttcttccgttaccataagtgcatcaccggtagctgcgaaatcttctgtgacgggaaccggcaccaaaaaacttcagacgggaaccaatacgtgtaaagttacctgcaaatcggagagcggagcatccaaaacctatacgcttaccattgtaaagaaagctggtgcagtggcagagaccgagaggacttccgtgacttcgaaaacatatcagttgaaaaacaaaatggttacggggattgcgccgggaacaaaggcggcagcatttttaaaaaaacttaaagtgaccgcgggaacggtcaaactgttcagtgcatccaaaaagagtgttaccggaatcgtttcaaccggcaatgttctgcaggtgtatgacagcaaaaacaagaaaatttcttcctatacgcttgtgatttatggagatgtaaacggagatggaaagatcgacaaaacagatctgaaccgtttgaacaggcatctgaatggtacccaaaagcttaccggatgttatcttaaggccgcagatacaaaccgcaaaaaagatggggtcaatgtgcttgatctggtatatctgaacaaacatcttcaggggaagatcaccattcagcagtaaaagaaaggcagaacatatgagacaaaaaagcaaagcaaaaggaaaacggatactgggagtggtactggcactggtatttctgatcagttgtatcatgacaccggatgtgcatgcacaggcggagagcatgatcattgctttaagcgccagatccgtgaaaataggagatactctggcagtgacagtgacacttccggcaggggtgacgggaacggtaaatctgacatattccaaagatctttttacttatcagtcagcaacagcggaaaccagtgtaaatgcaggcacggtttctatgactctggggagttacggttccggaaacaaacgtgcaagcggaactgttaaatttaaagcagatgcggcgggaactgcaagttttgccgcatccgcaccatctgcgggcaatcaggaaggggaccgcgtggatgtgggaggtgcaagtgtatctgtagctgttgaaaattcggcagtggcagcagatgacaaatcaaaagacaatacgctggcatccctgacgatttccgaaggaaccctttctccggaatttcagtcgaaagttaccgaatatcaggcaaaagtgggagatcaggtgacatctctggcagtcagcgcacagccaaatgatgctaaggcatctgtgatctcggtcagtggggcagacaaactgaaaactggtgtaaataaagtgcagatcgtcgtgcaggcggaaaatggtgtgaaaaagacctataccattcaggtgaccagaggagctgcgcagcaggaatcacaggatacacagcaaaaaggagagacacaggctccggcagacgggcagcagtattttacgattgatggaacaaatctctatctgacagacagtattccggatcgctatgttttgaatggctttgtcaaagatacagtgactttgtgggaaaatcagtatccgtgcatgcgcaaagacggaatagacacaccgctgagacttttgtatctggtggatgaaaacggacaaaacggtgctttgtatatgctggatctggatgatccggaagaaatttatccgtttgtatgtatgaactataaccagtataagcataccataggggaagagacaacatctgcagaagcttctacccaggaaggggaaacgggcctgttccagagtacggaaagccagatgcggctgattctctgtgcgttcgttgtggttgtactgattcttctgattatcatagtggttctgatcgtcaaaagaaaaaaagatgatgacgatccttatgatgatttttatgacgatgatgatgacgacgatgaggattacgatgatccggacgatgaaaaactgtatgaaacggatgatccggatgacaccgggatatccaagcgttacggaaaggaaacattccgcaaaaaaggcggatttatgcataaactgttagagggtatggaggatgatctggacgataatctggaggatgacctggatgatccggaagaagataccgatgacagggaaaaagagcgggagaagcgaaaggaccattaccgggatgcagatgatgaagatatcatgctgcagaaagaactggcagaagaagttcgaagctccatgctcggaagaaagaagaaaacaacccaaaaagataccgatgacgatatcgaatttattgatttgtagaattgtaacaggaggtataaattttgattccatatacagataaggcgaaaaaagctctgaattatgcgaaccgcctttcccgttcgtccggctgcaattatgtcggaaccgaacatattctggcggggctgctcaaggaaggaaccggtgtagcagcagaagtactgacagccaataatgtggaactggaagcgctgcttaagctgattgatgaactggttgcggcaggtgaggaggtgacggtggcagaccgtgacggatattctccgcgtacccagatggtgctggatcgtgccagggagatggcagaccgttttgacagtgaacggatcggaaccgaacacctgctgcttgccatcataaaagagggggattgtgcagcttcccggcttttaaatacaatgggagccaacccacagaaactttttgtggatattcttgctgcgatgggagaggacccggcacagtaccgggaagaaatccagcgtggaagaaatgaggaggcaacacttactcctacgctcgatcagtattcccgcgatctgacagctatggcgcgggccggacggttagacccggtaattggcagggaaaaggaaaccgaacgggtgatccagatcctgtgccgcagaggcaaaaataatccgtgtctgatcggagagccgggtgtcggtaagacagcgatcgttgaaggaattgcacagagtctggtaaacggaaacgtaccggatattgtggcagataaacgtctggtatctctggacatgtccggactcgttgcaaaatccaaataccgcggggaatttgaagaccgtattaaaaaagtgataaatgaagtggaaacggctgggaacgtgctgctatttattgatgaactgcacacgattattggcgcaggtggagcagaaggtgcactggatgcgtccaatattttaaaaccggcacttgcacgcggagatgtgcaggtgatcggtgcaaccacgatcgaagagtatcgcaagtatattgaaaaagacgcagcactcgagcggcggttccagccggtacaggtggaggaaccgacagaggaagaatccattgagattttaaaagggctgcgaaagctgtatgaaaagcatcatcatgtgcagattacggatgagggagtggaagcatccgtgcgtttatctgcccgttatgtcaatgaccgttttctgccggataaggcgattgatctgatggatgaggcagctgctaaggcgcggctgggaatgatgcacggttctgacgatatgatgcagttaaaccgcgagatccatcagacggaactggatatggaacatgcgctgcaggagggagatatcgagaaagcccgcacatggaaagagacacgggagaacctgcaggcatccagggaaaaactcgaaaaaaagaaccgccgcgtatccaaaaacaaagttccggtggtgggcgaaaatgaggttgccgatgtggtggctggatggacaaagattccggtcagccgtctgacagaaagcgaggcatcccgtctgcagaaactggaagaaacactgcacaagcgcgtgattggacaggaagaagcggtatctgcagtttccaaggctgtccgccgtggtcgcgtgggactcaaagacccgaagcgtccgatcggttcgttcctgtttttgggaccaaccggtgtcggaaagacggaagtttccaaagcactggcagaggctgtgtttggcaacgaggaatccatgatccgggtagatatgtcggagtatatggaaaagcacagtgtatctaaaatgattggctccccgccaggatatgtgggccatgaggatgggggccagctttctgaaaaagtccgcagaaatccattttctgtgattctgtttgatgaaattgaaaaagcccatccggatgtgtttaacatcttacttcaggtgctggatgacggacatattacagattcccagggacgcaaagtagatttcaagaataccattatcatcatgaccagtaatgcgggcgcacagtcgatcatcgagccgaagaagcttggctttggtgcaaaagaagatgaaaagcaggatcacgagcggatgaaagccagcgtgatggaagaagtcaaacgtatttttaaaccggagtttttaaaccgtattgatgagacaattgtattccgtgcgctgaacaaagacgatatgaaaaaaatcatcggtattatggtgcgtgatttacagaaacgctgtaaggaacagttgcagatcgatctggtggtacgggaagctgcaaaggaatctattgttgaaaaagcgtatgaccgcaaatacggtgccagacctctgcgcagaaaactgcaggatgaggtggaagaccgtttggcagacgcactgatccgtggagaaatccataccggggaccgtgtgatcgtgacgacgaagaacaaggaaatcattgtatcaaaagataaaaagtgatataatttaagaaccaaataatcaaccacacaggaggaaaaatcatggctgcaatcagtgaattaattcgtacggaaggaaacggaacccttagtttcggcgattacactctgggagcgaaagcaaagcttgataactacgaatttcatggagataaatacaaagtaaaaacgttcaaggagattacaaagctggagcgtaacggactgtttgtatatgaatctgtaccgggtacagctgtcaccaattttacagaggatgagaatactgtcagctttacggtagagggaccggaagatgcacagatcacattggagctggcagaagagacagagtacgagattgatatcgatggcaagtctgcaggaacaatgaagaccaatcttggaggcaaattaagcctgagcgtagaattagaaggagcagatgcggtagcaatccgtgtagaaaagagataacatatggcaaaagcaaaaaccagtgcgtttttttgccagaattgcggatatgaatcatccaaatggatgggccagtgtccggcatgcagagagtggaacacgttcgtagaggaactggtggatcggaaagcactcagtacttccggaaaaataaaaccagcgacagaagcgaaacctgttccgctttctgcaataaagacatcggatgaggagcggatttccacatccatgccggagctggatcgtgtattgggcgggggagttgtaaaaggctccctcgttctggttggaggagatccgggaattggtaaatcaacgcttttattacaagtctgccggaatctgtccgggcagaatctttcggtactgtatgtgtccggggaagagtccctgcagcagatcaaactgcgtgcagagcggattggcacgttcagtgatcatctggaactgttgtgtgagaccagtctggacaccatacgcacggtaattgaacggaataagccacagattgtggtgatcgacagtatccagaccatgtataacgaaaacgtttcctcggcgcctggcagcgtgtcacaggtgcgtgagtctacaggtgttcttatgcagatcgcaaaaggaatggatatctcgatctttattgtcgggcatgtgacaaaggaaggggtcgtggcaggtccacgtgtactggaacatatggtggatacggttctttattttgaaggagaccgtcatgaaagctaccggattctgcgtggcgtgaagaaccgttttggttccacgaacgagatcggtgtttttgagatgcgcacagagggactggttgaggtggagaatccgtccgagtatatgctcagcggcaaaccaaaggatgcttccggttctgtcgtggcatgttccatcgagggtacccgtccgattcttttggaaattcaggcactaatctgtcacagctatttcaacaatccgaggagaactgcgaccggaacggactttaaccgcgtgaatctgctgatggcagttttggaaaaacgtattggaatgcagttgtcggattgtgatgcttatgtaaatatcgcgggcggaatccgtatgaatgaaccggcaattgatctgggaattgtgcttgccattatgtcaagcaaactggatctgacgattgatgagaagaccatctgttttggcgaggtgggattaagcggggaagtgcgtggtgtaagcatggcagaacaacgtgtggcagaggcagccaaactcggttttgaagtatgcattctgccaaaagtatcccttccttctgtagggaagaagtatgcaatgaagctgatcggggtggcaaatgtcagggaggcactggatgcaattcaggcgtaggctatgttatatgaatttcttgtattgtgtgaaaaataaaaagcatgatataacaattttagaatacaacataaattgtctgaatataatttaatttgtaatttctgattgacaaaattcgagccgggtggtattataacaaagctgactcgtgcagagcagttctgatcggataaagccaagtgatattgagctccgacagaataaattgctgagaaaaagttgttgacaaaaagcgacagacatgataagatatcagagttgccgcgaaagaacgacaacaaagaaaagtaaaaaaagttgttgacaacgacttgaagatatgatagaatatacaagctgttggaaataacaacaacgaacattgataactgaacagtgaaaaaccttgaaagattttgagaataattcaagaacgcttctgttaaagaagcaaccttaaaacagtaaatcaggacattgtttctgattaaaagccagatttaattctggcaggacaaaactttttaacatgagagtttgatcctggctcaggatgaacgctggcggcgtgcttaacacatgcaagtcgaacgaagcactctatttgattttcttcggaaatgaagattttgtgactgagtggcggacgggtgagtaacgcgtgggtaacctgcctcatacagggggataacagttggaaacgactgctaataccgcataagcgcacaggatcgcatggtccggtgtgaaaaactccggtggtatgggatggacccgcgtctgattagccagttggcagggtaacggcctaccaaagcgacgatcagtagccgacctgagagggtgaccggccacattgggactgagacacggcccaaactcctacgggaggc

SEQ ID NO: 994 - DNA, 396 bp, Unknown
  gut microbiota DNA sequence
gcgaagaagtatttcggtatgtaaagctctatcagcagggaagaaatgacggtacctgactaagaagcaccggctaaatacgtgccagcagccgcggtaatacgtatggtgcaagcgttatccggatttactgggtgtaaagggagcgcaggcggtgcggcaagtctgatgtgaaagcccggggctcaaccccggtactgcattggaaactgtcgtactagagtgtcggaggggtaagtggaattcctagtgtagcggtgaaatgcgtagatattaggaggaacaccagtggcgaaggcggcttactggacgataactgacgctgaggctcgaaagcgtggggagcaaacaggattagataccctggtagtccacgccgtaaacgatgaatactag

SEQ ID NO: 995 - DNA, 4313 bp, Unknown
  gut microbiota DNA sequence
cggtaggatgctcacaatgagcgcagcgatactaactgattgaagttttttcttttccatagttttacctcatttcttttttcccaaattgggtgacagccagcgcgaaaaacaggccaaacactacaatcgcgcacggcaggaacggaaacaccgaaaaagcggcgtcggaagtttctgctgtaaagtcatagagagagcaggaaacgagataaccgctgtaacagtacgggtaggcgatccacagcggcgtattcgcaaccaatacaccgggaatcacaagcagcagatttaatcccacagaaagaagcggcttttcaaacagcacagtgatgacccacatagccgcaatgcacggcaacatagtcagaaacagccccaagcaccatttcagaagatataggatcggcagggtttctgttactcccattgtctgtgtcgcaatcaacccagcgattacaaatacgacaagaaacgccaccatctccataaacagataaaaggtaagcacacagaatttggcaatggataatgcgcagcggctgaccggcagcgccagcattttcagaatcccgttatttcctgtttctcgtcctgcgatcatcacgcaaaccacgatcatgctgaatggaagcagatagtaggcgtaaacaagcgcactttgaataaacatggcaggccacgcattggtgtattccggtgtaaagtagttgctcaaactcgcaaccccggaaaccaccaccaataaaggtgcaatgaaaatcaggggtacgattttggagcgttttactttcataaactcgattttgagtaaatccaaaaaactcatttcttattatccctccttactcgtagcgtctgtacttcgccagccacaagcccacagcaaggaacaacagtgtttccaccaaagcgacaagggcaaccgtcgaatcaggctgggcgctcatggctactgctggtttcagaataatcacaaaaggatgcaccagcaaaagcgtcagccccgaatttgcaagggccataccactcagaaaaccggcaacaccaattccaagcggcacccacatattttcaaagcgcgaggaaatcagcagcataaacgacagtaccggcatggatgtgagaaaagagtatccggcaaagcgtaccagcgtacccatctcaaacgctccgtccggcaagtccgtcattccgatctgtgcaagtgccaggttttgcagcacgatagcaaccaaaaacatgaccgtcagaatcagaaatttacacagatacatggacgggacgctgacgggaagcatatacatcttctttacggcacttcccttaaattccatgttgtagatcatgcaggtagcaaccacgataccgaacagattcagcaccataatcatgccgtagagctgggtcaacaagacatccatcggggccagcggcagattcagaagtgtgtctttccgcacaatgaaattgacaaatgcgtaggcggctcccaagacaccaacggccagcagcacgggaatcacgccggttcgcttttctttccgaagttcgattgccagcgttttcataattttgccctctgctttctgtccatgttatctttctcaaccatagaaaggaacacatcttccagattgtccgcagcgaagccggattgcagggcgtattgacgcagatcattcatgcttccctcaaacagcagccgcccgtggttgagaatcccaatgtcatctgcaatcaattcgatttcagacagcatatgggacgagatcagcaccgtgcagtcgtaaaggctgggcaaggattttaccagattgcggatttcgtggataccagacgggtcaagaccgtttgtgggttcgtccagaatcagaatcggcggacgccccaagagcgccccggcaaggcccaagcgttgcttcatccccagcgaatactgttttgccagccggtcgccaaactcggtcagccctaccagttccagagcatcttccacatccgctttcggcagtcccaaaatgcggcggataatgtcaagattttcccgcccggtgagattcgcgtagaaagacggcgcttcgatgaaagaaccgatctctttgagaatggcaatccgatcctgcggaaactgtttcccatcaatggtaaagctgccttttgtggggtcggtcaaccccaacagcattttcatggtagtggatttgcctgccccgttcggaccaagaaaaccataaatgctgcccttgcgaatatgaagcgaaacatgattgaccgaagtgaagttcttatatttcttggtcaactgttccgttgtaatgatatagtccatagaaacatctcctttcgatgcttctatggtacaacttcaacctgacatctacattctcccgtccttacttttaccttacttttcaaggaacaagaacgcagaacggacagcccatgatataatagaaacaaataaaatcagattggagaaactgctatggataattcctttttacatactaaaaggctcctgttggtagatgatgaacaggaactattgaaaatggtttcagatatattgaaagatgcaggatttgaaactgtccttaccgcaatgacggtcaaagaagctattttgaccgcaaaagaggaaactcccgatttaattgttttggatgtcatgctgccggatggggatggcttttctctgatgcagcatttccgcacttttaccaatgtgccgatcattttcttaacagcaaaggacgaagcagcagacaaattatcgggattggggcttggtgcagatgactacatttctaagccctttatgccgctggaactgttactgcgtatctatgcggtactgcggcggacctacaaagaggattcaccgctgcttgttttggatggatgtacgattgatttcagccgggccgaagtccataagggcagcgaaattatctccctgacagccaaagaacatactttacttgaaacgcttgcccgtaatgctggaaagattgttaccgtagatgctctttgtgaagccctctggggggataatccttttggctacgaaaacagcctcaatgctcatgtccggcgcgtccgggaaaagattgaaaccgatccatcaaaacccgtgtccctaataaccattaaaggattaggctataagctgatagcaaggaagtgatgtcatgaaatcattcggaagttatatatctaaatatcttgtgtcgttcgttgcctttattctgatattgctttttcttaatgcagtagtattcggtctgacttttcaaaagattgtgaccgaggattatggcgattcatccccgcaatccatgttggaaatgactgctaccgccgctacgccggaacaattatcggatgaggcggtgcaaatgctccgacagaatcatatttgggcgatctacttgaatacagatggtcaatgttattggtcggttgatttgccggacaatgtgccgaaaaattacacaattcaagatgtcgcactattttcaaaagggtatattgaggattacccggtttttatttggaacaccgatgatgggttgttggtgctgggctatcccacagacagctacacaaaactcaccagcaattactattccattgcagcacttcaacgactccccatctttgttctggggatgcttggcttggatgtgctgtgcctcttttcagcctattacttttccaaacgcagaatcattcacaataccgaaccgattgtgtccgctgtggaaactttggcagacggaaagccagtttcacttcatatcagcggagaactatcggaaattgcaagcagtgtaaacaaagcttcttccattttgaataggcaaaatgaagcgcgggcgaactggatcagcggcgtttcccatgacatccgcacacctctctccatgattatggggtatgcgggccgtattgcagaaagtaaagctgccagcaagagcatccgtgaacaggcggaaatagtacggaagcaaagtgtaaaaatcaaagagctggtgcaggatttgaatttagtatcgcagttggaatatgagatgcagccgcttcataaagagatggttcgcttatccaaactactgcgatcctatgtagcagacctgttgaatacaggaatttccgatagctacaacatcggaattaagattactcctgacgccgaaaatgctgtgttggaatgtgatgccagattgatttcgcgagctgtaaacaaccttgtccagaacagcataaaacacaacccacagggctgtgaagtctgcctttcgcttaca

SEQ ID NO: 996 - DNA, 33836 bp, Unknown
  gut microbiota DNA sequence
cccttgattttccattctttccagcatcgtagtaagagatgttatcgctaatccgcatttagtcgagagtgacctgattgagataccatcctcctgccacagcacataaagaatacgcccctgggctccattaaacgcatcaatattcttttcactgagaatcttctcgaaaatccggtctccaagctgttttattttggtgacaagaaatcctccattcatttccatacaaaagctcctatatagtagtttattaaaaacatactatataggagctttattgtcaagagtttatatgtcttaataggtaaattccgtttttttcaattctccaaactggaaattgtcgagttcttttccgttacaattctttcatcatgcacaatgattctggcattgaaacataaggaccataattatccattttattaaatcctacttttcggtatacataacacgattcttgtagcaattctccagtttcaagaatcattttcctatatcctagttctttcgcccactcgattaattcaagaactagcttggttcctattccttttccttggaattcatctctgacaaatactctttttaactcggttgcattgtcgatatcaccgtactgatattctctaattgctccagcaccagcgacttttccatcaacatacacaactacagcctcttttatctcatcaagctgattatactgtttatatttatctctttttataactcttcctactcgcctatctaaatccatatctaataactgacagttctcgataaagtctttatttgtcccagtacatctaataaattcaatatcggccatatataaacacctcctatgtgaagaaaattggaatttaccaaatcgtcaaattccgatttgttaaactatctatacaataccatatctctttggctaatacaataattgcatcgctcccgcttattctcatcaattctgcaactattatattgtgatattatgcttactcttaggctgtctgttcacttttctttgcgtgatacgcttcacgtctcatagccagtgttttttcatatcttacttttgcaataggatctccgcttaatgcatcgtcacgcatttttctgtagctcttcactgtggctctaacctgatactgtttacgctctgcaagctgactctgtgcttcctgatctccggcttccgctctggctctcaaggcttccatctgctcctttcttcttgcggtatgccgtctgttgtattctgcatttctctcttccaaatatttcgcatattcagggtcattttctgctctctgcttacgcttttctgctgatttccttgaacgttctcttgcaatagctctacgctcctcaatctctctgacggcttcctgattgcctttttctgcctgctcctttaattctgccaaagcaatctttttcttctttgtagcacgctcctgacgtttcttttccctttccaatgccaagcgttctttctcttccatcttcgcccgatattcagggtcagacattctcaattctcgcattttttcagatctcttacggttgttctgtctgcctttttcaaggattgctttatattctgccatagcttcatgtgtattgtaaaagacaagcagttcgtcctcatttgcaattctttttcgttttgtcttaaaattatccctagttgtcttcccaagaacggtatgccccaaatactcacgtctgttcaaaatatagcccactgttgtagcattccatgtataagggtcatggtaattcgtacactggcaatcctcaggatgattctgtctcgcataagccgaaggaataaggattttatcctctgacaaggtatctgctattgcggttgcacccattccatcacaagcaagctgaaaaatgcgtctgacaaccgaagcagaagcttcatcaacatacaatgtctgcttatcctcaggctttctgtaatatccataaggcactgcaccgctgacacgttttccgtctcgcatttttgccttgaatactgccttgattttcttactggtatcttttgcataccactcattcatgatattcagaaatggtgtaaaatcattatctgccggattggcactgtcaactccgttatttactgcaataaaacggacatttttcttagggaacatcatttccgtatagaaacctacttgcagatagtttctgccaaatcgggacatatctttgacgatcactgttcccactctgccggcttcaatctctgtcagcaaagaattgaatgccggtctgttgaagttcgttcctgaatatccatcatcactgaaatgctgaatattaccaaagccatgttgcactgcataatcttccagatacttcttctggtttgttatggagttggattcgccctgcatctcatcatcacgggacagacgctcgtaaagtgctgttattctgttatctttagccattttttcagctcctttcataatgctaaaaaataagaacacacagaaaacacttcattttttaatgacctattttctctgtattcttaaaatctaccccttatggtatctatacacttaaaatttaacatttagataccacaaagtctctatgaaataaaaattgcttcttcaggtaccattttttcaaataatcggtacctgaagaagcaatttttctcttataggtgacattcctttattttaggcattaaaaataaaaaatatgtcaccttaatcactattttttatcaatagatcccatttacagaatttatgaaaattgatctttttcttacacttttccaatccacagaatttgtaagaatcgtttttacttataattttcccaaccaacaggaaaacggggtacatttctttcggaagaataaatttacaactgcgccgtagttccatcgcataacgctaatagcgtaaacgtaaaacttttacaaaaccaacctgaaatcaatatcggcgctgctttgtaaatttttctgtagaaagagaatgtaccccgtcttccgtcacatagaaaacacttatatttaaaacagttccctcatagacttacataatcttgtgaacccagccttccggtccttcaatctcgcccatctggattccggtaagtgtctcacgcagtttctttgtgtatggtcccatttcttccattccactcgggaaacagatttctttgccatgatcaacaacctttccgattggagaaataacggctgcagtaccacagagtccacactctgcaaaatcaggtacttctgagaatttaaccggtctgtgctctaccggcatatgcagatacttttcagcaacaaccatcagggatcttctggtaatggaaggtaaaatactgtctgactttggtgttacgaatgttccgtccttggtaatgaaaatgaagtttgctccaccggtctcctctacataagttcttgtagcaggatcaagatacatgttctcagcatatccctgagcatgtgcatctacgattgcatgtaaactcatagcgtagttcagtccggctttgatatgtccggttccgtgtggtgctgcacggtcaaaatcggaaacacggattgtaattggctttgcgccgcccttgaagtaaggtcctaccggtgtaaccagaatacggaactggtactcatctgccggctttacgccgataacagcgtttgtagcgatcatatatgggcggatataaagcgttgctccggaaccaaatggaggtacccatgctgcatttgcctttactacctgctctacggcatctacgaaacgatcctccgggaataccggcatctcaagtctctcacaggaatctttcatacggcttgcatttaagtccgggcggaaacatacaatatgtccgtcctctgttgtgtatgcttttaatccttcaaaacaggactgtgaatactggaatacacctgcacactcatttaatgtaacggtaggatctgttaccagtgctccatcgtcccactttccatccttgtaatttgcaacataacggtagtctgtggtcatgtaaccaaatcccaggttaccccagtcaagattttttttctccattttcatttcctccattttctattccaattcaagtgttctataacttttcgttatggaatactggatgtactattatttttacatattttagtacaatctgaagtatttgtctatagatcttatgaaatttctctatcaaaaaaattcataaaaaccataacctgattccctaaagtcccagaagttccattgcttcgtcctttaactcctgtgtgcgttctttcaaaagcagaagtttgttgtacttataataggcatcattgccacattcactgacaaatttcagactataataaccggccgaaagttcggacaaaaagattaccatttcctgtccctctccaaatacccgtgcaagaaattcaaatgcatgcgtcagatgacggcctgcatctgaaatttccttctggcggatctgctccctctcatcaaacagtttcttgacacataagaaatctccttttgcatcaccggttccttcgactgccagtgccatcaggcagtcattcagtgcctgaagtgccgcacacatggctttttcctgttccctgtctatcatgccggcctttttccggtgagtgatcatggtgtcataagaagaaatctgtctttccagaatttcttttccgcttccccgtccttctttcagatcgctccgcaaaaatcccagctgctcaaaaaaagcttcctgtgcagcttttttccggaaataagaaatgaattcctgtcccaggctgtccaaaagcagcccaagcagactcagcttctcatcaaacggtgcatttttgatcgtcatactgttttctggtatgctgccctctaaaatttccggtatacggtaaatattcttatacttattgtacagttcataataagcagcaaaatcgcgggcaatctcctcgtcctgcagatactgcacaacaaagtcatagtctatggcaaatccaagctgttcatacactttcatgacctgtgagagatcctcccatccacgggcggtcacaaaccgttttccatccagatccgacacaaccgaatagaaattgttctttttaatctccagataagaaagaattgctccatgaatctgcgctttatacgcatactctttccacacagaaaaatcttcttctatataaatccgcttgacacggtcataagtaacaatatcaaaatcccgcaccgacttgttgtattccggaggatttcccgccgtaacaatgacaaagccatccggtaccctgtgatttccaaatgtcttgtactgcaggaactgcagcatcgtcggagccagcgtctcggatacacagttgatttcatcgagaaacaggattccctcatgaattccgctttgttcgatctgatcatagatcgaggcgataatttcactcattgtatactctgtgaccgatacatcctccccatcataggttttcttcgagataaacggcagtccgatcgcactctgtctcgtatggtgcgtgatcgtataagaaaccagattgatcccgcactcctgcgccacctgttccataattgcggtcttaccgattccaggcggcccgatcaaaagtaccggacgctgccgttccacaggaatcgcatactccccggtctcatcttttgtcaggtacgcctgaaccgtatttatgatttcctgttttgcctgtttgatgttcataaaatttctcctttatctatccttttgtatcctctgacaaatataatttcactgcccagtccggcacttttatcggctctcccgaaaaagttttctgcggtgtgtcatccccgtaaaaaacaaataccgtctgataatctgtcggttttttcggatattctccatacccgtccgtaaaatacatcagtccttttaagtttttgagttccccgctgtttcttaatttctctacataggaaaataccggccgaaaatccgttccataccctccggaaacggaaaactgctcggtatattccccgatttcgtccagatttgtgattggaatatctttttgaatctggttatcacattcgatgatgcggatatgcactttatggaaaaaactctcctggtgctttaaaattgcccccgtctcattcaaaaactgctgcacaagtttttccttgcaggaggccgaagtatcgattgcaataacaagttcttcgatcttttttgcctcccggaattcgttttcctcgatcagaggcatgtttccgtaatgctgcagtccatacatgtaaaatccgtaatcaaacgaatccatatccacggaaacctcttctctcacaactgcaaacctctttaaaaattctttgtagctttttcgctcccggctgctcagctttaacatccatgcaagctttcccgcatctgccgccgcgtcttttgcataggtttccatatcgctttcgatacgctttgcatgttctttccactcgtcttcctttggatcggtttttccaagcggcgttgcatcagacgttttctccccggcattttcctgctgatcactgtccatctgcggattctcctgcggcaccgggggctggtttttattctgctcctgcgacggttctttctccatgcgctgccagaaactgtggtcacagagcaaaaattcctgccggagggattcttccagatatggatcgcgtttgcgcagcataaaatactggtacagtttttccgctgtaagcactgaaacttccttttccagtttttcataccactcctgccggaaatccgaagtcacacgcaaaatggtcggataatccatggaatccaccaccgattccactgcaatatcacaacagagatcccacagctgtgcatcctcgtgctgttttgcggaaaacatatgccggaacagacagtgcatgagcatatgcatatatgtccggtttaaaatttccggccgttcaatataagtctgcagcagataggtcggattgaaccggatatataccgcatccgtgcccactgttctcgttgacagatccatggcaaatcccagacttccgagtgccggtcccataaaccgcatcgacagatacagttctgtcctgacactgtttaatattttatttccggttgcttccagttgttcccttgtcttcatcgttctccttttcctaccagtccaaagacatggtgaatgctttcttctttccgaaattactccgctgatattccatcagtattgctgcaatctgactcatcttttcctccgatgccagcggaagggcatcggcaagtgccgcttccggaatcaggcaggaatcacaaagataggaaatctcttccaccttattctccggaatcagcaccttaaggatcacctctgcattctgttcgagatactgttcgtactgttcccgcagatggttctccagctcaatcggatgcatcagccggtcacaggcaatctcaattgccgtgcgataatcatcatttaccacctgcgcaaacagacggtcatacgccagtaaatctacgccttttcttgtgacacattcccggtacggatacccgcttccctcaatcttgtgatgcagaacccgagcctccacatcttccacaaaattgtatacatatgccggaaacgtcagctgcagcccacatggctctatgcgaaaatgcagcctgcggtcggtatctgccagaagttctttcatcaccgaatagtctcctctaagctgcgtcagcttcacttcttccagacaatggcactgtttgatcacgccgtcataatagtcttccacactgtcgtacagcgaaatgcttttgagttttttacagttataaaatgcatatcttccaagcgtttccaccgtctttggaatacttacactctctaaatcttcccttgcggaaaatgcatttttgccgatcgttttcaccggacatccatccacctgatccggaatgaccagatgtcttacggttccttcatacccggtaacggtaattgtatgttcttttgttgtttcatattgcaatgccatatggatactcctgcatctgttatgccctattctgatatacgctttttaattccccgataaaatacaaagaccccagcgcaatcgtcttttcttttggtgttaaaagttccggaatctctgcaacctttgtaattgcgtgtgcaggcaccccttgttttctgatatcttctgccagtgtttccccttgcagtgcccgtgcactctctggtgtgacggttacaaaatccatggcaatcggcaacagttccccgatcatcttttcataatctttgtctgccatcacacccatcacaaaatgaaacttttcctctggatacaattcttcgagacttgtacgcaatgcatggattccgttactgttgtgtgcaccatccaccatcagaaacggttctgtacttaaaatttccatacgccccggccataccgctctgtgaattccacgggcaataacggttttcatcttctctttttctatccggcatccggtccatgccacttgtgccgcacacatggctgtagcggcgttttctctctgataagcacccaaaagtcctggctgtagtgcctttgccccctgcaggtccttctcctgtacacaccgcgcacgtactccctttgctgcggccgccctttgcagcaccgcaagtgcttccgattcctgcggtgcaattaccaccggcactcttgctttgataattcccgctttttcctgtgcaatctcttctatggtatttccaagaatgttcatgtgatcataaccaatccgtgtgatcactgataccaccggatttcccagtgcattcgtagaatcaagtctgcctccgaggccggtctccataattacaagatcgcagttttgttctttaaaatacagtaccgccataagcacgcaataatcaaacatggtcggtgtcacgccaaattcctgctccaacagaacattgccgattcgtgtcacatcttctctggaaatctgtctgccatcaaccatgatacgctcttcaaaatcaatcaggtgtggagaaataaatgttccgacttttaatccggcttcccggaaaactgatgtcaggaatgcgcagaccgatccttttccgttggttcccgccacatgaataaatggcatcccgttttgcggctgtcccatctgttctaacatgattccggtaatttccactcccggccggtttccaaaccgtcttccattttctatctgatccaatacttcttcatatgaatacatctttattctccctgcaggtatctgtaaaccgctttcggcagccggtacctgactcacaaaaatagggagaagcttataaaaagcttctccccgtattctacttctatatgacggttgtttcaagtgcaaaatcctataccgaaaggatcactccgccttcatttgcatacatgctggataccccggccgtattgacaattacaatctttttgaattttgcgactttctcaattgtgtccttcacaaactgtgcacgttccggacaattgcagtgggaaatggcaagcacacggttctcgcagttcttagtaactttgagcatatcctctaccatcttggaaagtgccttcttcatgccccttgcctgaccaagctgctgaatcgttccctctttggttgatcccattaccggcttgatgtttaaagtatttgccacaaatgctttcagtccgctcagacggccagccttgcgcagtgtttcaagtgtctcaatgacaaaaaatgtgttcatggaagaaatgtaagattccacctctgttacaatttcttcaaaagatgcaccggattcttccagctcctgaatctttaatccgatcagggtttccccaatcgaggccgacttggaattaaatacatgaatctgcttggaatcctcatgctcttcatgataaagatctgctgcaagtaccgcactattgtacgatccgctcaattttccggacaacgtcacaacatatacatgctccgcctctccctcatacgcactcatataacgctccggagacgggcaggaagatttcgggctgtgaatacatgcctttactctctgcaagaaatctctctgattaaaagtttcatcatctgtgatctgatatccatccacatccagcaaaagcggcactgtgcaaaaatgtccatctgcctttaaatcctcaggaagttctccacaactgtcaattacaattttatactgactcatatccatccctcttttctaaaatacgtctatcattttatgaagtgcgtgtgtttatcattactttataaaaagtttttattttctattacatgtagtattcattactatgttcatatcataacacggtttcagatatttgaaaaggggaaaaaggcatattttatagtttcttcatatttttcaggaaaaatatgccgtcacagctgatgccagagcatcaaaatccgttcgtcccatcagttcccgtgcagaatgcatcgataagagcggaattccaatatccactgtgcggaccggaaacagcgtggatgcaaccgatcccagtgtaccacccccgcgcacatcggaacgattgacaaacctctggtatgcgattttattctgatcgcagagctgccgcagaattccgattgcctttgcatccgtcgcataagactgggaacatgcctctttgatacagaatccatccccaagcaccggatgattggtaatatccattttctccttatgattcggatgcagtgcatgcgccacatccacggaaagcagcatacctccatacatcgcacaatccgtttcttcctcactgcagccaagcgaccggtagatgcgttttaccatatcatgcaataagatcgatgctgcgccctgtttgctggtatttccgatttcttcattatcaaacagtgcgatcagattgataccatcggtccgtgttccttccacgatggctgccagcagtgccgcaacggatgtctggttatccagtcgcggagaagacagcagtgtctcttttatccccacatatgccggttcttccacacagtatgtattcagttcaaaatccagaatatcctctttttttactgccagctcttccgcaagaaatgacaggaaataatcggtactctgctgttcttctggcagcatatccgcaaccggcatcaaatctacctgattattgattgccactcccttattcacttcccggttcatgtgaatggcaaggtttggaataataagaaccggacgaccggaacgatacagcatggtcttcggggcaaacacatctttgcttcgaacgatcacgcgccctgcaatccccagcggacgatcaaaccatgtatttaaaatcggtccgccatatacttccacgttcacctgcgcataccggtctgtcacaaaatccgcatttggtttgatccgcagatatggataatctgtatgtgcagctgccatgcgcagcattgcatccgcacggaagttttctccaactgtaaatgcatagagcgttgttccatgatgattcatcatataagcctttccttttttcagattccatggtctggcatactccagttcctcaaagccggattcctctaacgtctccatggctgcttccacacaatgaaacggtgatactcctttttttaaaacatctatcaaaaatgattctttcatagttatagtttcccttcttttcttaagtgattgcatcgttacggttcgcaggggaacctgtgagcagtaaccgtgcattttctatcaatcagtggcattataacacattatgattgaaaagatgaagtcactcatgctaaaattaaactatatcagctgccgttttatcggtttcacaatggggaggttttttatgctggctcttgcattaacaaacaaaaaagattttatgaataaatttctcaaaactgaaatttttgaccattttctgcttcaggagggcattgtcgtttcttttgcaagctatgtgattgatggaactattaccaaaggattctatacagatacagaagccgaagaactcggtattaaaacttttcattttcttccattttccatgctccgtccacgcatctttgacctgatcaaaggaaaaaaggctccatcctcctttaaattcgtcctgatgctgtcgccggaaaatcaaaaacgtaccatggaacgaatcggaagttcctataccccggcagatatttccgccatgtccatgaacatcaaatttcaaaatcagatgcttacactgactaccggaatttcttaccgcattttttccacagataagacattagaaccggaatgggacaaatttgtcagacaatttctctcacaacacgacatttcttttgaagtgctttaaaatccggctattttacgaagattttgctttacatttccaattggttatgctattcttagcatagttgcaaggcaacacaaatatattggaggtactttcgatgaacaaaggtacagtaaaatggtttaacaaccagaagggttacggattcatcaccgctgaagacggccacgatgtattcgtacattactcaggacttaacatggagggtttcaaatctctcgaagagggtgcagcagtagaattcgaaatcactgatggcgctaaaggtcctcaggcagttaacgtaacagtagtgaaataattgccgactaatctagtttctatgtacctttttctttctttagaataagatattggatacaacgattaaaaaaaggaatgttgcatttctgcaacattcctttttttgcgtatgggaatacatcttttaaaatattctcctatccattgtaattagtcctcaaatacccgtttgatactatcataatgcaggaaaattccctgatctgcgagttccctgatctcttctggtgtagcaaaccgacatccgtctgtttcttccgtctgcagatggacatcttgttccgtaacatccatcgtgtaacgataaacatctacgaaatagttatctccttcgcccggattttctctgtgataggtaaatacataaccaccttccgcttcttttacatccagtccggtctcttctaaaacttccctgcgcactgcctcttccgattcttctcctgcctgcgcagcaccaccggaaacttcccaccatccgggtgcccatgctttggtcatcacacgcttagtaatcagaaatctgccatccggacgcctgatcacgccaagtaccgtcagatgatactcatcatctgccagattgaaatgattcctctccatggttcttcctgtccgcactttatttttatcgtagatatcccaacgttccatttccattcctccaattttcctatgtgccagctgctatcattcttttctgccatagttttataactgcaactctattcattatattggttttaagaaatgttttcaagtttcgtttctatttattaattccactccgtcatatatttgcgataccattttggtaaaagatgattctgacattgctcattgtgacgctcccggatttccatggtggcaaaatactgtttccatagcacagcaaaataatccatatgcccctgcggaatctgaaactgctctccgctcaccagaacacagctgtgtccggcttcatggacggcagcaaggtttcggttttcatcgtagagaataaaattttcatccggaaaacgatccgaaaaatgatccatcatcaatggaaccatattgcattttggtgcaagctgcgccacaagaatacttcccagatcctgaaatctcacaaatcccagcagcttatccagctcattacctaccttacgggacaactccatcacccgaagtgcaaacggatcggcaagctgatcggaaataccgcgtccctgtgcaaatgcacgcaccagatatccaagaactgctgtcccccgatcctctgcaaaatggcataatgcatgaagcagtgtatcatacaccggataccccagtctcgactgtatactgtaaaccgtcttctgcactttctgcgcatctgtctgtacttcgatctccctggcaaacaaagtcatttctccttcaccggccgcaatggaaatactgtctgtataaggagctttcattttatttttgcacacaaacgcatcgaaaagtgctgtaaaaattccttccagagaatcctcacatcgaagcacgatctgttcactcatactacaatttcccccctgtcatcaaacagtgataactgctcataggtctgcaccgttccatccgaaagcagcatctgcatcggacgttcctgatacatcagattccgtgtaatatatccttcctccatacgggtatgatacatcatctttcctttacaggtgataaaatacactgcacgtttcagaacaacaccgatcttctttaaatctgaaaaatccagctttgcgtaccgccgggccgccataatccggcgggcactttttgttccgatccccggcacacgaagcagcgtataataatccgcacgattaatttccaccggaaacagttccagatggtgcactgcccaattacacttcggatcaatctgttcgttaaaattcggatttttctctgacagcaattcatctgcgcggaatccataaaaccgcaacagaaaatctgcctgatagagcctgtgctcacgtaacaatggtggcccaggcaaatctggcagggaactgtcatgattcacattgataaatgcagaatagaatatccgcttcatctcaaacttctgatacaaagcttctgaaaccgaaatgatctgataatcactttcatccgatgccccgatcaccatctgtgtgctctgtcctgccggcacaaaataatgatccggccgcatcaatccccgcgttgtctgcggaagcttcttttgcacgtttctcactctgctggaattctccccaccggcaatttcttctccccagctttgtactgcactctgtcgcgctttatgctcccggatggcagcaattccgtcgtggtagtcctgcagacgggcataactttccttcatctctgccatctggttataataggttttctcatccagatacatccggcttttcatactcgataccccgtgaaactcgcggctttgccgaattccattctgtaactggcgcatcggggaaaggatgtttttacgcactttgttaggcgcaatctgccgcagcgcatcggccgtgggaagttctaaatttacactcatgcggtctgcaagataccccgttaattccagcagatccgctgatgctcccggaattccttttacatgtatatatccgttaaaatgatattttgtgcgcaataaataaagggtctcatataaaagtcccatggtataatccggagaatgtaaaattccggaacttaagaacaatccttcgatataatttctgcggtaaaattccatcgtgagcttacagatttcctccggtgtaaaactgacacgcttcacatcattgctgcaacggttcctgcaatatttgcagtcatagatacaatcattggtatataaaatcttaagcagtgaaatgcagcgcccatccccggtaaatgcatgacagattccacttgcatatgcgtttcccgtatgtgtaccatctcctccacgctgcaccccgctggaagtacacgcaacatcatatctggcagctgccgaaagtatggttagtttttccatgatacgatccatctgcaaaatttctctcatatccagtatccctccgcaaaaacgccgaacatccgttctttttacatcatatcacaagaacaaatgttcggcaagcgcaatttttttttattttatatgggctgcgaagttactgttcgcagagtaatccgtgaaccgtaatgtactctttgtattgcggtttacagaggcacctgcgagcagtctcctatctgccctgatgcagcatccatggataaatcagtgaaatcgctccgccgattccggcagaagctgcacaggtaaacactaaagcccctgcaattccgccaaagaaatatccaattgccagaaaaacggcaacaattactaaaataatgcaacgcagcaaaatctggatcatactcttaaccgtatccatcgcagacgccggaacaagagcttccagcaaaagcccaacttccgaaaacataaaatccgccaccagatacgtcagataccacagaatcataatccccgggttttcatgcaaaagcaatgccgaaaccaccagtgccggaagcagatccatcgcgcagagggatgttcctgcaagcaccccgaagaaaactttcttgtatggattctctggcaccagaaacagccagtttcgcgcagtctcctgtgcaatcggatttcccatattccggaagaaaagtacaaaaaacaaaatacagcccggcaccagaaatccggacacctccatgatcctgacacaaaacagggaaataccgacactgaccagcaggtaaaacagcatcgtattggttatgattccaaattttgccgtacgtttacggcaataaatttcctttgtaaaaaacacggatgcgccccagccctttaagtttccttccttttgctgcttttttgcatgtgcttttcctgcgataacccgtccttcttttgctgcctcaagcatctgtgcacgttttcccgcggaagccagcgcatcttcgtaaaaatccgctttcatatgccagatggcaaaaatcagtaccgccacacttacaagcagcaatcccagataaaccagaaacgaaaacagttccccattcactgcacacataatcatgcctttgtaccagccgatgaccggaagataccgcagccagtgactggcaaaagtcatatgtgctgcttcaagcaggttctgcccattcgccagatatgttcctcctgcaatcattccaagcagtacaacaattcccacgatcaaaggaaacacatatggttttaatttttcgtgtgtggtgcagaccgtatatgtcaatacaatcataagtctctgaaacaccagaagcagaatccaccctgcaaaaatggctacaactgccgatgcccccaatcccatatttacaacgagatttggaatctgaaaaaccagatatatggacgcgaaaactgttgccaccatctgaaaactcagtcgaaacatcaacacggactgtggtttcatcggtgccgtaaacaacagattcacgtctgccatctggaaaatatccgtaccgtccttagaaccggaatacattccccaaagtaatatcgcaagaaaaacaatcatcactccggcttccacataggttttgattgcggcaatctcctgtggcgttttttgcgtttcttcctcttccgttgcttcttcctgtacgcgatcagcctccgaagacgattccacggtttccaccgactgttgcttttctaccatggaaccgaccacgccagcaatcagtccaaatatgattccaaatccaaaaatggcaagaatgatcacgagaaatgtacttcgaaacatcttttttatcgtgttccaaaaggtatgccatgcataataaccccataaccgcatcgcctacacctctctctccagagccgcgccctctgtaatctcaaagaaaatatcttccagacttttattgttatcctttaaattttcacgttcaaccacagcggctacccgcccctgtttcatgatataagtggtatcccataattcttccatactgtcaatcatgtgcgtgctgaccagtaccatgcagccactgtcccgcaattcctcaaacacctttttcagttctttgatggcatgtgggtccagtccgatcattggctcatcaaacagtaccagccgtggtctcggcaaaagtccacaacagatggacagtttctgctgcatcccttttgacagctcatccccgaattttttcttcttatctgtcagatcaaaccgttccagcaatgcatctttataggctttataatcctttaatttatatgcccgtgcaataaattccatatgttcatccacagtcaggttcggatacagcgatggaatttccggaatatatcccatgatctttttcgcctcgatggacttattttcgagaccgtttacctgtatctgtccctgatatttcagaaatcccataatacattttataatcgtgctttttcctgcaccgttaggtccaagcagtactccgatgcgcccatcctctatggtaagattgatatcatcatttgcaagcaccctgcggtatcgtttcgtcacatgtacaacttctaacataaccatttccctttctttttcttactaacatgttccatgtgtttacgatatcacattcatttgctgcaaaccatcttcttttccttaaaaaaccttaacgcttccttaatatctcttcgcgcatttgcccacgcccttcctctggtatttctcgccaatcacataaccgatctccccaattgcaagctgtggatacggaatatccatcgtaacatatccgatgcatgctccactttgtttttctgtaataagccatgcgttctcattatctgccagtacatttacaaaggactgcatctgctcaccagctactgttattgtccttaaccactgtggaataaaaaacgaggccatcgcaagcgacggccccatcttaatattactcttcttctctgtgcatggagaatgtttccatatgataattcttcaaattgtcaagaatctgacgatcatctgctttctgaagaagttcgtcacggaacttctttgtcacaagcatatcgttaaaggagcttggtccaccgacgcagccaccttcacatgccataccttcaatgaagtcatccggcagcttgccagccttcataagcatcaggaacttgcggcactctgcggcaccgtttgccttgcatactttcggctcaatgccagcttccatctctttcatgctctcgacaactgctgcggtaactccaccggagtttgcgaaacgcttgccgtatacggaagactcctgatagctggtatcgcttggctgcagttctacgcccttggcactcatgatggcacgcatctcactgtatgtcagtacataatctgcattgccctcaatcttctgatcgacaacttcagacttctttgctacacatggtccgacaaatacagtcacagcatccggatcctgtgctttgatcatacgggataccgcacacattggagagatggttgtggaaatcttatctgccatctccgggaagtgcagacgcaccatattgacaaatcccggacagcaggaagttactttcttctctcctgccttgtatgcctctacccactctgcggcttcggaagcagcggtcatatctccacctaatccggcttcgataaatccgttgaatccaacttcctgcatagctttcttccagcttcccattgtgatgtttgcaccaaactgtccctcggtagcaggtgctgcaatcacgtatactttcttatcagactttaaggcattgatgacatcaaccataaatgtcttagatccgattgctccgaacggacagctatggatacattttccgcagcggatacacttggaatcatcaatcacggaaataccatattcattgtatgtaatagcgttgaccggacatgcaaacttacatggtctcttcaaatgcgcgattgcattgtaaggacatgcagctgcacatcgtccacactctttacatttctgcggatcaatgtgggaacgatgacgtcccgcctcaatggcaccgaatttacatgcattgatacatgcctttcccatacagttctgacagttttctgtaacggtataactggaaatcgggcagtcctcacaggctgcactgattacctgaatcacgtttccattatcctccggtcccggggctttgccctctgcaagacggacacgctggcggataatttctctttctttgtagatacaacaacggaactgtggtgtcgggcccggaatcagacgaaccgcgatgtggtctctctgagcatcaagagtcccttcaaatgccagttttgcgacttcacgcagaaccgcatgcttgatcttgattacattttcatcagcgtacataaaatctcctttgctttttcgtggtttctattaagcataatatgtttttattgtacataaattttcattaaaaagctatagatgtatctatcaaaatacatcagacggtgcgattttatggataatatgaatacgatggacttcaatcagaaaattgatgtttctctgcgcgcttcgcttgaggcaactcccgtcgaacgaaacgcttccgatgatctgtccacagggagcagctctgacgggttctggaacctgattgttctgtacaccggttctccacagacgttacagaatgaatttccttcctcttcctttacctttctccttggaaattatgccatagtgaaaatctccgaggacgacattccatcacttgccgcctttccacaagtaatatatatcgaacgtccaagacagcttttctttgagattgtttctgcccggcaggcttcctgtctgagtgccattcaggaaaacagcagctatggtctgaccggaaaaggcattctgatttctgtgatagactccggtattgactatgcgcatcccgatttttgcaatccggacaaaaccacacggctggttgctctctgggaccagaccatcctcgctgatccttctgctggacgctttgcccccgccggttattcacagggtacacttttttctccggaacagatcaatgcggcacttcaggcagacacttttgagcagcgcatggaacttgtacccagcacagatgtcacagggcacggaacccatgtcgccggtattgctgccggaaacggccgtgcctccggcggactctaccgcggagttgccccggaatcctcacttcttgccgtcaaactcggctcgcccgatccaaagggatttccaaacacgatcgaactgatgcaggcggtcgatttttccgtaagatatgccctcgaacataccgtgcctcttgtcatcaacctgagttttggaaatacttacggctcccacagcggaacatcccttctggaaacctacctggactatgtctcaaatctcggacgcattaatattgttgtcggaagtggaaatgagggaaacaacggcgggcatgccagcgcccgactggcttctttagaatctgccagaattgaatttgccgttggaaattatgaatcttctctttcgattcagatctggaaaaattattgggatgatattcgttttcagctgactcctccgggactcggaacctcatttaaaattcccaatcagcccggcagctggcgcttttcctttggcaccacacagattctggtgtactacggacttccctccccttatagtctgtatcaggaaattgccatcgatctgctgccgcggcgggactatatttcgggaggtgtctggttttttaccgcagaagcacggtctgtcatcgaaggaattattgatctgtggatgccggcggccgctatccgcgggactgccacacaatttctcacgccgacaacggaaaccactctcacgataccttccaccgccggaaatgtcattaccgtcggtgcctacgattcttccaccaatacgctcgcccctttttccggcagaggatatacctggaataccggacaggtcaaaccggatctggtcgctcccggtgtcgacatcaccagctgtgctgtcgggggcggttacgaatcccgaagcggcacctccatggctgctccttttgtaagcggcagctgcgcactgctcatgcagtggggcattctacagaacaatgatccctttctatatggcgaaaaaatgaaagcatatctgatccgaggtaccagacagcttccattttccgtttcctaccccaatccgcagagcggatacggagcactctgcgtcagcagcagcctgacgtttgtgtgatatgctccactactctgcgataaaggcttcataaaatttttcttttggcacaggttttccaaagtaaaatccctggatcatctctgcctttgttttctttaaaatatctacctgctcttttgtctcgattccctcgacgatacaatgaattcccagatcattgatcatggaagtcatatagtcgaggagaatccggcttttgcggttattggtaatttcggttaccatggaccggtcaatctttgcagaatcaaaatcatactggatcagtaccgcaagattggaataatgacttccgaaatcatccattgacagtctgaatccgagttctttgaggctgtttgcaacattttcaatcagaacatgatccatgtctcccacggtctccgttacctcaatatggatcagttccaccggaatatcatatttttgaaccatctgcgttactttttcaataagttccggatacatgatcgtcatcttcgagaaattcacggatattggcaccgtacgatgtccttcccggatctgttccttctgataacgaaatacttcatccagaacaaacaggtcaatcatatgcaccagattgtagtgttccagcaccggaataaacatccccggtcccacaatgcccaattcatcatccagctgccggatcagtgcctccgcgccctctgtgcgccctgtgtggatatccactttcggctgcagatataccagataccttccacgctccatcagatcgttgatctcatctatcacgctctgctccatgcgcttcatcacggttgtgccatgcatcagcttaagcttatcgttgctcataagaacctctgcctctgcaatctggctgcgtgtctgcggatgtgcactccagctgtatcccatcgccacgccaaagccaagtccagcaagccttttctgcagattttccacctgctgctccatttcctgccgtttaatgttgatacacaaaaccagcatctcgtcctcgtcataccggtaaatccggtaattgggaaacagggatttcaataaatccgcaacttccatcagtctgcggttgccgctgatatagccaaactgtttattaatctccgacagatggatcacatcggtcgtgatcacgccaagtgaacagaacatattgtccgcaccagtgcgtgccataacggacaatccctcccggttccagagacctgtcagtttgtcatgtgtgcggtcatattcctgctgttcctgcagattgcgaagttcaatccgcgcagccagtgtcgtgccaagcatggaaagaacatcggcctcctcgaggtgtctgtgtgggtttaaaaccattaaaattccaagcagatgatctccggtatacaaagaaattccggttgcagaccatgcacgcagttctgccagatgctcatagattaccggatgactttctctcagcgacttgatatctggaatcaccacatccccgagttgtcctatttcctgaataactccttctgcatctcctgactcaatttcttcggtcacaagtcttgccatcatctgtgccgtatccctgtgacactcttccacatagcggataccgccctcttttgcataggcaagcacaacacagtccgcgtcaaaatactggcgcagcgcttcaaatgtctgcataagggcatctccgattccctctcttccaagcgcttccatacaggtacggagctgtcttaacatggatttttcattgccttgtgcgagaatcggttccaccggatctgccgtttccggctcctgattttctttgatctgatcataaaaaacaatccggttttttccgcctcttttcgccgcgtaaactgcccggtctgcctcataataaaaatccggaaaactgattcttcgtccatccagtttcgcagcaccgatagatacggaatattccatatcaaagataatctttttcaaattttcacgcagggagacacaaaattcttccatttcaacagaattctgaaagccggaagcaaacaccgcgaattcatctcccccaagcctgccgacaattccccggtcaccggtcacttcacttaaaatacttccggtctggcttaagaccatatcccctaccgcatgtccctgcgtatcattgatcattttaaaatcatcaatatcaagcatgacaaataaggcatttgttgtacattccgcaagctcttttgcgcagtattcctcaaatgccttatggttatacacattcgtcagtacatcaatctctgcccggcgccgcatgcgttccgtgatggctttctcctgctgcacacagcaaaaacgccccaccatacggtctgtttttccatcttcttccgcaatactcaccagataaaaacggtaccattccggttgattttctttttcgcaataacggacatcgaccgtaacagtcccttctttttgcaggcaggcatgcatcgctctgcgaaatacctttttatcttccggatcaataaaaacagatccataatggttcttctttacataatcttcgatatcaaaaaggacctcgaaccggtcattttctatcgcataaaccactgcccgatcttcttttacatcatattctatcaatctctcatggttttgctctgcaaccaccctgagaagttcattttgcttttcctgttctttctgctcccgcatagtaacctcttatctactgcagaacctgatctgccacgttctccaattcacagaatttgtgaatttcaggaaccttgtcttctattgtaccaaacccgtatgccgcatgaataaatttaacccccgcatccatgcttgcatcgtaatctccctgaatatcacctacatataccgcatcatccaatgcattccgcctgtacagtaacgcgatattctctccttttgatttttcattatttccgtagcactcagtatcctctatcagatcgtgcagtttgtaataatccagaaaagcctctatatatccggactggcagttgcttacaatatacagatgatattttttcttcaactgttccattgtcctgcggatatccgggtagagagttgctccgtgtatccggagatattcattttcttcttccccacactgtgccagaagtttctggcgttcgtcttcttccagatccggaaacagaatccgtgcgatcacatccatcgtctttcccattactgactggatgtcctttaccgtaatcggttttctgtcgtagccggctctttttacggtctcattccaggactctgccacttccgcagcggaatcccagagtgttccgtccatatcaaatatgattccttttttcattatgcctcgtcaattgcctttccgatatcatggcgcatatacttatttgcgaaatccacccattcggttgcctcataggctttctttcttgcttcttttaaatcttttccggttgcagtaatgccaaggacacgtccgccgtttgttacgatgcgtccttccttatcgaatgcagttcctgcatggaaacagaagtaatcatccttgccctcgaacttttcaagtccgctgattgggaatcctttctcataggaaaccggatatccgtcagatgcaagtacaacacagacagctgcattgtcctcaaactgcagatcaatcgtgtcaagttttccatcgacacatgcttccatgacatcaatgatatcatttttcatacgtggaagaacgacctgtgcctccggatctccaaaacgggcattgtactcaagaacctttggtccttcccctgtcagcatcagtccgaagaaaataactccggtaaatggtcttccctccgcagccatagcatctacagttggctgataaatatacttcttacagaattcatctacttcttttgtatagaacggacttggagagaaatttcccataccgccggtattcagtccctgatctccatccttggcacgtttgtgatcctgtgcggaagacatgatgcggatggtctttccgtccacataggtcagaaccgatacttcacgtccggtcataaattcttcgattaccatcgtatttccagcatttccgaatttcttatcttccatgatcgtacgcacgccttcttttgcctcttcgagtgtattacagatcagcacaccctttccgagtgccagaccgtctgcctttaacacgattggcatctttgccgtctcaagatattttaaagcttcttccggatcggtaaagttctcgtaagcagccgtcggaatatgatactttttcatcagatccttggagaatgctttcgatccttccagaatcgctgcatttttgcgcggtccgaatacctttaagccctctgcctcaaagacatccacgattccgccaaccagcggatcatccataccaacaatggtaaaatcaatggatttctcctttgcaaatgcaacgagcttgtcaaactccatggctccgatcggcacacactctgccaaagctgcaattcctgcatttccaggtgcacaatatattttgtcaactctcggacttctggcaacacttgttacgattgcatgctcacgtccaccgcttccaattacaagaactttcatgattatcctcctatatgtgatgcatttcctatttactgatatgtacggttttgcccgtcaccgtcacttttccatttgcgatcaggtcgatcgcctgtggcataatcttccactctgcctgctccatgacacggcgctgcaggatctccggcgtatcgccctcctgcacttctaccgctttctgcagaatgatcggaccggtatccgttccctcatccacaaaatgcacggtggcacctgtgactttgactccgcgggcaagtgcaccttcatgcactttcagcccataatatccggttccacagaaagacggaattaaagacggatgaatattgatgatgcggtttctgtactttgcaatcatctgttccggaatgacgacaaggaatcctgccagcacaaccagatccacctcatacgcatcaagtctgcgcagaaaatcttcattaaatgccgcacggctctcatactccttcgggctgatgcatactgcctcaattccgtgcttttttgcacgttccaaagcgtatgctcccggattattgctgatcactaccgcaatctctgtatttgtgattgttttttgttcaattccatcgataatggcctgcagattggttccgccgccggatacacatactgcgatttttagcataatgttacacccttctctccgtctgtgatcttaccaaccacatatggagtatctccggctgctttgattgcttccatcgtcttgtccacgtctgccggatcgactgcaagaaccattccaagtcccatgttgtaagtattgtacatcatatgctcatctacatttccctctcttgccataagggtaaagattggaggaaccgggtagctgttcttttccactacggcatgctttccttccggaagcatacgtggaatattctcatagaaaccaccaccggtaatatggctgcaggctttcacacgtactccagcgttcttgatagacttcaatgcgcctacatagatacgggtcggagcaagaagagcctcgccaagcgttgttccaagctcatcaatatatgtatttaaggtttctttgtccatacggaaaatcttgcgcacgagagaaaatccattggaatgtacaccggaacttgccataccgatcagcacatccccagcttttacgtcttctccggtaatgatatccttcttgtcaaccacacctacggtaaatccggccagatcatactcatcctccggcatcagtcccggatgctctgcagtctctccaccgatcagtgcacatccggactgcttacaaccctctgccacaccgcttacgatcgttgcaattttctccggataattttttccacatgcaatataatccaggaaaaataacggttcaccaccggcacaggctacatcgttgacacacattgcaacggcatcaataccgatcgtatcatgcttgtccatcaggaaagccagttttaccttggttccgcatccatcggttccggataaaagaaccggctcttccatattcttgatcgcatccagcgaaaaagcaccggaaaatccgccaagtccgcctaatacctccggacgcatggttccctttacaaacttcttcatcagttccactgactcatatcctgcttcgatatctacgcccgcgttcttgtaatccatttatttttcctcctaatatctgtgttttaatctattattgtcgcttatagtatatcgggtatttttcgattttaccaatcataaatgttaataaatctaattagtagttcttatatcccacttcctgcaatctggcatcctttgcctcaacctgctcttttaagtttttagaatactctttcaggcgtgcaagtaaatccgcatcactggttgcaagaatctttgctgcaagaataccggcatttgctccgccgttgattgctacggttgctaccggaataccggtcggcatctgcacgatactgtacagggaatctcttccgccaagagaagtggtgtgcatcgggattccgatgaccggcatcgggaagattgctgcgcacatgcccggcagatgtgctgccatacctgcacctgcgataatcactttaaatcctttttcctccgcactctttgcatattcaaaaaatacatccggctcgcggtgtgcggaaatgatcgtcatctcatagctgacgcccagctggtctaagatgtctgctgcctttgccatgatcggcatatctgaatcactgcccattacaattcctacttgtgccattttaaatatcctcctatatgtgaaaaaatttatggttccattgcatccagcggctcatttaacggttccgttcccggaacgacaaaccgcccgtttcttataatatctgtcgtcgtgccatctgcacgtactactgtaatcgctcctaactcatcatacggaatcgtaatatcggtatgacagttaaaatatgcttttgaaatatcttctttgcgccggatcgaaatttcattgtcccttgcgatgatcgcttttccatccggattgtatgtcatgttgtcctcatcgtacgtgtaacaggtgtctccgaccgcaaaatgcggacctgtcttttccgcaatcagaatcggaagcttatccgcgatctgatatttccgtgccatccggtatgcggtggtatttgttccgattgcaaactctcccatcggaagtgttttgtgatggaacagaatattgtcctctatatacttgtggttttcatcctcagaatcaaaatttgtacaggaataagctgtaattcttccgttttcaaaatccagttccagattcttgaaaaggaattcccccagatagacctgtgtgacgtgcagctttccttctgttttctgcaataccggagatgtgaacacttccccgaccggaatattgacatctgccacacagttttcaaatgcggtctctttggcaggatcggaaagcggatgaatctttacatacagatccgtgcggtttccgttacagcctttgatgtgcacacggtccgccgtatccagcacatcaatgatcttctgctgcatattgcggtaaagcatataatcaagcgtattgatatgcaccgtttccgcaaagatttcttcgtatttttctccgatggacggaaccggataagcaataatcgtaaaactgcgttcctccccgtgaatgtaatgattgatcagctggctcttctcgctgcgctcatacacatcgatttccctctgtttgtcggtataggtaacgcgctcctctttctgctccggcgaaaacggctttgtcccgaaaatttcgatcacggccggtcctccgtaattcggagccatttctttgtgcttgtcccagacagtacgatctacttcaaggccccgctcaaccaaagccttatccagccacagtccgcgatcctccttatgatcgtacatatactgtttattcaaagaaatggaatacgggcgcaacaccggctgcaatccaatctttttaaaattgtggatagccgcgcgtaccatccgctcaaatccgatcggatagcggatttccacaaccgtttttttcgtaatatctttgccggttgtctcaaatccaatgcgatatccctcagtaaaggtatctgccatcgcctgcacctgctgcctggtcagggattgcaaaaaatgcgccgattcggtttcgtcttttccgatataaagtccataacggtacagatatgccggatgatccagatctgcctccataacaatctgtgtgaaataatcataggccggatcgatcagcctgcaaatcgcatctgcattgaaaatttctgtataatcgtgcataaaagaatagatacattttttaatctcctgtacattcagattctgcacatcctcaaagcagttataaatttccacaaaaagctctgcatagatacacagatagcggatactgccttccatacagctggtataaattccatgcaatctggcatccagggcggataacagcggtccgtactcccagcccatccgactgacagcatatgccgggtttgcataactatctgcataatcctcctccacgtccaaatacaggcggcgattgattttttccccttccagagtggaaatctctgccagttttccgctcagggacgcttctgccaacttgtataagacgacaaacagttccgacatttcaaagaaatatccccggtacagttcctccacaccagaagcttcctcctcactgactgcctctatgcgctccatcacaagttccagccgttcccagtattcctcattatttttgtgattgatctctctaaagctcatattattaagtttccttctctatcctttttagctcaaaaatccccaagtataggttcctatccagcaaaccatatccaatagggtcagtcccagtcccagccgcgggaacagcggaaacgaatcttcctcccgcagacttttgcctgcaatcaccagaacaacaaatgttgcaatcatggcaaccactcctgcactcccgtaataaggcgagagcgaaccgcctccacgaaaagccagctccaggaacacaagataccataccagaagcgcaagtgctaatatcgtggccaggattccctgtctggaatgttttttctctgtaaatttatagccacgtcttctccggtttctcatatatatatctctctttcccacaaccttttggcttatttgcatccatactgctcataataagcatcaatggctttcttgatcgtgtcatcaattacaattttaccctgacattccctattatataaatgttctaccacttcttccatagtaacaatggcctttccctcaaatccatacttctcatggatctcgtcgagcgcactcttgacaccgccctgtccgacttccatacggtttaagctgaccataagcccaacgatttccacgtctgcagcaccgcgtacttttggaaccgtttcctccatggacttgccggatgttgtcacatcttcgatcataacgacacgatctccatcctttaaactgcttcctaaaaatccgcctttgtctgccccgtgatcctttgcctccttgcggtcactgcagtaacggatttcttttccatataattcgctgaatgcgattgcggtaaccacagccagcggaatacctttgtacgctggtccgaacagtacatcaaaatcgtccccataattggcatggatggcttttgcataatactctccgagtttctttaactgggaaccggtcacataagcacccgcattcataaaaaatggcgattttcttccacttttcagtgtaaaatcgccaaatttgagaacatcactctctaccataaactcaataaactcctgcttgtatgcttccattttattaaaacctcctgtttataaggctttcacgcctttattattgtctcaaattgctttactacacacttttacaccgcttccattttttcaaagtctacatcagaccactgaagcctcatcaactcaccaatacgcattcctgtgtcgattgctaccacatataaattgtagtagaatgtgtccttcgcatagctaaaaaaagctccgcgtcacttaccgttaatactctacgttctttcttaacctctttagaaatcacagtattgatctgcttagcagaatttttgataagtaaatcagagtctattgctttctccagcatatcgaccagaatctttttcgaattcttacgctcattgtctgtttccagttcgttaatcgcctgctgcataatcagtaaattcaaggatgtgagtttttccatcccagagccttctgtattctgcgataatgacctgcgtatgtctccttggtggaggctctgcaattcttcttgcaggtatccatccagatttcataccattcgtcaagcgttacgtccttcgtaacaacattgagtgccttttcatcctcatactgttcgtttctaagcttctgtcttacctcattcagcgtctttgcgtaaaccgtctgcttcttgccaaaacgattcacgaatcttccctgataaagaccatcctttctctgtgataagcctttacctaattctttaccattaagggatttacccatatgtgcctccttcctaagtgtagaataggaaggattccaaatatcgtccctattttaccataaaaccttacaattatcaatccgtttcaaaaattgaattctcattttgaaactcctccgtgttcttattatgaaagaatctgattcagtaaccagtggtctaatctgcccttatgagtatatagtctgttaccgattcttaccgtgaaaccattggccggattggaaagcaattctcttgctttcgtctgtccaataccaaggtaaggacttatgaagaagatgaatgggatacgatggaggaggatttcagagataagattattccgaacctgttaaacgaatcacaccagagattacggaagaaaccaaccacatttctgcctgtgacaaagcattattattagattacaaggcacagcttctgttcccacgcaaggaatatgataatgccatcaagaaatataagaaagcgattgctctcatgaaaaattaccataagaccaatgctgtggatgctcgttctgccaatctgctttcaaacctgcataacaacctctctactgcttatctgttccggaagaaacgtgaagaagctgtaacagaattaaagacagctttcacagtacgcagggaatatgccagtcttggattgatagagaataatgataccctgcagcagacactatcccttgcaaatatgctggtgcagaataaggaatatgattcagctctggaagtcattgatttctgcgaatccacaattacggaaatcatgggcacaaataatgtaaacgctccatagcaagtatatagaagtacgcctctttctttgagaaaattgacttaactatttaaactgagtcaaaaaagttgagtctcaacttttttgactcctatg

SEQ ID NO: 997 - DNA, 26665 bp, Unknown
  gut microbiota DNA sequence
tttgaatgttgaattacttgttacattttcacgttagcatattcgattgtgtatatcaactatattttagttttcctatatattgacttattatcttatttaatttacaatacactcaaaataaggagaagcctatgaacaacaaaagtaacttccggcgcggttccgttgaattgttaattttgcatctgcttagccagcaggactattatggttatgaaatatcaaccctgatccgggaacagaccgatggatacctgaatattccagttggttctttgtatcccgccctctacaaattaatagatgccggatatatttcagactacaaaaaacaggttggacgccgtcaggtgaatgtttattatcacctggaagacagtggccgcacgcatcttcaacaacttttggaggattattacgcgactgccaatgcgatccaacaggtattgaaatatacggttacaccggaggaagaagggggagacaatgaccaaggataaaattacggataaatatataaaggctgtgcagaagcagtttaaacactaccataccacagacgcaagatttatttctgatttgaaagacgctgtcatttcttatgcagcgcaacaggattctctcgattatgaacagcttgtttcacagtttggagatccacaggaactggtaaacgattatttttcggagcaatcaattgataagcaaaagaaaaatgtgtgttttacatggaatataaaaacgatctgtatcatcattaccgttttcgttttgatattctcagccatatatatctataacataaatgtacaacacaaaaaggaattagatacttttatacaaaaagaagtaactatattaaaggaggaccctcaatgataaaatcaggtaaatttattacgttctcctgcccgcaaaaaaccgtgatgcatcctaacatgcaccacggtttttaatatccgtaaatatcataaatctcaggcatatatacccccggctctttgtatacaatcagcggtttttccacggtaagtcgggatttgccgccccgcagcccctctatcagcaccatattcggctccttatccacaaacggatagaccagccgcatgcgcttcggctcgatatgatatgctaccatcttactgaaaatttccgcaaggcggaagggccggtgtaccatgtaaaaacgtccaccctgctttaacatctttgcactctcacgcaggatatcatccagatcgcagagaacctcatgccttgcaatcgtcttggcattggcatcattctggattccatgctgcccgatcatatacggcggattcgttgtgattacttcaaacgatccggctccgaaacgcgcagaagcctccttgatatctccggtcacaatcgtaattttctcttccagatgattgtaggcgacgcttcgcgccgccatatctgcactctccggctgaatttccagaccggtaaaatgttcccctttggtctttgcctccagcagaattggtatgatcccggttccggtacccagatccagtgcccgttccccgggctttactttcgcaaagccggacagcagcactgcatccatgccaaaacagaaccgtcccggatcctgaatgatccagtagccgtttctatgaagttcatccagtcgttcatgactgtggattgtcaccccgtttttgttctccacgttcgttgtttccaccctgataattctttctgtcgtagtttcgatgccgccggaaattccgctctccgcggtattcgcgtttttctccgcccccgccactgttttcacggtctgcattctcgccgcggtcacgattgtagtttctgccacggtaattgctgcgttcccggtactctcgtttctcaccgttttcattctgctcgcggtactcgcgcttttcgccgcgatccctgtagtttcttccacggtaattgccacggtctttgtactcacgtttttcacggttttcacttccggcatctgtctctggtgccatacgttcctgtgacgattctccggcaggcgcttcatttttatcccgtgtatcattccgctccctgcggtatttgccacggttgttttccctgcggttctcccgctgcggacgttcgttttcttcctccgtgcttccgttatcctcaaggccttccagctctttcatttcctcatccgttacacggacatccctgcggcggcgcggtgtaaacttcaggtcatctactgcatattcctgcagttctttttcttctccgttatccacaacaaccttaaccagctgacgcagcacattgacaccggacacttctccatgcattccggtcggtgtgattaccgaatctcccaccaacggcagacggctgtttaagtattcgtatgtttcctgctcgttcttcagacagcacatgagtctgccgcatacacccgaaatttttgtcggatttaaggacagattctgttcctttgccatcttgatggataccggtacaaaatcggtcagataggatctgcagcacagttccctcccacagattccgataccgccaagcatctttgtctcatcgcgcacaccaatctgccgcaattcgatacgggtgcggaacaccgaagccagatccttgaccagctcacggaaatcaattcgtccatctgccgtaaagtagaacaaaagcttattgttgtcaaatgtatattccgctgcaaccagtttcatatccagcccgtgctttgcaatttttcccttgcagatcacgtaggcttccgcttctttttctttatttttttctataactttttcgtcatcgtctgtcgcaatacggatcaccggtttcaaaggctggacaaccttatcgtcatccacctctttgggtgggatcagcactgttcccatctctacgccgcgcgccgtctccacgatgacgtgcatcgccgtctccagatcataatccagcgggtcaaaataataaatctttcccgcacgctgaaaacggattcctaccacttttatcatattaattctccttaattgtcagtaacagcagctcaatcacaagatcgaaatttacatttgccgaaatccggactttcgctgtctcaagtgcacggatgatcgtctcaattccctgatacgaccgctttgctgcctgtttttttatgtcataaacctcatccttaaaaatgagtccgtttacatcattggttgctttcatgtaaagtacatcgcggaaccagatcatcatgaggtcaaaataatcattgaccgtcagcttatactctgcaatctgctttactgctgctgtcatttcatacagatcaatatcttccagacgcttcatcagctgcagcaccgatgctttcagttccccaaattcttcggaagatgccaactgaatggctttccctacatttccctgggaaaatgcggcacagacatctgcctggtaatccggaatgtgatacgttttcatcaagtaagatttgatcacatcttcttttaccactttgagattcagtgtaatgcagcgcgataaaatcgttggcagaaaactgtccgcatttgtggtcagaagcaggatgacagcatatgccggcggttcctcgattgttttcagcaatgcattctgtgcctgctggttcattttttccgcctcatccacaatatacactttgtagcggctgctgtatggttttatcacaatatcgttattgatctgggtacggatatcgtccaccccgatggtattcggcttttcgtgggatacatagatgatatcgggctgattatgatccaccgcctgtttgcaggagcggcataaaaggcatggtcttgtcccttctccctcacattgcagtgccatggcaaaagcctctgcaagcatcatttttccggaaagctttggtccgttaaaaatatatgcatgactgactttgtcgagggcaattgcattcttcaaatgcccgatgatctgttcatgtccaatgatgtctgaaaatcctgccatagccatcccctccttgtatctgtctaggtcaaaatatcaagcaaaagtcctttaatttccccaatacggtccagaatcgaaatatgatccctttcgtctgccaccagttcgcctgccagttcatccagattcttatcgatcaggcggataatgccatatacccggtggcgtcccctgcggtcaagaaaattttcccttgaaaaccggtgggaacggtaaactacttcattcagaaagtcttttatcagtccacggtactttttcatatcccggatgtccatgtgctccgcaagacggtttccctgcgccgtaatatcactgagcagttcatccacttttgcctgcagatccgcatctgtgatcgcacttgcaagtgtaaacttgaacgagccgtcgccttctactgtttttgtggcctccggtacctgattgaccgcggatatatcgtttacttttatcgccatatagaaatcctcttatcctgtttctccatcccggacatatcccgccggatatattccgtgatctcccggatggttccttccatatccttatttataaaccgtcgtgtgatgcctgcctctgtcagtttttcctcggaaaaatcggctgcatccgcaagaaatctccggcacatttcctcatactgcggagttttctgctgccgctccctggcaatcgcccgaagcagccgctcgccatcctccacttctatataaatcggcactacctgtgagcttccaaagtatctttgtattttctgatacccttccagtgtcacaatatacagataactgtgcgccgacaggtcaattcttccatcatctaccgtaaaatatttccagatcccatagaccgtgtgataggcccgcagctcgatcaccttgcctgcgctttccagctgctgtacatgcgcctcatccgtaaacacatattcccgtccatccgtctctccctccctgcgggggcgggtggtatacggtacaatgcgtaaaagtgcaggattcccctgctgcatgatccggctgtagatactgtcttttccggaagaactctttcccatgacacaataaattttgcccattgatctctttcctctagtataatatatttgccgtcatttcacaacgtttatacacgtcaaatccggcagtccctctacctccagtcccagccggatgcagtgccggatggtttctgcggtctgcacatcaatcacttcaccaggcacaagaaccggaattccgggcggatacagatacacataatccccgctcaccgctcctgcggcttcctccagccggaccgttttttgttctgcgtccagtgcctgatctatcgtcatgacggttttttgttcccggtaaatctcccgcggtgaaatctcgctggtctcttccttcttatgaaccgttccgtcaatacattccagtgcgtccgaaagccgcgcaaacccttcgtccgtatccataatggaagtcatggcaaccacatagtttccgcttgccatctccatctgcagaccatattcctgcagcaatatctcctgaagagcctgtccgctcatgctgtttccggtcaggatcagaagttttcccgggtcaaacgagaacgcctcctgttttgaaaaatcggagggctgcaatacctgcagtgttttcagatttttggtcttatcccgaaactctgcaagccttctgctgtatgcagcaaacagcatttcccggtctttttctatgatctgcagacttttttcaatccccgccatcagaaggtatgacggagaacttgtctcataaatccccagaaattgtgcgacctttttctccgcgatccggtcggaacacagatgcagcaatgcggtctgtgtaaatgcgggaagtgttttgtgtacactcataatcacggcatccgcaccaagccttgtggcattttccggaaactccggggaaaacccgaaatgcgctccatgcgcttcatccacgatcagcggaatcccatatgcatgcacggtatccgcaatgtttttgatatccgatacgaccccgtcgtatgtcggggaagtaatgacaacggcccggatatccggtgtctgttccagctgctttcgcaccatctgtggtgttacctgcccctggatgccgtaggcggtatcttccggatagagataaacaggaaccagctgccgcagatacatcgcgtgatataccgctttgtgacagtttctcgccataaggattttttcgccccgtgggactgctgcactgatcgccgcaagaagtccgcaggtacttccgtttaccagataatacgttttttttgcaccatacagatctgccgctttctgctgcgcctcctgcagaattccggttgcatggtgaagattatcaaatccttcaatttccgtaatatcaatggcatagggattggcaaaaggcaggaatgcccgtttatggccgggcatatgaaacggatagatgtccgattgttccagttcattcagtttttgctccagcatatttcctccactatcctaagaaccggccaagttccggcatccagtcatcaaaaaagatctcattgcggcaaagactctcccagatcggggacacaaacaccagaatcagatcgattgcgtcttcccagggaacctctgccagcccatggttacgcagatacttttcccagcgcttgcgcatatatgtgtaagcccggtatccgtccagctgctttaatctctgctcttttcgcatcttcggagatgcagcggtaagcaccgtcagttcctccagcacataacgcccgctgagcggctgtgtccggagcagccggtatgcatcataataacttcccatgctgccgatcagttccagcttgtccatgatcgcaaacagatcatagcttagttcactctccggcgaatacaccagataggaaatttttctgcctccgcccactgcaatcagttcttcttccctggttcccggaatctggctgaccgcaccaaaactgtagatctcaatattcagcggaactttcatatcaaaatacccggcggtcatgctaagccggattccgccgctcaatgccgtcaccgtaccttcccaacggattttctgtgcattttcttttgcaaaaagtgttgttttgatatgttcgcccatggcgatggataatcgctgaccgggctgcagtttgtccggcgtgagttcttcctcacttcccttataaaaaaagcggatgcgcttcttggcgcgctgccggtatgcctcttcccccagaagcggcaggctcatcagccataaaaattcacggtatgcagacgtactgacacgcagcatcagatcttccaccgcatatccccacaggagatctgcaaatggaatggagagcatttcgcttctctttttcagttctgttgcctcacatacaccgactttcattacagccacactccgatcagactctgtacctttcctgttacttttcgcgctctggcatattccatcagcatggaaatatctttatcattgtcccggatataggactggaccgcctcccggaaaatcgcccggtcaagctttgcctcatatttcaggcagtcacagatcatacgttccttatcataaatcagaaacgtcagtccattctgctcaatcgttgtggaaccaagttccaaagcttccggctctgtatagtagggaattactttcggataatccatcttaaatcgcgacttggacgtatttttatccaccgccagatgccatccatacggcttttcccggatataaccatacgcatagagtgcactctccatacacagacgcgcatccggaaacaggcgtgcaatcagttcttcctcggaaaagcggtcgatccggtcggtataataaccgttttttatccgcaccagtgtcccggtttccacaaattccagaatcttgcggtaatccacatcaagtgccgcaaattcttcctttttaacgatgccgcctttttcattaatgaaagcgcgcagtttttccaatgtttcttctgatgatttactcttttttgtatttgtcgacattttccgctccataaaaattaacgtggtatttcacttcgtattctaccttttcctgtggaattcgtcaagaaaatagtatatagtaaagataatctgaaactgtaacaaaggagatcccattttgaatcagaaaaaccagctgcgcaaaaatccttcccgcgagacatgcgaaagcatcattcgccggattctcatgaccgaacttacccaaaacggaaaaaaccggcactttcgaaaagctgccgattttatgagttattttgaatctctgtatccggcatcggatgccctgaccaaacaggtgcagcgcgccgtccagtctttgcatatgccgaaggatgccgatggattttttattgtggacaagacagctgcacaggtggaacaggaacaatgccttgggaaattatttgcagatgcaaatgtctccctccatccaatggaacaggtagagaccgttttcctgtccgtaccctcccatatgcaggaacttctgctgcatacattcgaacagagtgatctctttgccgggcagattcttaccatcgttcgcacctgtaatggtctgttaatttacaccgaagacaaaaaacagctgctttcattattaaatcgtctgataaatcagcagtaattttgtaatgtcgtttatgcgtcaattttatagtttaatgcctataatttgtctttatttctgtttagtgtctttatttttgtctttttgtacatttctgtcctttataggttaatgtaaagcatgccggattatccactgttcctccgcggataaccggaacaaatccatgattctgcaatccagccgtttctggcaagtctctgctgcctcttttcccattccacaaatcagcggctcggtcatcgctataatttcattctgtatcgctttcccaacacgcggaatcggaatatgctccatatgcgcccgcaatacttttatggaatggaattccttctgataaacaaactgagaaacactggaatttaaaattgccagaatatatttgatctgcattccctcgatctttgggatcacaatgttgcagctattcaaagaaagcatctgccggtcatcataagccaccaccagctgattgctgataaaacggtacaacagtttttccggtgcccggtatatctccagaggtgcaacctgctgaaactgttccggttcaaaccgcagatactgttttgccggatttatgtggtatttgcaaatatctgtacctttcagtaccatctccgaatgttccgttttctctgcggagagaaactttttgttgtttccggtaacaatgccaagtgcaaaatctgcatgatcggccagataacagacgggaatggaattttttattttctccagcacacgatactcttcatctgtcatccgaaaactgaaattttccggcactaccgtccgctccatagcaatggtatatgtacgtgtccggtcttctatcatcatacctgccgttgacaaaggctttccggtcgcaataagctgcaacaggatgcagggacactgtaccccgtcaaacatatctcccagaaacgtaagggattttacagaacttccctgaagcagaattgtgcggatgcgcatatgtgcctttacatttaagaccgcttccggcagcacaaacgccagcgttccatccggaacaagaatctccagagcccgttcgataaaaacatcataggactcggtatttcttccggaagccgtggcatatctggtctttaacactgctttgtcttcattggaaaaagcatagccccacggcggatttccaatgatggtatcaaatcctgttctgtcatattctgtgagaaaattcttctctgtaatatgttcgcagatctcctcaacatccgcgtccggatatttcagagccatattgagtcgtgcgatacagatactcaccgcatcggtatccgtgccataaatatctgccagatccacactttccggcagctgaagcaggaaatttccggtaccgcagcacggatccaacacttttcctatatgttcgatatccagatgggaaatcagcttttttacaacttttgtgggtgtataatacgaaccgcgcgctttccggcttcccatatttttacaggaaagatatataagtcccagaatgtcttctcccggctccaagatgtattcatgtgaaaaaaatgccggatatttctgacagaaatccattgccctttgtctgtcaccgatcaatgcatccagtaagatgtcatatttccctatagaaattttcccctgcagatattggaaaaacaatggtttctgtccgaataactgcagcgcacagtctgccacaaaataggatatcacatcagaggtcagcaaaatttgttcccgtgttatctcggagagcagtttctgcaaaacggtaaggttcttgcagttttgggaaacataagaacgatataacgcatttccggaaacatattttttatttcttcggctttttaatgccacattttttcctgaccggatttcattttctatgattgcaatatgcttttcatcaaaatagggcaccccgttttttatatattggggagttatctttccaagctttacccagttacgaccggtagcaatcgatatggataactgcccacataactcttttaacgatttgtcatgcaatttcaaattctcctggttacctgctttttaaaaacgccctgcagtcggaagctgccgggcattttctgtatttgtcgacattttccgctctgtaaaaatcaacgtggtattttacttcatattttacatttcccagtaatattagtcaagaaaatagtatatcctataaaatctgcgcatcgttttaccaaaaaaggaagccgattttaaacaggcttccttttcgtattcgtgaatcgcttttattttgtaattgcatttacaaatctttttgtaatttcccgtggtcttgtgattgcggtaccaatcactgccgcatatgcaccacacgcaaatgctttctgtaactgctgcggctcccagattccaccctctgcaatcagcggaattgtcaaatcctgtgccagcttttctaacattggaaagcacggaatttctgtacctttggtatccggtgtataaccacaaagtgttgttccaacaatgtcaaacccaagtttctgcgcacgcatgccatcttcataagatgcacaatctgccataaagatcatatccggatattttttacgcacttccgggaaaaatgtttctatggtgcttccatccggccgttttcggtttgttgcatccaatgcaataatatccggtgcggctgtcatgatagcatcaatttctttcatggttggtgtgatataaatttccgaattatcatagtctactttatataaaccgatcactggaagatccacttcctttttaattgcaataatgtcttccggtgtatttgcgcgaattccaacggcaccgccttcttttgctgcaaatgccatcctcgccataatttttgaactgtaaagaggctcggtctccaatgcctgacaggagacgatcaaaccgccttttattttatcaaatacattcatctcttatttcctcctttttgcaaattctgacaaccagataggatttgtccatgccgtgtgcccatgttcatctatacattctgcacgaatatatgtttcttttcctgttaacggataaaatgcttctgtcagagggactccatgttccgccaaccgggtcacacccaaagctactggtccgccaacaatcatattgatgcgttctactgcactgcaattaacgacaaactggttattttccaccttccagtcatatatttccggtcctgaagaagaataatattccccattcaaaattgcctggcagattgcttcatgggaaagttcttccgcctgcacaacaatatatcctccaaaagaatccggaaaacttcctccattatgattatcatctgtcgcatccgcattgatatgcctgccactgcgaagcatcagatcccaataggtcacatcataccccgtaccacactcattaacggtgttataattaaaaatctccaacatattgataaaatcttccggccttacacgtgaccagattgggtgattataagtcacgatacaaccatgattctttaatctctctgcaagttttttccctgttttatttccatcccagtccgtcccgtaataaatatcaggctctactttttccatatgtgaaaaggtactttccaatgcacctttttgcatgctctctgttccgagaattccattcatatgatgcagtctgaccgtatttccctcatcatcaaacaatactgcagtagcctccacccccggaagaataagaaaattcttttcccccagctcccgacggtaatccgtataaaaatcgcccctttctgaaagtacaatccgggcatcttcccatccacggaaactactttcaacaatcacacgctctttcctgctgtatacaataatatacggctcctaccatacctgcctcattcttcaatgcagctgcacagatttcaagatcttttgcaaaatttggcatcacatgtttcatcacatatgatctgacaggagcaataaaaagatcttcctgtgcagaaactcctccgccaattaatatctgctctggattaaacatatgcacaaatccaacaagcgctgaagcaatcacctctatccattcctgcaggattttctgcaccaccacatttcctgtcgctgcctgtgcaaaaatccatcgtccatcaactggtgtatctgctgcccctgcaatcgcaccttcctgtattgcccaacggacttttcgtaccagtgctgaagtcgatccataatgctcaagacatccccgatttccgcaagtgcacatttccccttcatactgcaccggaatatgtccaagttcacccgcaaatccacttgctccgagcaaaatctttccattcatgagaatgccgccacctacacctgttccaatcgtgacaacgacaacatcttttttgccctttgcagcaccaatccacgcttccccaagagccgctgcattcgcatcattaagcacttctgtcggaatatggaattcctgctccatcacctgtcgaatcgggctgttgatccagtttttaatatgtcctgcggttccttcgaccactcctttttttgtagagattgctcccgttgctgacaccccgattcctgcatattcagaagcattctcacgatatttttccaaaaaattatggcagctcttcactaccgtctgcaaaataggtgtttcatatccatcaaaatttacggcataagtttctgttgcatgaatcgtgccatcttcatctacacttccaatctttactgccgttcctccaatatcaattccaatatacttttttttattcatctttatcctccgtgtgttccccttttgcacgaatagcagacagggttgccttatatttttgtgttttaaagtaagaatcatttgcaaaataataagagtataaaacatccataattgctaaaatcgaaaattgcggtgaaatttttgttcctgtatccagattttttaatgctgctacctgaattacttcctgcgattcctttgcaacggatgacccggaaactgctgtcatgcatataatacttgcacctctgcttttggcgatccgaatactttctaacacttctgccgtctccccacttaacgtaatggcaatcacaagtgtttcctcccccgccagtgctgcacctatcttcatcatatgggaatctgtaactgcattaacatccatcccgatacgcatgaaacgcagctggaattcttccgctgcataaccggaatttccgattccaaaaatcagtacacgtttactgatgttaagcattcccgccacccgccggacctgctcctcatcaagaatccgaaaattttcctgtaacagtttctggtacgaattttgtacgcggcgcgcaaacaatccgacatccttttctattccctcgcttttttgttcaaattttaagtctctttcataagaaaaaataaattcccgatatcctttatatccgcacttctgggaaaaccttgacaaagtagcctcagatacatacagcacacgggatatatttttagaagaaaaatccatatcatctttattaccaataaaaaaatctgccacactgcgttcaaccgctgtcatttttttataggatgcttctattgtctgttttgtctcattttgaaatgagatcatataatcatcgttcatctgttctccacatcatcatctgttccatatatctttccacatataacgcaatttcctgctgcgtcctggcacccggatgcccatctgttcccatgccattgaccggattctgcaacggaagcttcagaaactctgtgccacatcgctgcgcggtttcctgtactttttcacataatgtctgttccatcagaccataaagcagaagtattttcgcatcagcaaaaaccttcttcagctgctgtataaaatccgtatatttttctacaaacgcacgctcgcgggaaggaatctgcctcacataacttgcatcattcgtccccagattacacacgatcagatctggaacttcgttttgtatatagggaaaaatttcgggaagaatgtttttcgtataaggtgtatcctgctccggggcaatccagcgggataataccccattcccactatatgcaacaatcctgctgtctgcatgaagcatctctgctgcctgatatgcataagttttagtcacatcttcatccgctgtccggaatgcactaatcccatttattccatccactccatatccagcggtaagcgaatctcctatgaaaagcaaatggcgggatggaattgcatctcttgtaaccggggcatccgtaataagatttgtgatccacacattgccatattgttcttccgtcagtttcaccaatcggatcctgacggtttcggctgattcctgctggtaaattatatattttctctttcccggcactgcccggattttttgccggaactgcttttcgtcatttataaaaaccccaataaatgcatcttcctgtggtgcaatgctctgtgccgccatttccacggtaacaacgcttgctgccgttacaaatgcaatcccagatgcagaccagcaaaggtgtaaccctgacggttctttgtttgtaattcccaatattctcacttgttcccaccataccattttctccacttatgcctgccttttttattttacatgcaattatagcgaatctgcctataaaatacaatctttagtcgtaatttctgaaagtagtttccgcaatagttcctatacttccctatatttccgttttcactccattttttgatagttctttccgttttcttcaaagatatagcttttttgggtttttaattctataattattctcaaataaacgagaaccataacaaggaggacatttatgagaatctacaaaacaaaaaattatgatgaaatgagccgcaaggcagcaaatattatctccgcacagatgattttgaaaccagaatcagtacttggtctcgccacaggttcctcgccaattggaacttataaacagctcatcaattggtataaaaaaggggatctggatttctcgcagatccacagcatcaatctggatgaatacaaaggacttgacgcatccaattcggaaagctacgcttatttcatgcgtcacaatctttttgatcatgtaaatatcaaaccggaaaatacctatattccaaatggtatggaagaagatgttgataaagaatgtacccgttacaattccattatccaccagcttggcggcattgatttacaacttcttggtattggtaacaatggacatattggctttaatgaaccatccgatacatttgcaaaagaaacccactgtgtagaactgacaaaaacaaccattcaggcaaatgcccgtttttttgattccattgatgaagttcctactcacgcatatacaaccggaatcaaaaatattatggaggcaaaacatatcctgttaatcgcaaatggagaaggaaaagcagatgccctgtatcagtccctgtttggtccaattactccccaggtgcccgcatccatactgcagctgcacgatgatgtttccattgttgccgatgaagctgcactatcacgtatcattgaaaaaaatcttatttaatatttattgcttttgtaaaggagttccttatgattataaaaaacggacttgtctgggaagaaagcggatctttcctgacaaaagatttgcatattgatagcgatacccatcgcatcgcaatggatgctgctgatacggcagatgacaccattattgatgcatccggtctgtatgtaattccaggacttgtcgatatccatattcacggtgctatgggatgtgatttcagtgacggcagcgcggaaggacttttaaaaattgcaaaatatcttcgttcctgcggcgtaacagctttttgtccaacctccatgactttaccggaaaaccagttgctgacagcctttgcatcgacgcgcgaaattccagatgacaatagccatgcttttatcgcaggaatccacatggaaggaccatttctctctcctgaaaaaaaaggtgcacaaaaagcaagctatcttcgcgcaccggatatcgatatgttccgacgtctttcccaggcatgcgataacaaaatccgcatcattacgattgcaccggaactttcaggcgcggatgcttttatccgggaatttcattcccagctgaccatctccctcggtcattccacggcatcctatgaaattgcccaaaacgcttttgctgcgggagccagtcatgtcacgcatttatttaatgccatgccaccattgcatcaccggaatccaggtattatcggtgcagccactgactgcccacatgccatggccgaaataatttgtgacggcatacatatccacccatctgttatccggaatacctttcgtatgtttggcgaagaccgcatgatattgatcagtgatgccatgcgtgccacaggtatggacgatggaacatatgaactcggaggacaacctgtaatgaaaaagggacggctcgccaccttaaaagacggaactattgccggttcagcaacaaacctttttgactgtatgaaaaatgcagtaaattttggcattccacttgctgtcgctgtcaaagctgccacctacaatccggcaaaaagtatcgggttagaacataccatcggcactcttgcgcctggtgcaagagctgatgtccttctccttgattccgatctgaacattgttcgtatcatataaacccctgttgtaaaaacgcccggcaagtaggaacctgccgggcattttcttatgtactctgtaatttctatctcgggtccggacgatgcttcatatcacggatcggaatattagcaacaagtgccggtaccgttccgttattggaatcggactctgtctcggtgatttttacatcaagcgcctccgcatcaatatccatgtaacgtgagatcacttcaataatgtcattcttcatcatctccatcatctcggaagaacagttggcacggtcagaaaccagcaccagcttcaggcggtcttttgcgacgttgccggaagtctttttcttaaataaatccattattcccacaataagtaccccctctaattcttcttaaaaatatccttcagcttctcaagcattccctgcttctcattcagattcaggaatggaacttcttctcccataatacggtggcagatattggaatatgcttttcctgccagacagttggttccaaccagtggctcaccacggtttgtggaaataacgatctgctcatcatccggcacggctccgatcaggtttactgccagaatatccgttacatcatctactgtcatcatctcaccgcgttttaccatatccacacgcagacggtttacaatcagatcgatccgtttcatctcatttgcctcaaggagtcctacgatgcggtctgcatcacggatggcagatacttccggtgtcgtaacaaccagtgcacggtccgcacctgctaccgcattcttaaatccctgctcgataccggccgggcagtccagtaaaatataatcaaattcttcacgaagttcattgatcagtgcaaccatctgctctggtgtcactgcatccttatctctggtctgtgcagacggaagaagacataattccggatatcgcttatccttaatcagtgcctgacggatacggcattttccttccacaacatctaccagattgtatacaatacgattctccagacccataaccacatccaggttacgcagtccgatatcggtatcaatcattacaactttcttgtttaactgtgcaagacctgtaccaatgtttgctgtggttgtggtcttacctacaccaccctttcctgatgtgataacgattacttcgctcatgaaacttattcctcctacgtccctaaatgttatttaatatatttttggtgattggctcaatatagatatttccatctcttgcaatggcgatctgtgcttccacttccggtgtctttgaccggcggagtgtacgacgtttcggttccggcttgtccggactctttgcgatcagatccccaatctgaatctgaatcggctgcatatccagcgcaaaaataaagcagttacgatcacccatacatcctgcctgtgcattaccttttaatgccccaagaatcacaatgtttccctgggaaataattttggctcccggattgacatcgccaatgatcgtgacactcgattcactcgaaatcacctgtcccgaccttaaagtgccacgataaaactgctccggcccgtttcctgctgcggcattctcatactgctgctgtacggcatcgtaaaacgcctcgacctgttctttcatgacagcttcctgtcttgttccattttcaacgatacacaggatttcaatcgatgtgttgctttcaattgctgagatgatctgctgttcttcctcttccgaaagttttcttccttcaaaggacaatgccagttttgcatttttaaaaaatgtactggatgctttgaacttttcgacaacatccttcaataactcatcaaacccaatctccgggtctaagacaagattaattccgtatttattactttttatcgtaacagattgtgacatggtaacctccaatttcattattaaaatgaaatccatcaattgtaattatacctgtttgcggcaaatacgcaagcattttcgctttatttgaatgatttaaaaaaacctgtccttcctgcgattgtatttctttcgtttcttctcacgaaaacgcattttatcattttttttcgtttttctctgatgacggatcacataaaaattatcatatgcccgttttgccagaaacaacagaaccactgctgcgacaataaccactcccgcaacaatgagccatgcaggatcgatccgtatgacacgttcatttttcttctgcccgttatcggtattgacgtaataattatcttttacctttgctccggtttttactatatccacactgccgacctcatgaccggcatatgtgtatgcaagccttgcaactttcttttttccttttgcagattctgtctttttataggatgcatcggaaaactgtgctccttttggcataatgatatatgcatcctcatccagctttacataaggttcactgttgttcaaaaccccgtaattttttccgttgtcctttgccagacccgcatcgttttccgaaatattcagcgcctggaaattttcaaaacagtaatcaaataattttctggtatccgtataatgatccggtgttgccgcatccatcaccacacacaccagagtaattccgtctttctccgcaaaagacaccagagtattattcgccactgtcgtgtagccggtttttccgccagtacagtatttgtacaaatgagagctgtccccgcgaaacgggtagatcattttatggtgattgtgacacggatattccgccttgcatttattggtcttcggaagtgtatagcttggactgcctgcaatcatccggaacgtctcgtttttgtatgcctctgcggaaatcagtgccatatcatacgcgctgacccagtgatcttcatccggcagaccattacagttattgaaatgcgtatccgtacatcccaattcctttgcgcgcttattcatcaggtcaataaacgtccggtaatcaccacccagtttctgccccacatgctccgcaaccgcataagcacattcattggcagactccagcataaccgcatacagacactgctccatcgtcagtttttctccaagattccgggcaatatgggaagtatctccctcatttttaaataccgcatccgcagaaaacgtaacgacctcatccatatcacagttttcgattgccagaagaaccgtcatgatctttgtgatactcgccggataatgtttctcgtgactcttcttttcatataaaacggtgccggtattgacttccatcacaatggcacttttggactgcgtttttaccccgtccggccagtactcatctgcacgcacagacaacggtaacatgagtaaaaccgtgcatacggcaagaaaaaatgctgttacacgggtgtatttttttattttcataaggctccccaattcttgattttcttatatttataataccattatttccataatcgttcaatttttatttgccgaacggacgaaatttgtatatagtaatagtattcttacagttagcaaaactgaatttatcttttccaaggagaaattaccatgagactaagaaatataccgggtgccaatgaagctgtggcagccagcccatattgtatacagaatgcggcagaacaccgcggacaatggcatgcctttttttaaaatgaccatccgatccatatcgaaatcggcatgggaaaaggcagatttctgatggatcttgctgcgttacatcccgaaatcaattatatcggcatcgaacgttacaccagtgtactgctgcgcgcaatccagaaaatggataccctgcagcttccaaatgttcattttctgtgtgaagacgccgcaaaacttccggaaatttttgcaccggaagaagttgaccggatctatctgaatttttccgacccgtggccaaaggaccgccatgccagacgccgactgacttcccatgaatttttagaccgctatgaccagtttcttgcagccgacggacggctggaatttaaaacagacaatcaggatctgtttacgttttctctcgaggaaatcgaaacttccgaccgctggcatcttaatgcctccacccgtgacctgcaccatgatccatccatgaatgaaggaaatatcatgaccgaatacgaagaaaaattttcttctaagggtaacccgatatgtaaactgatcgcctcccgctaaggaggcgatttttccgttatcctactttcccaaaatccgccggtttctgtacttccggtacagccgataacaaaaccgtgcttcttcctgtgaaatctcttcttcggaaaagaccgctttctgcacaatgcacagatacttcttccaatcctccgccggaacggacggataggttgtcatcagcttttccagatagtccgcatcggtcttcatgccaaaacttcgctgatgtaatccccggtaaatccgccggttgatccggtataccgcatgacgattctgccggttgcgcaactccataagcaattgttcccggtaaatgcgcaaccattttgtcaccagaaccagcatcagaacaacagcaagcagcgtcagactcaccgcagaaaatacttgcagatttcgcctgttgttctttttctcattattttttaccggccgctttgtctccttctccgtcatctgactttctgtctgctgctgtgtttccatctgtgtttctgacggcgattcgtttttcgtctgcatttgcgtctgcggattctgctccgccgcatctttgtactcttcatgccgctgtttccacgtatcgcgcaattccggagtcgtcggcagctttgcactgtcattcgtatagcccggagtcatttccaccggcacccatccgatattttccagataaatttccacccatgcatgcgcattgtagtccggcacatctgcctgatagcctttcttttctttatgaaatgccgatggttccaccacatatcccgatgcataacgcgccggaactcccagactttgtaaaatcagcgcacccgcgctggcaaagtgcatacaatatccctcatgtccggtttccagaaaataagcaatggtatctttcccctgtgggatgtgattcagatataagttataggtattttcgttacccagccagttggcaacctgtgtggcaagattctgccggatgttgttggtagttatctgtctttctgcccgtccggaattgtttccatccgtatccgccagccaatcctcatcgtataacccgcctgtttccatctgatccgccacataggtgccgttttcctcatacacgccatatccgatactttccagagccagccttcgtgtaataaaatctcccactgccggaacatccgtggcaaatttacggtatctgctgtcaacataggcatcataccattgctgcagatccgtatctgtttctccgtggaccatacaaaacctgtcaaaaacatcgcgcagatccgtattttcatccagtccctcaaaagaaacctttcccgttgccctctttttacgtaccaccgtatcatccctgagccagaccttcccaccggctgtctgcaaatctgaaaaataaggcatatacgcgttttttaaccccagtgcccgataggaaatctgatacgaaaccgtctgtgtttcatcctctgccagctcactcgaactgatgtattttataagttcaccggcattctgctgcattaacattgcaacatcattgcgatggtatcccgccttatccacttcgtgcgcaaacgttttcccttcatttacccatgtaccgttctgatatgtgccactggcaaatgatttcagatacagtttgcccgccggggctttccatgcttctatcgaaaatacggtttttccggtatagtccggtgttgtattatccacatgttcccgcgatccctgcaaagttatccccgaaaacgtcaggtttttcacacgttcttccacctgtctctgaaacgcataaaacttcggtgactttttcggaatctgctttgccacaccggaaaacgcatagctgctcaccgagacaagaatcacggcaaacacaccggctgcagcataggacagtagctgcatccatacatgggtacgaccgtcagccacccttacatccatgtgcgtccatggtgccgcagacaccagcacagttcccacgaaaaagagtgcaattccactccagcccagtctggcattgaccagaagagcaaccgacaacgctgttatatccggaagcagcaaaaccagccgcacaccggtcacatatcgaaacatcagacttaacagcacaacaactgccaataaaaacgccagcatataagtataccgcatctccgtcccggccccggtcatataatttgttccatactgtttattccaatatgacagatatgcctgaaacagcatttttccgctctctgtcagttttctccgatgaaaaattccaaacagtacgagtgccgccggatatccgatttcaagcacaaccttgcagaccctctgatattttccggtcgcaggaactcccacgataaacagcacaagacttaccagcatggccacctgcagtttaccaagcgcacggatcggcagctgccatccgaatgcactccggaaaatcgcaagcattgcataaaacagcagttccacagcaaccgcctcacagatcagccggataccggtattgccagacaaatatgtggttttattccctctcctgtccttcctgttcacaataccagctccatttcttccagcttctgtctccagttatctccaccaaaatccgcaagtgtctgtccatccagcacaagaaaaagctccggtgtcagttccagcctgtgtaccggatgctcgcagcgatactgctgctcatatctctgtcgcagtgaaccggccgtttccttctgacattccataaactgcatcaaaaacagatacacgctttcctcatcctcgacgcgcaaccgtttgatttctgtttcctcctgccatgccacataatgcgggcagccggcatccatcatcgaatacaccagatctgccgcaattgtgagaaaggtttccgcataggcttccctgctgcgcctcatatgccggccttttcctgacatctgtggcagcatgtccagcaaaaataccaccgcacaggcaagcggctgactgtcctcccgcaccagaagcccgtccgatttggcggagagtttccagtgtatgcgctgcaggcgatcccccggacgatattcccgcacatcaaagatctggctgacatctgttcccggctgaaaatcatcgtagctttccgcttctccgaaatatctgcgtacccgctccgacacctgtactgccacagcatccagttccggcagcacctgtatatctgcaaatctctttatttttttatgcacataaaacagaccggtcagatcataaatccgtacttttacaagctcatactcataacttcccacatgagaaagcacgacacgcttttccatgcactgcattccgcgcatcagtccggcaccgttccaccagaaatttctggcatacccggcaaatgtatttctacagcgcacacggtaacgcacttttgctgccggaaacaacatggtctgatccacggtaagctgtaccgtaacttttttccctttttccgccacggtaagcggaatcctgatatctgccgtgatatgtctgcaataaatcagcagatacaaacatgcaagcagcattagtaccagttccgcaaacccaatcagcccaatcgcaatgcttccatagatcagcgcaatataaaatgtgacaagcgtcacccctgttccaatcagaaaactgcccacatttatcccctaagtcttttgtatgttgttggtttgtccacatccgacagaatttcctgcagggtggcatcgactgtcacatgtccgatccgtgcctttgtgttgagcacaatacggtgttttgccacatccgcaaaaatatccgtcacatcatccggaatcacataatttcttccctgcaaaaatgcccatgcttttgccagccgcacgcatgcgatcgtgccacggggacttacccccagctcaatgtaagcattttttctggtagcctccatcagctgtacgatatattttgcaacattatcatgcacataaatctgttccacatactgctgcatctcccacagctgctctggaagaagaaccggctgcagatcctccgctttcgtcatcgtttttccctgggcaatttccatctcactctgcagatccgggtaccccatgctcatgcaggtcatgaaccgatccagctgtgattccggaagaagctgcgttcccgcactgcctttgggattctgtgttgcaatgacaacaaacggctgtggcacttttcggctcacaccatccaccgttactttgccctcctccatcacctcaagaagcgcggactgtgtctttggcgaagtccggttgatctcatccgcaagaaacagattacacatgatcgttcccggatggtacacaaactgtcccgtctctttctggtacatgttaaatcctacaatatctgccggaagcacgtccggtgtaaactgtacacggtgatccaaaagtcccatgacgcgcgaaaaggcgatggcaagtgttgtctttcccactcccggcacatcctcaatcagaatatgccctcccgcaagaattgtagcaaaagctttggtaatacaggcatccttccccgcaatcgcgcgtttgacctctgccagaaccgcggctgcatactcatatactttctccatatttccccctatggtttctttctataattatttgcattttatataataaaaaaacccccaacgaatcacattgttcgtcaagagttcttttgccatttgattcaatcaaaataagctttgcgagtgcgcgatcaggggttcgaaccctggacaccctgattaagagttctttggcgctgttttcatgtaatttcgttacgatttcacggtaacattacctttttcaaatttatgttcgaatgtttcttctaatataatgttttaaatatcgttaccttttatcctacgtttttcgaatttaataatgtttcttgttttaattgttcttttg

SEQ ID NO: 998 - DNA, 19216 bp, Unknown
  gut microbiota DNA sequence
acggctcttcccttttccttcacacgctttatcttttcttctccctgcacggtttcctcaagatatcctttttccacaagcagctgattgataaatgaagcggtcagtttctttcgatccttctcttcgcagagcgcattgatccggtttgtcagttctgaaagcatacaggtgtcggtcagctccacctcatcaagtttttccggagcgatataaaacggcagcttcttttttcttgccggagctgctgtcgtggtatctactgtcatgccggaaaatgcctccgctgtggcagtttctccaccatgcgcgttcagaaatgctgtgataacctgtgtaaaacgcgcaccgtaactttcgattttctgtgcacccattccgtacacggctgccatcgcggtggaatccacaggacatttggcacacatatcttttaatgtcttatcagaacagataatatacggtggcacacctttttccacggcaagttccgtccggcatttgcgaagctgctcaaacagttcctgcccttccggtgtcagatcagcaagctgcaatgcctttttcttttctcttccggtctggatataagtttcttccgcctcatcttccacaaccacacaattgctgcatttttcacaggtacacggactgttgtccccgaaataggacaggataaactggcgcagacactcatcggtctcgcagtaacggatcatctcattgagtttcctctgctcatttgcccgcaccacgggatcatcggatgcctgcccggatgtggatttgtactgcaacaggcgtttgtttatcatgatatcctgtttcgagaaaaataacacacactccgcttcttccccgtcgcgcccggcacggccagcttcctgataataatattccagactctgcggcatattgtaatgaagcacatagcgcacattggatttgtcgattcccatgccaaatgcattggttgcaaccatcacacggattctgtcataagtaaaatcatcctgattctttttccgttcctctaaagacagacctgcatgatagcgccccgccgcaatgccatattgcagcaaaagggcatacacactgtccacattctttttcgtggcacaatagatgattccactctcatcctcatgccttttcacataatttaagatactgttgtccgtctcttttccgcccttgcggttgaccacacggaagaacagatttggacggtcaaatcctgtcacgactgtcactggattctgcaaatgcaaacttgcggtaatatcctgcttgacgcgctctgtggcggtcgcggtaaatgcactgacaattggacggtctggcagttttgctaaaaaatccgcaatttcaagatagcttggccgaaaatcctgtccccactgggaaatacagtgtgcctcatccactgtcaccatggaaatgtcggcataatatgcaaagtcgagaaagcgcgcagtgttgagccgctccggtgccacatagataattttgtattttccctgtgctgcataggcaagcgccgcgtgtatctggttttccgtcagggaactgttgatgtaggctgcatgcacacctgcctgattcaatgccttgacctgatctgacatgagcgaaatcagcggggaaatcacaagcgtaattccctcaagcatcagcgccggaacctgataacacagggatttccccgcgcctgtcggcataatgccaaggacatcctttccctgcaggattccgtccatcagttcctgctggcccggccgcaggctgtcgtatccaaaatagtgttttaatgtttcgagtaaattcaattggttctccttgttgtgttttttgctgctatccagatgatcttttctgtttaggtgctaggtgaacaggaaccatctgtatacagtaaaatttaaaaattacttgactgtaaaatgaaatggggttattctttttatattaagaaatgggttttcaccgggtagggtttatgcctgacaggacttgctcgtttctttttttatatctattatttttctgcagctcatcgtaataggccttataccggtacgctgtcctgcggctgatctccccttctgcaacgatttccataattgtcatcccactctcatattttacagcaaaatcccggtaagaagtcatccatgcttcgtcatgctttttcctcccgccggtattgcgatttttatatacttcgagttccgcccgaagctgttcgttttcctgttccagttgcgcaattcgctgcaatgcacttttcaatgatgtaattgtcatatgcctcccgtgccacttttgtttttgacacgattataatcaatttgctttcatgtgtcaatatctgtttctggcacattttcaaaaaataatttataatgaaagtgtaacaaaacaaacaaaaattctatttatatatagattgcgcaatacgaggaggtgaaacaggaaaatgcaaaagaatactccacttgaaacgatgtacatggagtatgcaaaaaccgtaaaacattttttaatttccttatgcggcaattttgatctggcagaagacctgacacagaagaccttttatcaggcatacaaatcagcgcaccgttataacggaaactataaaatttcggtctggttatgtcagattgcaaaacacttatattttgattatctgaaaaaagagaaacataaaaccacagtcggaatcgaacatttagaatcttttgaagcaataaacaatcagaggaatcttgaggacacgtatctcataaaagaagaaaccaaaaaattgctatctgctttaagacaggtaaagctcccttatggacaagtgttctggctgcgtgcatacgaggaaatgagttttaaagaaatcggagaaatttttgacaaaagtgaaaattgggcgcgcgttaactatttccgcgcaaaaacaaagatcagaaaggtaattgaagatgaaaataacatgtgatatcgtaagagatttaatgccattatatgttgatgacgtctgttctgacgacagccgaaaacttattgaagatcatataaatcattgcagcaaatgtcaaaacgaactggcagccatgaaagatccgatcgaatgtcccccacttagtgaagtcggagacagtaagactccattttttttaatcagaaaaaagtccggatcaaaatgattgctgcaattatttctaccgcgtttcttgtaatgactgctatgtttgccattcaggaagtaggagtacttcacgacttttttatgcccatggatatagcattcatagataacaaccatggttcggatgaatggtttcaagtacgcataaatgacggtgattatttgattttttcatctgttttttataaaaaagaagtaataaatgacataaacaatccctatgatataaccatacgcattctagatgagaaccaaacaattgttttaaaggatacaactattaaacttggagaatccataaatttacattgtttgaaatacaataaaaattacattgtgcaggtaaaatgtaaacccggaagatataatttaaattttacataatccatcacttaatgatgatttttaatgctttatgctattaaaataaaaaatggcattggttaggtcgctctaactaatgccatttttgaatggaatatccccgttttgaaattttcctcacttactgcataaccattgttgtttcgatttatttcttctccaatacttcttgtgccgtttttgcatcgtagcccaatgcagtgagtttttctacggtatcatttcccctgttgatcgcatccagaatttccagaattgattcgcggccttcggtataacctgattcatgcccctctttccatatggactttgcaaatttcttttcatcaaattctgttaacagcatatggcgcacctcgcttcgattcttgagcaaaacatcctttaaaatgtcatgccggatacaatatgatatggattcatcaattgcctgctcaatcggcattcccctgtcaatgttctgccgtatccttgcaataaacaaagaataatgcatcagccgtctgcacttattcatcagttcggcattgtgtccactgtttacattaagtatccgggctttgcattctagcgccggttccatatcttttgcagacggatcactctcaaaagcatccgacaacagaagcgtataatcatccggaattttctctgtaccattgtaaaatacaatatactgcggcatcggcagctttaccagtttatgaccatacatattcagatcatgcagtttgatgtattcatcatacaactgcgcaaaataaagcagcccgcggaccggcatattcgggtttacagttgactgatgctcgtacaagttcatggtcgatgaaatcataaacgatttatcatttttcatggacataaatatcacatcttccaacgtcgtaatctcaagttcctccggattctgatgatctgttccgttgatcgcgttatacagttcaagcagatcctccttatcctgaaacactctctgaaataagcggtccttatacttcctgttatgaaaccggaacctgcgtacaaactttaaccagctttttgttcttttgtaattcaattactgtcctccttacattatacgaaaagaaaagcggttatgcaatgtattcaatttgattcgttatggaaaattttagcgatatgctatggatttgccattcaacatttttactatacaatacctattgtattttcgcaactggaattgtatttcatacttagaattgttaataaggttctgcttcgaacaaacataaggacatataggggaaaaagtcatttgtcatgtcccagctatataaaaaagaaggacataatcagaaaatttttctgtatatgtccttcaactgctgtgtcataatgtccgtttaaaaaatgcaatgatctgttgccatacttcatcctggaaaaacatcaggtccgcatgctctgcaccatcaagcgcaagcaatgtcacatcacagccggctgcttctaacgcatcatacaattcctcactctgcgaaaaaggcacggtactgtctttggttccatgaatcagcaggaatggcggcgcatccggtgtcactttggaaaccggggaattctcataagcttcctgcggatgtgtcataacattaaatcccatcagcagcgactctgaagacatggctgccttttccacatcatcatatggaaaatgggacgcatcggtcggcggataccacggacaggccgcctgtacctgactggaatactccagatactcacctgtatccagttttttatcctgatccagtgctgccatacatgtcagatatcctcctgcagattctcccatcacaccaaatttttcactgttaatccgatatctttttgcatatgcacgaagatatcggattgctgccttgatatcacacagctgcatcggatgcgttccctcgttggatgtccggtactctacgctggcaacaacaaactcttcctgtgccagtgtgcccagatatgccagatgcgctgctttgtccatgcgctgccatgcgccaccgcaaatccatacaatacatggatatgtctttccttccccgtcctccggatagatgagatccaatttgagatctctccggcaatgaccgaaccaggaatcaacctgcgcataagtaatgtctgttgtcacaacatattgtggttttgtggtttccggttttaatgttttcttcattataattttcctcgtttccgatgtaaaatttcctttttcaatccaaatggaactgcgcgacaaaatcccggatcacattgacggactgtgtgcactcctgcagcttgtcgtaaccctcggttacaaggttctgcgtactgccggatttctcggcaataccgctgattccatctgtggactgttccaccatggagttgatctctgatacggtagaagagatctctccaatgtgctgctctaatgcatccactgcttcttttgtctgctgcatgatctgctggaatgtgtccgcatcggcatgatactgctcccccacctgtgcgaaatgctcataatccccaagaacggtctgttccagaaattccataatcgttgtgaggcattcggtcatattggaaaccgaactgttgacctctcctacaatctcgtcaattgtggaaacggtatccagtgtctgcgttgccagatctccgatttcggaagcaacaaccgcaaatcccctgcccgcttcaccagccctggctgcctcaatattggcatttaatgccagaaggtttgtctgggaagaaatctgtttgatgttgtctgtcagcgcattgatcttctgtacggatttcgcctgctccacagcggcatccgtcttctgtttcatgaccgcatacatctggtctgtcttgtggcgggactccgtactgatccgctccatctctccggcacgctcctgaatctgtccggaatttttctctccatcctctgcaagccgctggatattgtcggaactttctctcataattccaacgttttccacaatgtgcgccgcatttgcactggtctcttccatccctgccgccagttcctgcgtagccgccgaattgtcctccgcataagcgctgttctgtttcataagctggtttaaatttccggtatttgtttccaaaacctgctgcgtctgctgcaggttttccatcatcgcccggagcttctttcgcatatcgtggatctttgttgccatatccccgatttcatccttctgcttccgcagctttgctccagcctctgtcgggcggaaatccaatgcagcggtctgctcaatcacagaagtcagctgacggattggctttgttaagccggtacccataacaataccaatcactgccgagagaataaatgcaacaatcattgcaagaataatcatctttgcaagtccgtatgcctcggaataaatctccgacaccggtgccgtaagcaccagcttcatgccattgtccagattataaaaggccagcttcttgtctacatttttgtaagtatactctaaggttttcccctgatttccatcctctgccagaaaatctgcaccctttttcaaggagctgtccagatcggtaatgactgtaccctcatccacatttttgtgatgcatgatggaaccggaagcatccatcaggaatgcatagccggactgatatacggttgtctcatccaccagatcagtaatctgtgaaaaatcaatatccataccgacaacaccgatagatgttccgtcttccgcaaacaatggtacaacgtatgaaatcatgtaaatattgacattttcattcatatatggagacatccagatagcttcctttgcctgcaccggaagataataccagccgacatgctccacatcgctttcatcatacatggaaaaatccgtcggtgtcagacactgcagatcactgtcaagtgactgacgctgtgcaaagataccggacgttggattggagtaattcgggttataccgcagatataccgtcactgctccgttcgtatggtttgcgaaatcaagcaccgcctgctgtacagtctcggtgtatgtatccgcataatccttgctttgtcgaaaagaatcgtaatcaaaattgctcatcgcaacttcactaagcgtatcaaccgactgctcaatcttctgaattgtggaattgatctcttcggtcttcttctgcccggtaagctgcatcatggtcattgcatcttttccggctgtccgcacagaatttgaaattgcaatcaccccgatcagaaccgatgtaaaaagagaacagatcaaaatagatgctataagctttgtccgtactgatttcataatcctttgcctcccaaactcattttttctgttgtttttataagtagtccccttatgtattccgaaaatcatccagtaccggtatctgcacaacggtgtcccggtaatttccactttccattataacataccatgctgaattttttagatgtaatcggaaatatatggaattttatgaaacagtacatcatccagacggtctaccgcttcctgcttcccttcaatgcgttcaagggcatacagacgctcagccgtcttgtatcccagtaaaagggtagtcagcgtacctatctccatttttaacttatactctgccggttcatcggtcagcatacatgttccatcggaaaaacagagccgaaaactgcgattgttccacaaaagcaggtgatcctcaatttcaagttcgatatacagtgttccgccatccggatcacatggataatcctgtaaaaagctctcgatatcaataatccgtcccatggcatacggccggatcgtttccttgatatccccatcatccatctcaaacgcaatcggttcactgaaataggtatagccatgcaccgcatcgatcatggaatcatgcgcgtggatatactcccacagccccttttttgcctcgcggtttaagtagatcatttccttgatatgcatgatatcgtttttgatcagatagaccataaatccgcatggcttgtccttggtgttatagtaaactgccacattcgtatcgtcctcatcccagcgccagtattcctcccacgccagtgcattccggaacaggcagccgtgtgtgattgatgcaaaatgcgaatgcagctcatgaaaatcggtattgtcccagtccacacgccgtacatacccgggtgcttttactttcgtcggaatctgccgatccttgatattgaaagaaattttattggatatgatctcccagcccagatgatgatacagcggtatggaataaggatacaggagggcaaacggtcttccctgctgtttcatatgttccagactctgatacatcagttttttcataatgccctgcccggtatattccggatatgtacaaacactcgtaacaaatccaacgggaaatacctccccatatatattcattttcaatggatacacggcaaactgggaaatcagggtatccccatcaaaacatcccagcacatccgcacgctccagtaccgggaacttcgactgtttgatctcttcatctttccatccggttgccgtcagttcatcctccgttacctgaaaggtatagcgcaacagcgcattatactggtccagatccttcacatccttgggttctaagtagcgtatggcataattttccaccgaattcatttttcctccttcatacaaagatataaccatggcagcttttgggaaagcttttccataagatctacaataccatatgttgtaaggctattcttcgaagtatagacagaatattgtctatgtttaattatatcattgtatatatgcatcatcaatatctttcgctgattgtccctttggttatgatccgcagattgtctgtcatacaaaccataattcggttctgcttcctgtagtattatttttctttgacagttaccgtcatgcgtaccttcgtgccatcttctttcgcataaatatatgcacgtcccctgccgatggcggtgatcacaccggtctcatttaccgtggcaacatttgtgtttgaactgtagtactccggtttgttgccggaggataccgttaccttcggctgacatgtttcgccggccgttaacgaaatctgttcctgtccgacggtaatctttggcttctttaccgtgacctcacaggttttgctgacaccgtcgactgtgaccgtgatgatggcggttccgttttttacagcggtaactctgccctcattgtccaccgtggctacgctttttttatttgttttccacctgggaatacttttggatgtggaagaaacggataaccggagcgtccccttccggtaaagggatgcgaatgtccggtccagccggaccgttggctgctttaccgtcactttacaggtctgggaggttttatctgccgtgaccgtgatggtagtttcacccggttttttcgctgtgatcacgccgttttcatccaccgaggcgatgctcgagcgggcggatttgtacgtgaccggatgcccggttgatgtctcggctttcagccgggccatatatccgttctccaaggatatggatttctgacttaatgtaatgaccgttttttcaactgtaaccctgcagcttgcctccccattggcaatttttgcagtgatcgtagcattaccggcctttttcgccgtgatctttccataagtgttcacggacgcgactgtggaatcactcgaagaaaactttggtttctttccggtagaagtaatcgcagtcagataatactcgtctccaattttcatggtcttactgtattttgtcagcagaacgtattcgtatccgctggcagcatatactgttgtgattccgttgtaactggagaataaaagcatggaaaccatgcagaagacagccaatgctgactttaagaagttcttttttatgtgtaacatatgcccccatttccggttgcagaaacaaacgggacaatcagcttgtataaaaatctagcatatcttctgcggtttgtaaagagatttttgttattctccaaccacaaccttacaatccttcttaaagcacgcaattccatacttaataaagttcctcattccgtcctgtctcagcctatccacatagtctttttcctctatctgctccagtgctttggcacatgccgcatccatatctccattttctgcatatttgagttcgattacgattcctgtccggttgtccggcacctcaaccaaaatatcactgtagccggttccggactcggcatttgactttgtaagccaggttgctttatagcccagcagaccaagcagaatgccatgatagaaattttctttcttttcttttgcaaccgctgtgtctcttatgctgatcgtgttccacagataatctccaaagatctgctcaattttttccggatttttttccaaaaatgcattgctgaattcttccagttttttaccgtcattcctggacacatcgctgaaccattccctaattttctttataaaaaggtttttaatttccctgtttggaatagtcaggcggtattttccgctttctgtacgtccctgatgcgtcagatatccggtagtaaaaagtacgctccacagattttcaatgcttttatcaagctcatcatatgtgagttccagcgagatttctttttcaatgcattctcctgcaatcagacgctcgatttcgtttttggtctggacatccgctttgtctataaatctgcgcacaatggcattgccgcttgaattcgaccagaaatcttctggcattgcgttcggatctgcacacaggcttttacaataccggataacatcccaaggacagtaaatatcagtgtttccgaaatgataaccatcgtaccactccttaacttccggatagtggtctgaaaacgtgtaatcatccagaagtttttcaacctcattgtccgtaaatccaaaactctcatcatacggaacatttaaaaccgacaaaacctcgaaattgttaaatcctgtaaaaatactttctttggaaatacgcaagcatcctgttaaaacggcaaactgcagactatcattggtctttaaagccattccgaaaagtcccctaatgagtgaaaccatctcccgataatagccattctgaaacgctttatccagtggaacatcatattcatctatgaggattacggttttttgtccataatgcctatgcaataaatgtgacagtatatatatgcttgatgtcagtatattctcatccatagaatatttgccattatgcaatgcgacaattgcctgatactgctccttttcattatcagatagtttgtcactctctgacaaaaatgaaaaacgttgtgcctctcttcctgccagctctgtgatacgataccttgcatcctcataagataatccttccacgctcttgagtgaaagaaatatgaccgggtattttcccatatattgttcgcaaatttccttgtttcccgcaatatataacccgtcaaacaatgtcgtatccgcgcctgtctcaaaaaaagcccgcagcatactcatatttaatgtttttccaaagcggcggggacgggtaaaaagagttactttgcctccggtttccaccagttgttctataagctttgttttatccatgtaataaaatccaaactttcggatttcttcaaaattttcaattccaaccggtaattttaaactgtttgccatagaagccccccttcttttccacaaaaataagctatgaatagtataacctatccacagcttattgaaaagttaattgtttgttattgtccactaactgctccaatcttttcattgtaattctcgacttacattgatttaagaggcttgttcggacagggaaattttaatgttcggatatctccggatttgcacagaaaagtctttgtataagcaatcacacactagatgtccatgaatcgacatatctggggaacccttaaaaaatcgcctgctgcccaggaaccatgctaagaaatttatacctaagtttataagttgtttcgaattttcataaactctttagcatgttgtcacaacctgttcataatgcactggtaatataaaaccatcaaaacaaagggggctgttgtattttaacaaacggtgttggggtgctgtcagttccgactaaaaacaattcgcgaaagcgatttttcttatagatccgccacagaatatcttttcctccctctgtggcgggatttttatgcacattgccttctggatattggcatatgtgtgaaaatctgctggctgaatttttttcttctctctttcgggacatatgcatggaaacttatcggctatgtcccttttcttttgctcactgggacatatacatgaaaacttactccctatgtcccttttcttttgtttcccgggacatatatgccagaaaaaacgctatatgtcccattgccgcagacataagggacataatgcaaaggaatgattctatatgtcccactgtgccaaaaaagcgggacataacagagcaaaaattttctatatgtccccaggatcgccttgcttattgccgttttttgtatgtcacggtctcctccccgctgacatgcgactggttgcgcttttcgcgcatgaggatttctgcaatctcacgctgtgctgtttttgaaattcctttttctttataataaggcgatggctttttgtctttgcccgcactgtttctggcaacatttatttcgcgcgttgcatccaccagcagatgtatgttgttggcagagcctccggaaaaaacgattttaatgttatctcccaatgtgatgtattcgcccggtttcaagctcagtttcagcataagaacctccatgtttattccccttcatccagaggatgcaactctccttataagaatgttgcaccttgacgtggggatatatacggattaccatgcatttctgtactatcactcaagaatccgacttctatgaaaggagcaacaaaatgggaaccacacaaccgattcgaaatcgcaaggaattgcaaaaattcagcacgtactaccagacggtcaaaccacacccccgcaactatgccctgattatcctcggtcttaatacggcattgcgcatcagtgaccttttacagctgcaatggtccgatgtctatgatttttacacgctgcgtttccgtgaacatctgcttatactggaacagaaaaccggaaaacaaaattacattgcactcaacaaaaatgccaagaatgccctacgatggtatatggatgcctgttttccacaggaaagtgattatctgttttgcaaaaacaccgaccggcagcatcccatcaaccgttcgcaggcataccgcattgtaaaagaagccgcagcccaaactacaaacagccgcatggtcagctgtcactccatgcggaaaacgtttggctaccacgcatggaaacagggagcacagcccgcactgcttatgggtttgttcaatcactcttcctatgatgtcaccaaacgctatcttggaattgagcaggatgaaaaggattctgtctatttgaaaatagatctgtaagcagaaatttgaaattttttatttttggggttaagttccagaaatgccatccgatataaaaggtgtaaataaaaatgcaacattcttataagaattgttgcatttttacgttgcaattttattatgttcattatctgtaaaactatgtgttcttttttcttttccaatcagatctttggactccatttttcttaaaagaactgctacccgcgccgtgctgattccaagcgtatcgctgatttttcctgctatagcctgaatctatggagaaatgcatcatttatgtattatacagttttattttttcctgctataatcagggtaattacaataattttgaacgaaagacggtattaaaatgaaaatttctgacgcatgtaatcataaaaaaagcttatcttttgagatatttcctccgaaaaaggacagtgaactgaaaaatattgatgcgacacttgatgtgctgtgcgaactgcagccggattttatcagcgtgacgtttggtgcgggcggcagcttaaactgtaaccgcacgattgaacttgccaaaaagatcaagcagaactaccatgtggagccggttgtgcacctgacctgcctgcattacaaccgggcagaaattgatgaatttgccagaatccttaccgcagaaggcatccagaatgtgctggcactgcgcggagaccggaacccgaatcttaccgaaaaagatgattttaagcatgcatccgacctcatttcctatctgaaaccgaagggggatttctgctttttaggtgcctgctacccggaatgtcatccggaatctgccaataagattgaagagatccgccacctgaaggaaaaggtaaatgccggagcagaagtgctgctttcccagttgttttttgacaacacacagttttaccgttttgtggaggactgccggattgcggatatcaatgtgccaattgttcctggcatcatgccggtcatcaatgccgcgcagatcaagcgaatgattacgatgtgcggagcttctttcccggagcgtttccagaagatcattcatagatttgaagataacaaggcagctttatttgatgcgggtatgtcgtatgcgttaagccagatcattgatctgctggcaaacgataccgatggaattcacctgtataccatgaacaatccggtggttgcccgcaggatctgtgagggaattcagcatattatatgatgtttattgtgtcaggcactttgttcttttaggcattatctgcaaaaaagtgattccttcaactcaatatacccaatgagcatcggtccggcccaaaataaaagaacaccttccatcaccctcacaagagaaattttttgcgtaaatctcatgcttccgatcacgatcagcatggcaaatgcgccaaatttccacacaaacttccaaagatactgcatcctcacacggatgtagttttttcgcgaaaccggaacaaaccgaagtatttttgaaaccgcatccgatttttgcatcctccggctgaaggcttcattgctccattgatacggtgccaatacatagttatccataaaaacgaccatccacacatagcacagtatcatccacgcatcccgataaaatattccatcaaaaatcagcgtcatccctaacactagcacaacagctgcaaacatccagtataaaaaccatgccagctgatccgtgctctcctttaaattccggtcaaaattcttcaaattttcctgttgcttcttatcctctatcgtcatcctcgacactcctatcttttacacataatacccatgtgtttcgattcaagcacatttttctgcacttcactcaaccattgccgtctcaccgcataaccttcactgccacgacgccttatgcattctcataaaacgaagtaaattccccatgctcaaactgtccgatataatcaaattctttccggatgtcatcctctaagtgcgacgacatgatcacggaacagtccagcacttccaactgctgccggagcaacctgtaaaattctttgcggaagatcggatccatccccgcagtcggctcatctaaaagaagaagcctcggtttgtgtgcgagtgcaaatgcaagctgaaacttcatattctcaccgcgcgacatcttctccacggtccgtgccgtggtaagatccatctgttccatcagcgcagcaaactgatccatatcaaaggtatcatagaagctgcccagcatccttgcattctctcttgcactcttctgccgcaaaaacaaccgctcctcagagacaaatccgatccggttcatcgaccacgcatgatcttccgcgatatcggttccgtccagataaaagctgccgcgataatgcttcttttcctccataatatagcggaagaatgtcgtctttccggcaccgttttccccgatgattcccataatatatccacttggaagttcaaaatccacattttgcaaagcgaacctgcctttgccgaataacgctttcttcccctgtacctgcttcgcagaaaaaataatatcttccatcttacaacaatccctccagcatctcacgaatatcctcagttccaagtcccgcctgttttgcaagcgtaatccactcctgcaggcgtttttccaattccatcagctgcttttcgtgcagataatccgtgttgtatttgcacacataaaatcctttattggaaacggaacggatcagtccctcccgctccagttcctcatacgcgtgcttcgtcgtgatcacgctgacgccgatatccgctgccagtccccgaatggacggcagcgcctcgtccggctgcagttcaccggatatgatctgattcttgatctgattgacgatctgctcgtagatggcatacgttccatgcggttcaatgacgattaccagtcccatgtctcctccttcgttgcaagttcatagacggcgagtttctctctgattccaccccaacgcttgtgaagcgcataagaaagaggtgcgtaaatgatgagataaataacaagcgcaacccaaaattccacattcgtaatctccgaagaacagatgccaatcatcacgcagcttgcgatcacactgaataccgtgatcggtccgttaaaataacttacctgcccataagctgcccgcgacgcattattccgccagaccaatccgtcgtttgtaattcccacacaataggacataaagaacaccgttaccagctgcaggatcacgccttttatcatcatcggctgcacgatcagcaggatgatatcgattaccgcacacaacgcaagcggcaggccaatcttaacctttaacattctccggatatattcctcgcgcagctttttcgatccgggaaccagatacagcatcgtcggcagggcactcgtatgtgtgattgctgcaaacagcgcaagagccatcggaaatatgagccatatatacccaagcccttcctttgcactgccaaatacaaaaggcaaaaacgatgcgccaaacaggatcacataaaagatacttttcaatacctgatcacggttcttatattccaggaaatattctctgatcacattcttatatttgattgcctcttccatgctccgctcctttcgccagataatacatcagttcctccgtgtccggctcccacaccttaagtgcccggtcatactccgcatgatcatgtttgaccagagcactgcagcccaccggtgtctcctccatatagaccagccgcccgccaaaagccctcaacgcatgacgctcgcctgccaccatccggtatgcatcacggaccgactcgatatctccatacaacagttgtctgcctttcttaagcaacagcagatagtccgcaaaccggtccacatccgaagtaatatgtgtcgagaggatcacactcttcgttccgtccgcggtaaattctcttaaaatatgatggaattcttcacggaaggtctgatcaaaattcgcccccggctcatcgagcagcaacagtttcggatgatgcgccagcgcaaaagcaaatgcaaacttcagcttttctcccttggacagtttcttatattttttctttccatccaaccggaatctcttaagatattcctttaacagtgtctcatcataatttttataatattttccataatgtctgctgtttgcgatcagagaatcccagtcatcgaaccattcctcatgaaacacaaatccaatatcctgctgcaattccatctgatttatacggtactccttctcctgtatagaaatcgttccatcgtactcataaagtcccgccaaaatgtttaacagtgtggttttccccacaccattctccccgatcagtccgcagatataacctgccggaagttcaaaatggatgtcctgtaatgcaaatgaaccgaatctcttggatacgttctcggttttgatcattgtctgttccatgcctttacctcgtattttcattcgtgcaaagttttgttccgtctgtgtatgtgtatatacacatatatacaccatgttgttttagttgtcaacgtaaacttacacccattcgacttttttctatctctccatccggtttcaggcgattgtacgcctaaacacgctggtaaccattttaattttttccggatccgctccaacaaagtttatttttaaaaataaaggctttgggacattctttcaatgcttacctgatcttccattatgtctagttgctttcattcatatctttcctttcttttctacaaaaaaagaccaagtaaatttctctactcagtctgttaataacaacaatatttaattattttcccgaagggaacagcaacgaagttgccaaaacttgtgaagctctgctacaagtaatacccagtacttagtggcgaaacgccactaactgggcaatggttgcacccttgacctgctatggcgcttcgcccttaacccgagcggagtctttctcctgcaccttgcgtaaggctctgcctttacaatccgacaa

SEQ ID NO: 999 - DNA, 1430 bp, Unknown
  gut microbiota DNA sequence
agataacgcagtacatgtgcaaggcattcctggtggccggttccatacttataaaaggttacatcatgatcgtggaccagtgtcccctgatagtcttcaacgaccgtgccctttattccatcgtgtccctttttgcccctggcaaaatagagcacaccgccatccggaaccgcacatacaaatacatacgaactttccccgtttacacgggcattggtacagtctgtatgcatgacaggggaaagcagcatgtcacggaaaagctctttgcgctgggattctgttttttctgcaaatgactggcagagattattgatcatgccttttgatatgtttatttttccatctgtcagatcagacaaaaacctgcggcttttatcaattgatgtacagcagccattattcagcagaaacaggaaagcacgtaaatttcctccatagttaacgtcatcaatgactccctgtggaaatggtgcatggatccgttcacctgttttggaattatagtgcacatcggcatgatacccggtcacatgcacttctacgctgatgtcgattttctgctttgtaatggttttcgatgttttcttaaagtcagggtcatggagtacttcttcgggtgcaggaagatagatttcccttgtcggggtgagtttctttctgcagtgccccctgtgtcctggctgtccaccgggtttccttcctgtcttttcgcggctgttggatatttttttgcgggcgatagattttgaagacgggatggatgagttttcatagttccggttaatctgtgccgtcagtttctgtactttttgtttttcatcatcaagctctgtctttactttgtaaagttcccgtctctggaaagttactttttcaagggcagtgtcgcgctgtctttctgcacggatggcccttttttccatcatatccgccttttttactgcttcggcaaccatacggtcgcattctttttgcagctgttcaaaaatctcaaaccattgattccaaatcgtaatggcatggctgtgttcttttgctacagctgcttccagttttgcaattctgcgttccagggcacgcacctgtgtaaggtgctgtttttccattcggatatatttttctcccgattgaaaggctgcaagttcttcctgtgcttctttcagcctgtattgaagtactgtaatggtttcaaaagaatttcccatccccatgccgcgtcctttccttaaatgtttgtcagatcatcaatgattttttctaattctgcattatgttcctcaagggatttgatcaatgaggactgggtttcaatgaccctgtgctgcagtccgtttgtatgctcaagactgcctataagttcttcatatgctttgagtttgcttttatcatctgcgttcatttgtgcctccttaagtataggataagta

SEQ ID NO: 1000 - DNA, 47046 bp, Unknown
  gut microbiota DNA sequence
atcaataccatctaacagatgcttcgtagcctgtttattcttcaggcgataaatcaagtgatacacaagattatcaagcaattcatcggcatgctctgtaatatttaatttataagccatacttcgccctcgtttctctaagtgctgttctggcatcctttacctgtcctgcctctatctgcttttcagatatttctatatctctgtacatagcaatctgtctcatggttgactcataaatctccatgctcataattaccatatctccatagccatttttcgtaacataaattggctcctctgtcttatgacacatatcagatatctccgatgtattcttcaagtctttaattggaattatttgtggcataacatacacccccttgcttatgtcataattataccctttttcaacttaattattgtttatttgatttcccattcaagttgtgaacgagctccaccataaaatcctgcatctgcaaataaatccccaggtctatccatacaaccaaataaaaaataagggtatacagtgcatctaaactatatacccaaaataaaaaaaacggacaatgacatatgtcaacgtccgtcttcttcatccattttttcaattatcagctactacctatagcaaaacgaacatcataaaccggacagattagttttcatcctgcatttttgcaagtttcttcgcctgatccgccgcgatacatgcatcgataatctcctggatatctccgtcaagaatcttgtccagcttgtataatgtcaggttgatgcggtgatccgtcacacgtccctgtgggaaattataagtacggatcttctcggaacggtctccggttccgatctggctgcgtcgttcctcagactctgcatcctgcttcttctgcagttcgagatcatacagcttggtacgcaacagtgcaaacgctttctccttgttctggatctgtgatttttcggtctgactgtaaatcacaataccggtcggataatgcgtcagacgcacagcagagtccgtcgtattgacacactgtccaccatttccggatgctctcataacgtcgatacggatgtctttgtcgtcaatatgcacttccacatcctccgcctccggcatgacggcaacactgcaggttgatgtctgaatgcgtccctgggattctgtctccggcacacgctgtacacggtgcacaccggattcatatttcagtacagaatatgcgcctgctccagtcaccataaagttgaccgacttcatgcctccgattccggtttcatctgcctcaagtgtctccactttccagccacgacgctctgcgtagtgtacatacatacggtaaatttcagccgcaaaaagcgcagcttcctctccaccggcgcctgcacgaatctccacaataacgttcttgtcgtcgttcgggtcttttggcagaagcagaatctttaatttctgttccagctctcccagacggctctttgcctcatttaattcttcctttgccagttcgcgcatttcctcatcggattcctcatcaagaattgcaagggaatcctctattgtctgcttacatgccttgtactccttgtaggcatccacgattggctgcagatcactctgctctttcatcagtttacgaaagcggttcggatcgtttgccacatccggctcgctcaatgtattcattaactcctcataatgatgaagtaaatcctctaatttatcaaacataatctatcctctcttttcacataggtgtttgtgtccgcagaccacacggtcatttcgcgcaagatcttttttcacgcagacgtcctcaaatccggcctctttcatcatagatgataccgcccatccctgatcatatccgatctcaaacagcagataccctccatcggtcagataatccgggctttcctggatgatcttccggtaaaagaacagaccatcttcttttccgtccagtgcctcatgcggttcaaattccgacacctccggcatcagaaacggaatttcatcgctgcggatgtatggtggatttgacacaatcacatcaaacgtttcatccgcaacatcctcaaacagattgcttctctcgaaaatggcaggaacatcatttaattttgcattttcctttgcaacattgatcgcctgtttggaaatatcatatccatatcccccggtaccgtgtacatttttcaaaatactgatcagcacacatccggaacctgtacacatatccagcaccttcatccccggttttacaaccttcagtgcttcctccaccagggtttccgtatcctgtcgcggaatcagcacattggaattcacatgaaatgtcatccccatgaattcctgttccccggtgatatactgaagaggcactcgctctgccctctttttaatcagcacttcaaattcatgctgcagttcctccggcatctcttcgtcaatatgcatataatagtaagtgtggtcaattttacatgccatggtcaaaagcagccatgcatcatttctggcatctgcaatgccagcctcacacaggcttttttctcccgaaacaattgcttccctataggtcatacattctcttccttctgccactttctccagtcaaacacagcttccaccgaagcgattcccacttcgatcatctcatcatccggctctcttgttgtcatcttctgcatccagagtcccggtttgctcagtatattcaccagccggttatcatatcttcccgccagacggataaactcataagatactccggcgatcaccggaataagaagaagtctgagcaccagctgcaaaatacgcgaatccacacggataaacaaaaagaacacgatagatatcagcattacaatcagcaggaaactagtaccgcagcgcttgtgctgccgggaacttttcctgacattttccacattcagttccattccgtgttcgatgcaattgatgcatttgtgttctgctccgtggtacataaacactctcttaatatcaggtgtcagggaaatcagtgcaatatatccgataaaaattgccagacggatcagtccctccagcagcgcaatcacggtatccgatgcaataactttatggaagatcccggacagaaaatatggcaggaaaaagaaaagtcccagcgcaaaaacaatggaaaatgcaacagtgccgcccatcattgccttctcctgctttttttctttttcttcctgtgcctttcgttcctcctgcgtcatggcttcttttttctttttttcatcctcatcgtcttcaaaaaaggaagccgaatacatgagtgtctgcatgccaaggatcagtgattctataaaattaatgacaccacggatgaatggcagacgccgcagttttttatttttaatcgtttctttaaatgtagaaacttttacatcaatggtgtgatccggcttgcgaacggcaaccgcataacggtcttcgtttttcatcatgacaccttccatgactgcctgcccgccaactcctgaatatttcatatttccccctgtaagagaaaaaggttgaggcaatacacagcctcaacctttttacgtgacttatcaattctatttcatgccatacttcttgttgaactgttcgatacgtccacgagcctggttagccttctgctgtccagtatagaatggatgacacttagaacagatttctacgtggatctccggctttgtagaacctgtaacgaatgtgtttccacagttgcaggtaacggttgcctgataataatctggatggattccttctctcatgattttcacctctttatattcttatcgttttctgtaatcagtcttccgactgactctggttcctgtcacactctttatacccgtatgcccgatccgcatatgatacttattacaagagcgacactttcgtccgtttacatcccgataaacagcttaattattgtaacatagcgtccatgcaaatgcaatagtaatttaaagaattctgttttttcttacaagattgataaaatcagcatttgtacgcgtgtgtgcaaacatatttaaaatattctccacagcctcatccgaccgcatgccgtttaatgcccggcgcatattctccacgccctcacgctcctgcggatcaagcagcagatcgtctcttcgcgtgccggactttacaatatccaccgccgggaaaattctcttttcggaaagtttccggtcaagaacaagttccatgttaccggttcccttaaattcctcaaataccacgtcatccatcttgcttccggtatcgaccagtgccgtggcaagaatggtcaggcttccgccttctctcatattccgggctgcaccaaaaaatcgtttcggcatgtgcagtgccgccggatcaagaccaccggaaagtgtccggccgctcggcgtacaggtcaggttgtaggcacgtgccagacgtgtgatactgtcgaggagaatcatcacatcctttttatgttccaccagacgttttgcacgctcaataaccatttccgatacccgcttatggtgttctgcggtctcatcgaaagtggaataaatgacctctacattttctccctcaattgcctctttaatatcggttacttcctccggcctctcatcaatcagcagaatgatcagatgcatctccgggttattttcctttaccgacttggcaacttcctttaaaagcgttgtcttacctgctttcggcggggatacaatcatgccacgctgccctttaccgatcggggaaacaatatccatcacacgcattgcaaccgaaccgccgggacgttccatgcgcagacgcacattcggaaaaatcggggtcagatcctcaaagtttgtccgcttctgtgcttccgaaggatgatatccgtttaccgaagtcacatacagcagggcggaaaatttctcccgctcggatttcactttggtatttccacagacaatatctcctgtctttagattaaatctgcggatctgggacggcgccacataaacgtcatgttcccccggcagatagttttcacagcggataaaaccgaatccgtctgccataacctccagaataccgctcgctgtatttccactgtcgaggctgacgatatcttctttgatcgcagcactgtcattatcctcctgtgccttatagatctgttcctgtgatgcatgtgctccatgttctgcatgcatgctttctccatgctccggatggctgtgatcctccgtatgggacgaatgctcttctcttcgcggttttggtgtatgctttcttccttcctgtccggaagctgtccgcgcggtatataccgtctttgccttcggcgctgcctctttttcccgctcatcttcctgcagcatccgatcaatcagttctccctttttcattgttgagattcctttgagtccgcgtgccttcgccaggtcttttaacacaaccaaagaaagactctcatatttttccctcattccatctgctccttcttaaaaaatatagacttgtttcgtaccgtaaatcatttcataaattacacttatttgtatgggatatcagtcagaaacgactatgaatcatttcaaatattatctaatgcagctattatacactatttccggtaaaataggaagtcttttttttcatgcgcaagaatggtattgtgaataagtatgagtatgtaaaggagaaaattactatggataataagaaaaggcacttttatgccacaaagaatggaacggaaaactcgaaaccgttgcaaaatcaaaagtaaaaacccgcgaggatctcgcgattgcatacaccccgggtgttgcagaaccatgcaaagtaattgcggaagataaaactgctgcctacacatacacctggaaagccaacacggttgccgttgtttccgacggaagcgccgttctcggccttggaaatatcggtccttatgccgctatgccggtcatggaaggaaaatgtgtattattcaaagaatttggaaatgttaacgctgtaccgatctgtctggacacccaggacaccgaagagatcattcaggctgtgaaaaatatagctcccggattcggcggtatcaatctggaagacatctccgctccgcgttgtttcgaaatcgaggaacgtctgaaagaaatgcttgatatcccggtatttcatgatgaccagcacggaaccgccatcgttgttttggccggtatcatcaatggtctgcgtgtgaccggcaagaaaaaagaagactgccgcgttgtggtaaacggtgccggatctgccggtgtggcaatcaccaaacttcttctgacttacggtttcaaacacgtgaccatgtgtgaccgtgaaggaatcatcggaaaagattatccgaacttaaactggatgcagaaaaaaatgacagaggttaccaatctcgaaaatgcctccggaacgctggcagacgcactgcgcggtgcggatatctttgtcggtgtctctgcgccaaacattgtcactccggaaatggtttcttccatgaacaaagatgccatcctgtttgccatggcaaatccggtaccggagatcatgccggatgtggccaaagctgccggagcaaaagttgtcggaaccggacggagcgatttcccaaatcaggtaaacaacgtgatcgctttccctggtattttccgcggtgcattggaggcacatgccacccagatcacagaagaaatgaaacttgcagcagcagaagcacttgcagccctagtttctgacgaggaattaaatgaagatttcattatgccggaagcatttgatccacgtgtggcagaagttgtaagtgaagcagtcaagtctcatgtccgctaatcgctactattctctgaacgattactgtaaagaggtcttcggggaaaaagtgtaccgtctcagtctaagcggtgggatgacgtgtcccaaccgcgacggaacactctcttacggaggatgtgcattctgcagtgccggaggctccggtgattttgccgcggatgcatttctgccggtttctgagcagttcatacaggccagacagaaaatcgccgccaaaacacactgccagaaattcattgcgtatttccagtcatttaccaacacctatgcccccgttgacgttttgcgtcagctctattccgaggcaatggcaccggaagaaatcgttgcactttccataggaaccagaagtgactgccttcctccggaaaccttagaactcctctccgatctcaatcaggaaaaacccatatggatagagcttggtctgcagagcatccatgcaaagacgctgtctgccatgaacacgcataccacggttgcacagtttgatgccgctgtatccaaacttcatgcccttggaatctccgtgatcgcacatgttattttaggatttcccggtgaaacaaaagaaatgatgaaagataccgtccggcatgtcgccgcacttccggtttctggaatcaagctgcagcttctgcatgtcctgcgtggcactgcactggcagaacagtatcagcttcatccgtttcccatgatggaacttgatgaatacagcgattttgtgatcgactgcctggaacttcttcccccggacatggtcgttcaccgtctgacgggagatggtccccgcagtctattactcgccccatcctggagcacagacaaaaaacgtattttaaacaccattcatcgccgtctcaaagaacgcaataccagacaaggagaacatttttatggctgaaccatttacaatctataaacttacgatcttatatatgctgagcaaagcagggtttccgctttccaacacccagatttccaatttctttctggaacaggaatacacagactatttccgtgtacaggaagtaatcggggatctggtcgatgccaatttaatccatgcagagtccacgcacagcaacacacagtactctctgacttctgcgggaaaagaaacacttggatttttcaaagataaattaaatgatggaattgaaaatgatgttcagggattttttgaaaagaataaattagaattccgacaggaaaattccattctggcagattactataagacaaccaatcagaaatacgcagtacgctgtcaggtacggtctgacggcaatcctctgatcgacctgacgctttgcgtaactacaaaagaacaggcagaagccatctgcaataattggaaaaagaaaagtgaagatgtatatgctgtactgatggacacgctgctgcaataagccgcgtgtcattttttctttttctgtacgctgtatccaaatttgccgagttttttccccagagcaaaatattctccgtgggaatacatgataagcccggttccgttgatgtcaaattttcctgtttcatccagatacgcatcatccaccgttacgccaagtacttccgccacaaacatcgtatgactgccaagcggatggctctccaccaccctgcaggcaatatttacaggactttccgcaattgccggagctttcacatgctccaccggaaccggtgtaagtcctgtttttttaaatttatccacatctcttccgctgaccacgccgcagtaatcacaagcctttgccagtttttcgttggtcagattaatcacaaattctccggttttctctatgatctcataagaataacgggatgggcggacggaaatggaaaccatcggcggattggtgcagacggttcctgcccatgccacggtaataatgtttggccgatgattctgatccgccacactgaccatcacagccggcaccggatttaacatatttcccgctttccaactctgttttcccatttttccactccttttgtctgttcctgttatttataatcctgttataatttcagatccgtattttcccggataatatccgcgatcagttcacgctcatccatatgatgcttcacacccttgatctcctggtaatcttcgtgcccttttcctgcaaggacgatgatatcgccatcctcggcatgttccatgcaatacctgatggcttctttccggtccggtatcgtcacatatgcgccatcggctttgtgtaccccgaccagaatatcgttgatgatatccattggttcttcatttcttggattatccgatgtgacaaccgtcagatctgccagttttgaagatacctctcccatctcataacggcgggattttgcacggtttcctccgcatccgaacaggcagaccagtctgcccggctcatactctttcaaggtcgttaacagactctccagtgccatggcattgtgtgcatagtcaatcatcagcgtatatctctttgttaccggtacaatctcaattcttcccttgacacttacatgaagcatcgcctttttgatttcttcaacactgacaccaaaatgatgacagattgcaatggcggtcagggaattatacaccgaaaattttcccggcacattgacttccacatcaaaatccatggaacctcccacatgatattttacaccaagtgccccatgctccttttttaactctaccttctgcgcaatcagatcattttctgctccatacccaaacgtctcaactgtacaggtatgtccctgtaaaatgccctgcagatgctcgctgtccccattaaaaattccatgcctgcactgctggaacaaaagactcttgcagtgcatataatctgcaaaatccttgtgctcattttctccgatatgatccggttcaagattggtaaacacgccgatatcaaacacaaatccggatacgcggtgaagcatcagcgcctgggaagagacttccatcacaacagcatcgagtcccgcatctaccatttttgcaaaaagctcctgcacccggtaagattccggtgtcgtatttgcagaaggaatacgctcagaaccaacaatcgattcgatcgtgccgatcagtccggttttgatccccgcagactctagaatcgaacgaaccatataggttgtcgttgtttttccttttgttccggtaataccgatcgtctttaatttttttgccggatgcccaaaatatgccgcagacatgcaggcaagtgccagacggctgtcctctaccttgatatatgtaattccatcgatcggcgttacatccttttctacgacaatggccgctgctccctttgctgccacatccggaataaactcatgtgcatcacgcacacttccgctgatgcacacaaacacagaacctttttcaaccttgcgggaatcatataccagagtcgtaatctctgtctcctcgcttcccgccagtatctcatattccatttcgttgataagttctttaattttcatttaattttcctcccaaattccatgaaacacttctgtcgctggtccagtcatataaatatgattgttatccggatcatactcgatggtcagatctccgccccgcagatgcaccagaactttattttctgtcttatgatttaagatacatgccataaccgtggcacaggttccggtaccacaggcaagcgtctccgcagatccgcgttcccacacccgcatggatgcttccgtcggagaaataacgtgtacgaactctgtgttggtccgttttggaaaccgtggatgatgttcaaactccggaccgtatttttccagttcaaaatgttcggtgtcctccacaaaaattaccgcatgtggattccccatcgacacgcaggtcatcttccactctctgccctctacttcaatcggctcatctaccacctgttctcccgatgcatctacaggaattaaatccggttttaatattggttctcccatatccacacgaaccagcgaaaccttgccatccgcaaccgtcagctgcaacgtttttaccccggctccggtttcaatcgtaatctctttcttatccgtcattttatgatcatatacatattttgcgacacagcggattccgtttccacacatctccgcctccgagccatccgcattgtaaatccgcatcctgaaatccgcgatatccgatgggccaatagtgatcaggccatccgatccgattccaaaatggcgatcactcactgcaattgatacctttgcaggatctgctatcttttcctcaaacaaattgacatatacataatcatttccgcacccatgcatttttgtaaacttcatatttctacactccttttttcttttccatcctgtcgattcagagcttctattctaagtatacccgcacgatccgtcttctaaaacaactacagtgctttttatattgcaaattgtgtggaaacatagtacactgaatctaattaatatttacaggagatttatgcaatgtcagaactctcacattatgaaaaaacaggatatcttcatgacgattttaagatttttcacttaaaagatacctctatgcgcccgattgactttcattaccacgattttcataaaattctgatctttcgcaaaggaaatatttcttacaatgtggaaggacgtacctatgatctgataccgggggatatcgtattcgttcccgcaggtacggtccaccgtccggttctgcacagttctgaaatttatgagcgcatcatcatctatatttccagacactacctggatgcctgtcatgattccgacgatctctcactctgcttaaaagaagcgcatcagaaaaaatcgcatgtactgcgtattccggcactgaagacaacacagattgcaagaattatccacgatctggaacaatctctggattccagagaatacgcaaacgaactttatcataaacttctttttctggagctgatggtgcagttaaaccgtgcagctctctccaaccgcattgaatatctttctaccacagcctcaaatcataaaatgatcaatgtgatagattatttaaatgcacatttaacagatgacatcaccatcgactttcttgccgaacatttctatctgagccggtatcatctcatgcatgccttcaaggaagaaaccggttatacgatcggaaactatctgaccacgaagcgccttttgctggcaagagatcagatcgcccagggggaatccatcaccaccgcctgttatgcctgtggttttcacaattattccaccttttcccgggcataccgcaaacattttggctgttctcccagagaacagcgcaattgatctgtctgcctgttacattttgcgctctgcaagtgtgttgatcagcgcaggaatcagctgtttctttctagataccacattttccagcataatcccctgatcggaaggctcgcaattataagctgccgcaaccagctgcgatgcatccgcaccgcgataaatcagataagtagactcatttaagatatccgtcagcatgacaaaaatcatctggatctgtttttctcccatcatctgttccagtttcggctcgatacgttcctgcaccttatccagttcggtgcgtcccatcgcgctgatctgcgccacgccaaaactcacatcctcggcatggaaaattttaaaatcctgatttaaaatttcttcttctgttttattatcaaaattgcttcccgcctgaaacattgctgaggcaagctcctcgaccttaacctctgcaatctctgccagccggagtgctgcttccctgtctatctgtgtacaggtcggtgagcggaacatcagcgtgtcagataaaatggctgcgcacatcagtcctgccatctgcgaggtgatcgtaattcccttttccagatacatctgataaatgatggtggatgtacatccaagcggctgattgcggaaatacaccggagacatggtctcaaggctgcccagccggtgatgatcgataatctccaaaatttccgcctcatcaatattggatactgcctgtgatttttcattgtggtccacaaggatcagtttctttttctctgctttcatcaaatttctgcgggaaaacatacccacatagttctggttttcatcgagaaccgggaaatcccgatgccgtatattggctacggtctctcttacctcatccacgtaatcatccagatcaaaatgaatgattcctttttttgtcataaaatgcttgatcggcatactctggttgatcagacgggccgcggtaaacgtatcgtacggtgtactgatcagaacgacttcgcgttcctttgccgcctcgatcacttcctgactgatttcatatccgttagtgacaatcatgcagctgcagtttgatgcaatggaaagcatctgcgactcttccccgtccccgatcataaccaggtcatccttgtctatggcagaagtcactccttccggtgtaccgattccgattaccaccttgccgtgaacaaaatacgcatgttcatttcctgtcagcagctgtccgtccagcgtctctacaatattcttgtattgggtacgtgcggtagaaaggatggtattatcatatacatccatgtaggattttgcaatatctcctgttacaatcagtccttccagcttattttcccgcaccaccggaagcgtaacaaccccgaggatcttcatcatctcccatgcctttttcatagagatatgactgtttactccctctgtacggcgtatctgaatatccttgatctgtgttccgacatccgaaatcattgccggggcctctgcatgaaacctttccagaacatacgccgtctccgcatttacagatccggctctctttgcaatataggtcattcccgtagctgttttgggattctttttttctatttcatttttcaggtttgcataagaaatcgctgcacatatggaatctgtatccggatgcttatgtcctacaacccaaactttcttttttgccatatcagattctcctattcacatttctcttttcgaattgttctatctcttttttgagacaaaaaatgcaatcctcattcttttgagaattgcatatccttattctaaaacgcaatcacgcccacactaaccagcaggaccaaaagtaacaccaccagattcacaattccaagtatcattcccgtcagggaaaaaatacggaccggatgcattctgctttccataacggtaagcttgtccaggcgttcatccatgctgcggaacagatccgaaatatttcggtagcattttacattttctgtatgtactttctcggagatttctgtttttgccgtggtcagctgttcttcgatctgcgcaagagaatctttcagttcctttgctttttcttcatttaagcgtttgccgtctgccacatcttccttcatggaaacttcgatttcttccatcttggcagacactttgccgatcagacgatcaatctgcttttccacttccgcagtgaatccatctgcttttttctgacgctcctcgagaatctgccccagagcatctgctttctcctgacgttcatccactaacgtctgcagttcctgtgcctccgtctctctggaatcaagcaatgactgtaactgcttggcgcgttctctgaattcatcaatctgactaagtaagaaatcttccctgctcacaacattaactttcctttcctgtacttcgggctgtatttccgtgtccggctttgtctcttttgtcttctgcgaaaaaacctcctgcggtttttcctgagcagatgcacgcatccgttcttcatatgcagctttccgacgattgtgcgcaatctgtctgcgcagctccaacaataatccagacattttttcctccgctgtatcagttcctctgtttattgtatcattctcccacgtatttgtaaacaaaaaagactgccagcatgacggtactggcagtccttcttcttttataatattcagatcttaagcgattccgtttactaattttgctaaacgggaaactttacgagctgcgttgttcttgtgatatacacccttagagcaggcactctcgataactgaagaagcatccttatatgcagcctctgcagcagccttatcctttgcagcaacagcagcctctaccttcttgattgaagtcttaacttcagaacggattgctttatttcttgcagtctttgtctctgtaactaaaattctcttcttagcagatttaatgttagccaatctgtacacctccatatcaaactgtaatttgtttcctgcggtgaaacagacacggacgcttcatcgcaaacatactagaatataatatgtcaagctgtcccttctgtcaagatgtaattgaaaaaaagttgtaaaagtctgccaatatgtatataatgtagacatgaaaacgattgataacgacatcaaaacaggacaattcaaacagatttatctgttatacggagaagaacagtatctgatccgccagtaccgggacaaattaaagcatgcactggcagcggatgatgataccatgaacttttctgctttctccggcagcgacatcaaccagaaagagatcatcgatctggcagagacactgcctttttttgccgaccgcagactcattctgatcgaagacagcggtctgtttaaaaaaagcgccgaagaacttgccgattacatgtcttccattccggaaaccacttattttgtctttgcggaaaaagaaatagacaagaaaacaaagatgtacaagcaggtgaaaaaaaacggaagcatcgtggaatttccgcgtcagaatgagacgactctctcccgctggatcgagggaagaatccgcagaaacggaaaaaatattacaagagatgcctatgcgctctttatccgtaaaaccggcgatgacatggaaaatatcgacaaagagctggaaaaacttctctgctacacactggaaaaagactatattgatgtctccgatgtggaagccatcaccaccgaacagaccgagaataaaatctttgacatgattgacgcagtggcactgcaccagcagaaaaaggcactggatctttattatgatcttcttgctctcaaagaagctccgatgcgtattctttttctgctttccagccagtttcagcgtctgatgattgtcaaatccatgaccaatcagggatttggcaacaaagaaattgctttaaaagccggctgcccggagtgggcagtccgcaaataccagtcgcagagccgtgctttttccatggatcagctcaaacaggcgatccgcgatggtgtggaatacgaaactgcagtaaaaaccggacacatgaatgaccagatggccgttgaactgtttctggtacagtacagtgccggaaaataattttctctatttcacataagtttcgcacaccagcttattttcgatgacgcgcacccgtatccgtccaccttcgatggtgcaaaaaaatctgctgccgctctctttgatcctttgtacggcatccgggctcggatgtccgtaacgattatcctttccggctgaagcaaccgtaatttccggccgaatacactgcaataacgcttctgcgttcgcatagcgcgatccatgatgatccgccttaaaaaccaaaaccttatcccattttctgcgccggatcagctgctcttccacatctgtggagatatctccaccaaacagagcgcttatatccccctcttcaaattgcagtaccagacacagatcattgacatcctccgctttatccgaagctttgggatacaggcagcgcattgctgcacgtttgcttcttaccgtatcccccgcctgcatataaaacactttcgttccatggctgcgggccagttctgccagctcttttgtctttgcttctttttccactgcttttgcaaacaccagatactccacacggtatccggacacaagaacctccttaagaccggacacatgatcggtatccgtatgactgacaaaccagtaagaaatctctgacactccttttgcctttaaaaacggcagaatccggtactttcccacctgtttcacatcggtgctcccaccatcgataaacatggaagtcccgccgcccgtgcacagataaataccgtctccctgtcccacatcaaggaaatcaatctcaaacgatttcttctgtggaaaaagaagaaaaagcagaagaaacgcaataaaacaggaaaaaactatgccctgcagacgtttctttcttcggcttacacacagatctgccgtttccctgcagtctttatgcttttcatttctgcgtgcacaggcatagatcgccagaagaaacactccaagccccaggtaataccaaaagatccgcatatgcgcaggtttccctgtgatcctctgcgcacccggaatctttaaggaaacctcacacagaaaccggtaactgtcgagcatccagccacagggcgcaaacagaacacgccccgcaggcaaaaacgccatccccacaatcaccccaagcacagtaagccccagtaatccgttgaccaccgcaagtacaaacaggtttatcagcatcgcgtacacgggaatttcataataagaatatgcgaccagcgggattgtaaacaactggattgcaaaacttaccagaattccttctttttgtcttgagaaaaatgtttttttgatggtttcctctccggcctgctgtctgcatttccatgaatgttcccattccagcagtacattggctcccactccgatggcaatcaccgccatcacggaaaacacaaatccggaatacgatagcagaaacggattttcccacaaaagtacgagcacaacaattccaagcgcatttaacatgtcataggcatatcctgtcacatccgcaaacaaataaatcagacacatgcccaccgcccgctgtgtagataccccgtttccgcttaaaaccgcataggaaatcaaaaaaacggtcgttgccagcgctgctgtcacataccgggtatgcagtcgtttccgcagcagacggtacagtcccatccccagaagggaaatatgaagtccggaaatagcaagcacatgggcgatccccgctctctgatacaaagattttatctctgcatccagagcccccttttcccctaacagcatcgcagaaagcacgccatcgtcccggatagaatgccggatcacgtcatttgcacgctttttcatattctgtagtgcgcaccggtaacgatccggttttccatagacccggctgatctttgtgacccatatgccgaaatcaattttctgactctggtaaaactgccgggcatcaaacatcccttcattggatgcttctgtaaataatgaaattgtaccctcaatattcagaatttgtccagccgaatggctggcagaagaaacatatgcgattacatcattgcatggcagtgtctgcgattctgcttccaccgtgcaatcttttaaatagtaataaacgcatctggttttcggttctatccgatcaatctttcccgccaggcgaacctcctggccatctgtgagtttctgcaggtactgctgcctgaaatcgatctgtcgctgcatctgcagcatccccaaaagaaacataccgggaagtcctgccgcaaacagaactttccgcatcccccgttccttccatggagtggtatataccagtaacagaactgccagcacaccccatgccggcagctgctctctgacacacacaatccccagcagaaactctgtggcaagcaaaagaaatggtcttttcctcacgctttcttttcctattccgtagattctactttctcatcgctttcttttgtgaccagccggtcatctgccttgtacatctttgatagtttatacgtgtaacggcatttgccactggtgtctccgttgatggaaatctgtactttatcgattcccgtcagttccgtcagggaatccacgatagagtataaaacaacaggttctgagatttcctgattctgattcaaaaacatttcatccagattgacatagcagaccccatccaccactgtgatcgtaatcagtttcgtctccgaaggaatcgttgccaggagtccgctttttcttggtccctcaatcagctgttccatcaccagtttttccagtgaaatgttggaactgtaatgtacctctctggtttccggaaccagtctggtacccgccttatttgaaaaataaagtttcagtgttgctttctggctggaattgatctgttctcccggattttccacaaaactgtccagattcatggcacctacatttgctcccgaggcatccacaagtggttttccatccacagtaaaggtcacatactggctcagctgcaacagtgtctttgcaattgcagccctggtcagaatctcttccgtcggtttcatatcgtaatattccttgctgaaatccaccgtaatctgataagagatcagatctatattctggatttttactttgcgtggaatggttcttcgaagcgttgcatcctccggctgtgtctgcagatctttgagcagttccttcacctgtgctttgccggatgaagtatgctgcagggtaatctttttcgcaacaacctttgtcagctcattgtttacataaaatacaaaatagtcttttttatcttctttttttccacatccggcagccattgtgagtaccattgccacaaggagtatgattgaaattattttttttctcatctttttcctcctatgcaatatagttgagcggaatacgaacatcaaaagttgttccctcgcctatcacagaatatactttaattgcgccgcgatgcatcagtatggaatttcttgtaatcgcaagtcccagtccggttcctccgatctcacgggaatgggatttatccacccggtaaaatcgttcgtaaatatgatccagagactcctccggaataccgattccggaatcttctactttcaggtagaaatactggtgatccgcattcagcgatacgtgtacccagccctctccgtcattccggttatatttgattgcattctccacaagatttgtgatcgcaagcgtgatttttacctcatccacttctgcggtaaccgggcggaaactctcaaggacaagttccactttctgcttatccgcaatcggctgcagacgttttaaaatctgctctaaaagttcattgatattgacggaagatacattcagccctgctgcagacttatccatcttcaccagagaaagcagatcgttgatgatctttgtctcacgctcaatctcgttggtgatatcttccataaattcctgatacagttccttcggcgcatccggcatgctattgatcgaatccgccagcaccttcatggatgtcagcggtgtctttaattcatgtgacacattcgatacaaactcctgccgggaatcatccatgactttgatccggccaagcatctgattgatcttctcacagattcccgccgtctccgtgtaatcattgacctgaagattgtactctccgtatccgtttttgattgcagcgattccctcttcaatcttctgcaacggcttcaggaaatacaaaagcagaaggattgcaaaaaacacaattgcaattccgaccatgaccataacgatcaccgccacctgtcgcatatatgactggttgatcacaatattgtccgtagaaacactgatcagcataactccgatcaccgtttcacttttatcatcaggatcgctgatcgggatcgtcatctcaatgtaatggttctccgaatcataatgcacaatatcctcgcccttgaaactgcgcatgacctcctctgcaatgatcagcttatggtcatcgagattatacgtgtcataataaactttgcagttgtcatccacaacaatgacacgaccatcatagatggtcgtgagcatatcaatctgtgtctgaatattgctggacgatacatctgcccccagcttcatatattcacttgtcgctatctgatttgccagaatttttgcctggcttaagatttcactttcccggatagaaacggcacgcttttcgtaatattttaaaactgctgccgaaagaatcagactcggtacgaccgcaatcacaacgatcaaaagaatcagccgaaattttaaactttttaagaactgaagaaactgtttactcttctgcatggaaaaacctttctgccttctcgtctatttctggtaataataatatcccacaccccattttgtgtgcacgtatttcggttcacttgggttggtttcgatcttttcacgcagacgacgtacatgcacatccactgtacgcacgtctcccggataatcttttccccagaccagtccgagcagattttccctgctgtatactttattttcatttttcacaagaagttccagcagatcaaattcttttgcggtaaggtttacttccctgcctgaaataaacagccgtctgctgtcacagtccagacgcagatcccctttctccacaatcgaagaaacttctttcttttctctcggtcctgcggtacgacgcatgatcgctttgatacgcgctttcacctcaagaatattaaacggctttgtgatatagtcatcggcaccataatcgagtcccagaatcttatccatatcgtcgcccttcgctgtcagcataacaatcggcatatcagaaaattcacgaatcgcctgacatacttcgaatccgtccatcttcggaagcatgatgtccaaaaggatcatatcatactcatttgctttcgccatattcagcgcttcttctccatcgtatgcacaatccacttccatcccgtcctgttcaagactgaaccggattccttttacgattaatttctcatcatctactacgagaactttctttgccatattacacctcaacgaatcgttatataatctttcattttctcaaaaagtgcgcttttgattccggatacctgcatgatatcttccactttcgcaaacggcccgtttttctcccggtatgcaagaattgccgccgcccgtgtctctccgattcccggaatggtcacaagctgcgcggcatccgccgtattgatatcaatccgcccgtccgattcttccacagtggcaccggctgcctctgccgatgctttccgctcccttgcctcttcctctgtgggaaaataaatcatctgtccatccgaaagcttctcggcaagattccagtattcgcggctggcagctttggtcagtcctcctgccgcctccaccgcatcgcagatacgcataccgtctttcagctgatagacaccgggagctgctacctccccgcatacatatacctgtaccgtctggtcggattttaatgtttctttttgttccgttcgttccgtttccaccgtctgctcctgtgtctgagtggtatccagatatggcacttcctccctgccacatcccgtcagatacaggcatgtcagaatcatacagcacttttttatccaatgttttttcatctcatttctccctttccggggcgaaacgagtctcaatgcatttctattttaacgattttttgttacttttacaagtgtaagttattcctgcaccgaaagtaatgctttttccagcttttcaatcatttcatccacatgctgtttttcgatgacaagcggtggaacaaaacgaaggacatccgctcccgctgtgatcacgatcagtccctgctcaagtgctgcggctgccacttttccaactggaagcttgcaaaccacaccctgcatcagaccttttcctctgcgtgttacaaggaagtcatatttttctaccagctcatccagtttctgttccagataaggcgctacttcctttacatgacctaaaatgtcacaggctttaaactgatcaaatactgccgaaacggctgctccgacaaatgggtttccaccataggtcgttccgtggtctcccggtgccagcgatttgtctgccacacgctgtgtcaggaaaaatgcaccgaccggcactccacatccgagtgcttttgcacaagtcatgatatccggttttactccgtaattctgccatgcgaacatctcgccggtacgtcccatgccacactggatctcatctaagattaacagaatatccttttcatcacagagcctgcgcacgccctcgataaatgcaggatcggccggataaattccgccttctccctgtaccgtctccataataaccgcacaggtcttgtccgttaccagttcttttacactttctaaattgttatactctgcaaatttcacacccggcatgagcggagcaaacggttcctgataatgggcatttccggttacggaaagtgctccgatacttcttccgtggaaagaatgtttcatggcaatgatttcatggccggcatgtccgtctctggtatatgcatatttttttgcagctttgatggctccctcaatggcctccgtaccgctgtttgtaaagaaaatacgatccattccgctggcttttagtgctttctttgccgcctcaatggtcgggacattgtaataaagatttgacgtatgcaacagtttatccacctgatccttcagcgcatttttatacgcctcattgctgtagcccagcgcacatacggcgattccggctgcaaaatccagatacgcttttttgtctgtatcgtaaaggtatacgccctcaccatgatcaagtacaagtgaaaaacgattgtaggtatgcagcagttcctgctccgcggtatcaatatattcctgtttattcattgtttatccacacctcttatctcttattcattgtaaaaatgatgttcttcatcacccaaaattgcagtaccgattccgcgattggtgaagatttccaaaagcagacaatgtgcgattcttccatcgagaatatgcacacgggatactccgttttcaatggcatcaatgcagttattcagctttggaagcatgccgccgccgatatatccgtctgtaatcagtttttctgcatcggaaaccgtaagttcggaaatcagggtggacgaatcttccggatctttgtatactccctcgatatcggttaagaatgccagtttctctgcggaaaccgcacgggcaatcgcacatgccgcatcatccgcattgatattatatgtatcataattgtcatccagaccgatcgggcagataatcggaaggaaatctttctccagcagatcatacagaatctttggattcacttcctttacttctcctacatatccgatgtcctgaccatccgacaatttcttttccacctttaacagaccaccgtcttttccactgatgccgaccgcctgcaccccaagttcctgcaccatggataccagtgatttgttgacacggtttaacaccatctctgcaatctccatggtaggcgcatccgtcttacgcagtccattgataaattccggttccattcctgctttggcaacccatttgctgatctccttgccgccgccatgcacaatgatcggtttgaatccaaccagctttaacagggtgacatcctgaatgacctgttttttcagtttctcatctaccatcgctgatccaccgtattttacaacgatgatcttgcggttaaaacgctggatataaggcaatgcctcaatcagcacctgtgctttttccaatgcgtttaaattctcactcataacattctccttactgattaaatttcgtaatatttgcttcgttcaatgtaaaatcgtaataatttaagtcttccctgaaacaccagccggcatctttccagaaatgatttcccagctcattgctcttaaatgcgatcaggctgaccttattgattttttctttctgcagggcgcgcatacatgcgactgccatggcttttccgattccgttcttccggtaatcttcgtgcacacagacatgatacagacatccgcgtctcccgtcatgtccgcagagaatggctcccacgatctttccatctgctaccgctaccatactcgtggtcggatttctttttaaaaaccgctccactccttctttggaatcatcgatggaacggattccaaaaccgtggatgcccatccacaacgcatacacctcatcataatcttccagtgtcatcacacggattgtatattctttactcattattcacctcattatagagctcattgtatgagagttccgcttacgcggaaacaatgagcgtaggaaatgcaccgaacagatgcctttccttatggaaacatcggaaccatggaaagtccttctgcctcatcaaatccgaacaacagattcatgttctgtacagcctgtccggctgcacccttgaccagattgtccagtgcacccatcatcacaactctgccggtacgctcatcaatgacaaagtttacgtccacgtaattgctgccctctacccacttggtctccgggcagacacctttctttaatacacgcacgaaacgttcctttgcataatatttatcgtaagcagccttcagttcctcataagaaggataggtaccatccggctttttgatcagggttgcatactctgtcgcaagaattccgcggttcatcggaaccagatgcggtgtaaaattcacggtaatctcttttcctgccgcatagccgagctgctcctcaatctccggtgtatgtctgtgtgttgtcacaccgtatgctttcatgctctcgttcacttcgcagaacaggttcggtgtctttgccccacgtcccgctccggaagtaccggattttgcatcaataatcaatgtatccggatcaatcagtccctcttttaccagcggatatgctgtcagaatggaacaggtcgtataacatcccggatttgcaatcagacgggtctgggtggtcaccttatcacggttaatctcacagagtccgtaaacggcttccttaataaactgtgggcttttatgctcaatcttataccatttttcataggtagcaacatctttgattcgaaaatccgcactcagatcaatgatctttaccttatttaaaatatcctcattcagcacacctgccagaaatccctgtggtgttgccgtgaaaatcacatccacgcgggaagcaagctcatccatgttatcacccagacagtctgcatcgacaagttcaaaaaagtttctgtaaatatctgcataattttcatcgatatagcttcttgatccaaaccattcgatctgtgcctctttatgattcaataaaatacgcaccagttctgctcctgcataaccggtcgctccgataattcctacctttaccatgtttcttaccttttctttcttttaaaaatatgattctatcctataatagtccatctttttccatccgtaaatagcaaatattcacaaatttatgtatatttatgcaattttatgtatattttttcacttgtgttttcatttggattgatgtatagtagggttagtcgtacgagagcgtacaattccatatagaaagaaaggatacaatcttatgaaagaaaaagttgttttagcttactccggcggactcgatactaccgctattatcccttggttaaaggagacttatggttatgaggttgtctgctgctgtatcaactgcggacagggcgaagaattagacggactggaagaaagagccaaattatccggcgcttctaaattatatatcgaagatatcacagatgagttctgtgacgattacatcgtaccttgtgtacaggctggtgctgtatatgagcacaaatacttattaggtactgccatggcacgtcctggtatcgcaaagaaactggtagagatcgccagaaaagaaaacgctgttgccatctgccacggtgctaccggaaaaggaaatgaccagatccgtttcgagcttggtatcaaagcacttgctccggatatcaaaatcattgctccttggcgtgatgacaagtggcagatggattcccgtgaggcagagatcgcatactgcaaagcacacggaatcgatcttccattcggcacagaccaaagctacagccgtgaccgtaacttatggcatatcagccatgaaggacttgagctggagaatcctgcaaacgagccaaattatgatcatcttctggttcttggtgtttcccctgagaaagctccggacgaaggcgaatatgtaaccatgacctttgaaaagggtgttccaaagactgtaaacggaaaggaaatgaaagtttccgatatcatccgtgaattaaaccgtctcggtggaaagcacggtgtcggcatcatcgatatcgtagaaaaccgtgtcgttggtatgaaatcccgtggtgtatatgagactcctggcggaacgatccttatggaagcacatgaccagctggaagaactggttctcgaccgcgataccttatctgcaaagaaagagatgggcaaccgtcttgccaatgttgtatacgaaggaaaatggttcacttctcttcgcgaagcaatccaggcatttgttacttctacccagaagtatgtcaccggtgaagtaaaattcaagctctacaaaggaaacatcatcaaagccggcacaacttctccatactctctctacagtgagtctctggcaagtttcacaaccggtgatcagtacgatcatcacgatgcagacggattcatcacactgttcggacttcctctgaaagttcgtgcaatgatgctgcagaatgtagataaaaaagatctggataaataaatccccagaataaaagaagcaccgcaagtcgcggtgcttcttttattttttcgattgttacccggattttattctgccggaaaccaggaagcaagctttactttgctgctgccatctgccttatagcagtaaactgcaagtttctcagtcacatcagctcccttgtacggaacatttgcttccacgaatacataatttccacaaaccgagtatttttcaatgccaagtttaaaggatgccacaaggtttttctttcccgtcctgttatctgtccggtagagtttcgtctgcatgtaccgatcctttcctgtcgtactataggtatacgttccatcattgacagcttccagtgaaacactcagataattttcatccttaacagcaaaggaacctctctgataactgtttccctccagatcataaaatgtcctgttctcgttttctttggtatagtaaatctttccctcactttgaaacagggaataccgataagcatctccgctatttgcaatctgtgctactttctttttatccgttccatccgtcttcatgctcattacggttccggtatcttccgaataattcatgccatcttcacttttacttttcagtgccagataataaatccgtccatctatcagctgtgggtcacgtccaagtgcaagcctctttgcggatttcccgtcttttgcgatccggtaaacatattcttttgttgcatcggttccatagtagcggtcccaggttgcataaatatatttcttatccacagataactgggaaaaaccattgcttccctttttgtttttccctattttgtaggaatatacctcactctttttgcctgttttggtgttgtatttcataatgcccatacgcacacccatcatttcaaacgcataatacaggttctttccatccgaaaccgtacatgacgtacccttcatcaacggttttgcctccgtctgcacgtccgtgtggatcggcatcacctcattatcatacgatacctgaccggtctgttccgttgtatctgcaaaagctgtaaccgaaggcatcaccgcacaccctgtaaaagtgatcgctcctgccagtgtcgaggcagccattgtttttttaaactgattccaagatttttgtctcatcatccaagacctccattcctatctgtctttcatttcgtctgcattgtactcccgctttttcaggaacgcaagctgtatctgaaaaagataagaatttcataagaatcgtaacatcttcttaaaatattaagcccaaagtcccattgcccgtgcgatcatggcaagaagaaacaggtgtgccggatagaatacataaaagaaatatttcatctgttttcccctggttccattgtaaaaataaaccggtatcatatccagaaatgctgccgcttcaatgatacttgccaacagggttaaaaccagaacaccgatgcccattcccttcactttcttcggataaaacatgtaaattgcaaaaattgtcacaattcccgacaaatcataatccgtacaaaaaagaagtgccagaaatcccccggccgcaactgtcacaatggtaagaatcacgcggatggctgcggccttatttccgtaaacatcctccacaaacttctgctttatcccttcaacaccccagatcaccaaaagtccgaacagcaaagtaaaaaagacattgttgctggaaaaatcccacattctcctgctgaatgccaggtcaaacggaacctcggaaatcagtgcaaacaaaaaaagccttcccgcatattttgccctgctgcgtgtatggtaaaatccttctaccagaagaaaacagtaaatcggaaacgccagtcttccaatgatgcgcatcaaaaatgcgggattttccagtcccggaatctgttctaaaataacggccgatgtgtgatcaatgagcatggaaattacagcaatcagctttaaccaatagccggaaatccccggttgttttgtttccataaccattctcctttttgtcattattttgcaagaagctgttgaatttcttctttatatggaggaatcgtcttttttgtctccccctctgcacaaagccatggcgtttccaaaatctttggaatttccataaaacgtggatcatgaaccagacgatgcaacgtctcaaatccaatggttccctgcccgatattggcatgacggtctttgtgtgccccaagtggatttaaactgtcattgatatgaaagaccgcaatctggtcgagtccgatcacctgatcaaaatgtttaaaaacaccatcgtaatcatgcaccagatcatacccggcatcgtttacatgacaggtatcaaaacagactctcaaccgctcctttttgttcactccatcatagattgccttaatttcttcaaaggttcttccaatctcactgccctttcctgccatcgtttccagagcaataaatacctcatcctcgttctcatccagcaccatattcagcccgcggacagtctgtgcaattccggcctctgcacccgcatccagcgcggaccccggatgtaacaccaggatatgacttcgcatagcagccgtgcgccggatctccttttccagaaactgtacagccagttcaaatgtctccggctttacggtatttgccagattgatgatataaggcgcatgaaccacaatctcccggattccggcctgttttgcataggcccatcctgcctcaatattcagatctttgatttcttttctgcgggtattctgtggtgcacccgtatagagcatcaacacatttgctccgtagctttctgtctcctttacggacgctaaaaacatctcttttcctgccattcccacatgggaaccgattttaatttcttccatcttatgatatatcctctgctctgagcttttttttctgctgatgtgcggtaattgcaatcagcactttttgtggtataaatcttccacaggttgtcacggcttttagcgtcaacgtaggaacaatcactactttgcgccttttcatctgctttaaagcatatctaacacaatattccggagtaattcctgccagtgcaaactctacatttgcaacggcattaaattctgtattcaccggtccgggacataatgcccccacatacacgcggctgcctctctgtttcagttcgagtgccacggcacgtgtcaggctggctatataagctttggtcgcataataggtggccatataaggccctgccggaagaagtcccgccgaggaagccacatttaagatgtaaccgccctcctgcttctccatacggcgaagcatcagcttcataagaagatgcatagccttaacatttacatcaatcatctgcatttccttatctgcgtccgtctccagaaagctgccacagtcaccgaatcccgcatcgttaatcaatatcccgactggcagcttctcgatctgctgcatcaggtgataacaggcttctttttgtgacaaatctgccgatatcacaatgctctcggttcccttcttttgtaattcctgcgccagttcctgtagccggtcctctctgcgtgcaaccagcaccagacgatacccctctgctgcaagctgccgtgcaaacgccataccgattccggagcttgcccctgtgatcactgcatatgatttcttcattttgcctcctccttaatgtatcacgagtatagcacagtgacacatgaaagtccaataaaaatcagggcttacagaggttctccctccataagccccgatagcagataatgagtaatttattgatattttcttactttacagttaccttaatggttacgattttctttgttccatcttttaaggtaacggttaccgttacttttccggttcccttcttctttcctgtaatctttccgtttttatttacggaaaccacagacttcttggaagacttataggtaatctttgcaacgttttccatattcagtttcttgctccactggaatacggttgtcttttttacaccaatatttactgtgctctttgcaggtgcgatagtctttgcaatctgctttgcagctgccttaacttctgcctgtgtctttaagacgtatacgccacggtctttgaaagtcagtgatacggaaccgtcctttgtaaccttatacgatttcttattcacaagaaccagttctccggtcttttcgtctttcttcatgactgcaagttttgcacctgctttgacgtctgctgcatttacctgtacggtgtatgcagtggttccatctgctttcttgacttcctgtgtgatggttacgtctttcgttccggcagcttctgttacagcttggatcacatcggcatttacggttgctttcacgcctgttttgcttgtctttccagttgctgctactgctgcctctgcggttacttttccgcttgcatcctttgtgactgttacggttgcagtcgttccttccggaagtttttctgcaggaataacgatcgttgttgtatcctttttggtatcttcagaaggcttggtttcggttgttgtgcttccgctggaagaacttcctccggtagaacctccgttggtacttgaattattttccagaacaacggtgccaccatctgttgccgctggaatgatcactttaatctttccgttacttaccgtatatgtttttccagaatacagatccttcaaaacagttccattattttcactaactggaatttctacagtctgtgcaacatctttgatatttaaaccaacatataattttgttcctttgtagcttctggatacaatatcataaccattttcatcagatgctaaaattgtttttctgtctcctcttgcaaatacatctgtatatgcattacggatagaaagcatcttcttataatgctgataggtcttattgtcattacttactattgaccagtcaaaatcataacgatttgtctgatatggataattatttaatcctgtctgtccgatttcctcaccataataaatcactggctgtccctttgcagtaatttgtaagcttgctgcaaccatagacgctgcagttgctgcatcttctttcattccaccatccaaaagtttctgcttaaatccatcttcatcatgacttccaagaaactgtcctgtcatgtaagtattatttaacgcactgtttctggatgccaggaaattttctacagaagaaatatttccttttacaaaattagctgcctgatcattaaaatcaaaatccagatccgaatccatttctccggttcctaaagtattgccattagaagcatagcctcctcctgcatactctccaatcatcttaaaatctgaatctacttccgtcagagcattttttaattctgcccaagtatcgttttccacatgtttaactgtatcaacacggaaatagtcgatgccaaaatcctttacccactgggtctgccactttacaagctgcgcgctgaccgcagggtcttctgttttaaaatccggcaaatcacttaaggaatccttctggtcacttccggatacaacatcgtcctcactccggatcatatcgccaaactttgtatcatatccggcatggttaaccacaatatctaccataatacgaataccgcggttatgtgcctgatcgatcaatgtctggaattcttcttttgttccaagcgttgggttcagttttgtaaaatcgcttgcccaatatccatggtatgcagcattgtacggaacatcttcttttcccgtgtcagttaccgtaactcccggaatattttctacaataggagtaatccagattgtattaattcccaaatcctctaaatagtctaacttttgtgtaattcctgcgaaatcaccaccatgatacagacctgcattatcctttccgtaagtctgtgctccgcttgctgtattgtttgattcatttccatcaaagaagcggtccgttaccataaaataaataacggattcatcccaatcaaaatctttcgcatttttcctggttcgagcagtcacttcaacctgtacacttgttgaatactcatttccatactgatctgttacaacaattggcaatgttttcttacctagcgaagtatctgttgtggctgatattgttaccgcctgcaaatccggtacaattgccaatgtactgcttccacctaaagaagaaacatcaatacttgcagatgcaacttccatcttctttgtctcattctttgtctcattctcatcctgatttacagtaaattttacgacattattctcattataattaaatgacgcattcattacctctgcctgaatagtggcattcagtttataatactcaatataagaataatcgtttccctctttttgttcctgcttatcgttatatttgtctaaaatatattcatccccgactttataacgataatatgtacgtccgctttccagtttgttatagttatactcaaaacgcttattcccagcattataagtcatttcatattccgtaccattgatatctacagataccttcatatctgcaagcttatcatcaattaaggcgttatcatcccgataataaaatgcaatcttattttcttttggaaggacttcatatcccttattgtatggagcactcaatacaggttcttccccttttttcatgcttgcgcatacaacgttctgttcttgtgggaatgcaatggagtgatctcctccatccttgatccagtcagagccggaaggatccagcacaaccacgaaatcaaccttcgtacaagttgatttaacaggaactttgatcttccattttcctgctcctgcagattcaaatggtttgcgtactttctcttcaataccagtagtccatgaataaaactccggagtggttgtcaaagtatcattttcgtattccagacacagataccttggatctgctttggtaatgaccggtttttctgtaaccggttttttcccaaacacataccataaggttatttctgatttttcctcatcaataacataatactgattactatcctgtccatcccatgaccccgccgttggtcttccaataatcccaagcgaattaaacgaaactaaaaccgtcccctgtaaccaggtcacattgttcgccgagtcttcttctgtttcgtttaagggaacaaactcttttccactaccatttttatcatatatatatacatcggatactccagctttcatttcaaaatctggagaatacatattaattgttactttatactgtttttccacaacattaacaataacatctgacgtttcattaccagcagttgcggttaactcaacagttgttattccactgccttttttcacattgattgtttcatctgtcaatgtaaccttatcctttaaaggagaatcttttaatgtatatgaaactttttcatcactgcttgttccatcactgctatataattttaatgttttaggaagttctaagtccttacctgctacagcttccagattttttgattcaagccccggaactactaatctactattgccgtctgtcacggcatcatttgcagggtctttgaaccagttcgtcccaattttatacttatacgcatatattccagggttttgtttttgaactgttacggtaaatttatccccttccttttccattgataatccattatcccagtccgttcctccgacagttcccataagccgaacatcttttgcatctttatattcgcctgttgcatccaaattaaatgtaacggtacgatcctcatttacaactggactctgtacttttataaccggttttactggtgcgctgcttgtagattccttccacccttccggtttctgatcactggttaccgttttccctttttcgccagtaatccacttttctactttagaatcatttgccgtaaattcaatattatctgtttgttttccttttccattattgttaaatatacaatggaatttctcatctgaatttgtgctaattgtaaagctataccagccgtcatttgctgaatcttgttctacttcagctcctggccagccatttgcataaccatagccatcaatatccttccagctattatctccttcggctatttgcgtataaacagcctcccaatttgtagaattttcgaagtgcataataatttgtctgctgccttctgcttttgcctgtaccgccccaatcggcaaaagtgtcagaaccatcgcaattgcaagtaaaaaacttacaaaacggttcttttttgaaaaccttctctctcccattttttcctccttttgaatgatttttcggtttttttcgtctttcattatacttgaaaatgtatacgaaataaagttggaaaaactgccaaaaaacctctggaaattttgtctaaaaattccagaggtttttttaacttattatacacattgtatattcatgtttattgctgcagtatcagctcgcgccctgtcacatccagttccatgctctgtggatcttttttgtactgctccagcacggtcagccacagcatatgtacttcgtagaccagcatctgatccgtctccactgcatacggagctaaaacatccacatcgaagaagcggatgccaagcggtggcagaaaaatcaaattgcaggacttctttttctctccgcaggtgtagatctgctcataagaaaccaatagaaattctttttcctgatctatacagtgataggaaacaaaacactcatcaatcacccatgtctctccctcttcggtttccactggtttcttcgccggatcgttgtactcggtagtctggcactgaatatcccagtgcagttttccttcccgcgttttttgtatcatatcggtcactttacggaccagctgttcttcctttttcttcattcttatgcctgctctctcacataaatctgtgacagattgttcatgattgccgctgcgacatccggtttattcatggaataaatatgaatgtggttgactccattggcaatcagatcaatgatctgctcggttgcataggcaattccagcctgtttcatggctgcaggattatccccaaaccgatccacaatactcaaaaatttggctggaacgaggtttcctgtcagggaaattgtccgctttacctgtgcaacattggtcactggcatgattcctgctgtgaccggcacatcaatcccctttgcaagtgccttgtataaaaagcggtagtaaatattattgtcgaaaaacatctgtgtggtcagatactcacagcctgcatccactttctctttcagatgagctaagtcttcatccatgttggaagcctccggatgtccctccggataacatgcaccaccgatgcagaaatcaccggcttccctgatctcacggatgagctcaatcgcatggtgatactgatccggaagtgggaaatctgtattggtcgggatatctccgcggagtgcgagaatattttcaattccacgctctttgagttcgctgattacggtatgtaccttctccctagtggaagaaacacaggtcagatgtgcaatcgccggtactccgtatgaattgatcgcatctgcgatctccaccgtataatcgcttgttccgccagtcgcaccatacgtacagctgatatacgccggttttaattttgcgatttctgctgcaattgccttataattctgcagctgtgctccctgttttggcgggaaaatctcacatgagatggtcacctcattcttctttaaaatttccgatactttcattttatttttgtctcctgttgttaaaattttcgaagctcatctgtgccgtcatccacagtattgacaatacgcttaatctgtacaaaataggaataattatcatttacatgaacttcacagcgatctccggctttatgcccgaaaatagctgcgccaagcggtgattcccggctgatcagatttttcagtgaattgcttctgactgttgtcaccagtttatatgtttccgtcacatcgtcctcttcaaaataaatatcgacggtattgttcattccaacttcatcttccggagagtcttcagaaacaatcactgctgtcttgatcattttttccagataacggatacggctttcattttcgtttttaaactttttggctgccttatattcaaaattttcgctcaggtctccctgggcacgtgcttcttttacatcttcgagggcttccttccgaaccaccagcttccggtgctcgatctctgcctccattttttcaatatccttttttgttaattcatcatgcatattctgcctccagatattaatctaacattttacatacaaaatcgcaagtcctatcttcctgcgtacagacactgatcagatatctgtcttttatggttcccagcggaatttctttatagtatttcccatgcagggtatccacggtatgaaatgcctttgtcattccttccccggtcattttcacatagctttcttttcttgtccagaaccggagcagttcctgcggatcatccccggcatctttccaccagttccattccgcttccgttaatatccgctttgccagcttctgattgcgggcttcctgccaaaaacggttctgctgttccacatccacacctaccgggacatccgacagtgctcccactgcgtatgctcccgcatggcttaaattaaagaaaaccccatcttttttcagacgcggctttccatgtccttccagcccaaaagattcttcggcataagggatctgttcttccagcagcatatgccggagcagaagacccgccgcaatggatctgctgcggttttcttttccttttattgttcttactttctccctgcggctctccacaagaagagacagcgaattctcctcttcttccggacgctggaaacagaccggccggatatatagtttaagcatgtaatgctcctaaaaatccacacgccagcacaaaaatgccaagaatgatccggtaatatccaaacaccttgaaatcgtgttttttaatatatcccatcagaaaacggataacaatcagggaaaccgcaaatgcaatgacacatcccacaaacaggataacgacctcggatgtcgaaaaatccagtccaaacttcgcaatctttaagatactggcaccaaacataaccggaatggcaaggaaaaacgtatactctgccgcaacggttctggacactccgatcaaaagtgctccgacaatcgttgcaccagaccgggaggttcccggaaagattgcagcgatcagctgaaacagaccgataaaaagtgccgtgtcgtaaccgatatctgcaagcgtatggattctggaatttttccctttatgggaattctcaatcagaataaacgcaataccaaacagaatcagcatgacagataccatctggtaattgtaaaaatgttcctccacccagtcatccgcaagaacaccgatcaccgctgccggaatggtagaaaccagaatatgaaaccacaatttaaaaatatctgttttgatccatgcgcccggtccccgttttgtcaaaggtgctacattgttttttcttccaaacggccagatctggctccagaataaaacaacgaccgcaagaatcgctcccagctggatcacgacctcgaacatgctgtaaaattcatcacttactttcagtttgaccacttcattcagcagaatcagatgcccggtactgctgatgggaagccactcggtcacgccttccacaattccaaataatacggcttttaatacctctatcagttctatcattttttccctttctatcgctcgcttccatcaaaatccatctggttcatatattcctgtgaaaaatccggatgggtagacagttctatataatgcatacttttctgaattatggaaagctgctctcttgctttttttgaaatagctgctgatactgcgccttctccggctgcatttccaactgaatccgtaatcggaagtaattcctttgggatcagtccaatcgccgctgccgattcttttttcagatagctgccaaaaccacctgcgagaataacatgatccagctgttcataagaagtatgactgtcctgtagcagaatccgcattccggctgcaaatgctgcctttgcaagctgtagtccccggatatcttcctgcgtcacacataccttatgcgccagccagacacatggctgccctgcatattctcccaggtatttccggtaagcaactgagaccgactgtttctgctttaacaatcctgtgtgatcgagaagccccatctctaaaattaccgcaagtgcatcaatcagaccggaaccgcaaataccacacgcctcctcgtctccgattacctgcacccggattcttcgctggtcgagccagacatgggatatcgctccgaccgctgccggcattcccatcgccatctccgcaccttcaaatgcagatccgaccgccgtggcacagcaataaatctgatcttcgtttccgaccgccatctctccgttcgttccaatatccagaagaagcactttctctttggggttcttctgcatcactgccaaaagatccgaagtaatatctcctccgacaaatcctgcaaccgccggtgctatgtataccgatctgcaatccgtaagtcccagctgctctccggtatactcttttccaaagaattcctgcggcataaacggcgtcaccccgatggaaacaggcgaaattcccgcaaacagatgacacattaccgtatttcccaccacggcaagacgatgaatctgttcccctctccctgtttttttctgcagtgtccgaagcatctgtgcgatctgaaaaataatctgttcttttaatatttccagttttcctgcttcggctgcctgaatacgtgaaagcacatctgcaccaaaacttctctgtgcgcttggttcactgaccgttgccagcttttctcctgtctttccatcgatcagatggcagaccaccgtcgtcgtgccgatatcgcatgccgcatccagcccttctccgtcatccgccggataatgtgtgaccgttccgttttctgcaattttagacttctgtgcgcgaagctgcactttcggaattgtgatgcgcatcccatcggttacttttgtcatacaggcaagtacttctcccatatgttccacctctacggtacactttccgcatcttcccctgccgccgcatggcgctgtcagcacatggattccatgttcctgaagtgtctctaaaatggtttttccttcttctgcatcaagtttatgtgattttttttcaattattacttctatctgcataggctttcttatactctaaaagcagcaaaccggatcagattcgattcgctgctttttacaggctctgttacttgtttcgattacttgttcagagaagactcacggtaaatgatatcatctcttcccggtccgttggaaaccatggtgatcggatagccaatctgtccctcgataaactcaatgtacttgcggcagttctccggaagttcttcatacttcttgataccgcggatgtcacatttccatcccggaagctttgtaagtaccggctttgccttctctaagagactggtcacagggaattcagttgtcacttccccattgatctcgtatccggtacataccggaatctcatcgagatatcctaatacatcaagtacggtaaatgccacatcggttgttccctgcagacggcagccatatttgctggccacacagtcgaaccatcccattcttctcggacgtccggtggttgcaccgaactctcctccatctccaccacggcggcggagttcatctgcctcatctccgaaaatctcacttacaaatgcaccggcacctacagcagaagaatatgccttacatacggtaatgatctgtttgatctcatatggcggaactcctgccccgattgcaccgtatgcagccagtgtggaagatgaggtaaccattggataaattccgtgatccggatcttttaatgttccaagctgtccttctaagagaaccgtctttccttctttgagtgccttgtccaggaataaggaaacatcgcatacatatggagctaccatatcgcggtactcatgtaatgtatttaataattcatcagtatcaatcagtggcttgtgatacagatgctctaagattacattcttttgctctgcaacacggactaccttttcctttaacagctcatcgtcgaaaagctcacttacctgaaaaccgatctttgcgtatttatctgaataaaacggagcaataccagattttgtcgatccgaaagattttcctcccagacgctcctcctcgtactgatcaaacagtatgtgatacggcatcacaatctgtgcacggttggacacaagaatctttggcatcggaacgttgcggtctgtgatggacttaatctctttgaaaagacgtggaatatcaagtgccacaccatttccaatcacactcgttgtatgactgtaaaatactccggacggaagtgtatgtaatgcaaactttccgtagtcatttacgattgtgtgtcctgcgttcgcacctccctgaaaacgtacaataatatcggcctgctttgcaagcatgtccgtaatcttgcctttgccttcgtcgccccagttagcgccaacaactgctttaaccatcttttattcctcctgtatgtctgctttaactttccgtgcgcacttttttacgcacgaaaacggacaggtgtaaaaacccatccgtttttactttatgattataaaggattcccactgaaattacaagtcataaactttaatttgttagcatatgaaagtttccaaaagctgcctgctacgcttcaatctttttggaacatgcgatcgcaagtgctcccggtccgatatgacaggcaatggataatgacagtggctgcatgacgatctcattgtccggaaagacagcctgcacttcttctttgaatgcctcagcggctgcagtgtcaaatgtataggccagttccagattcatcttctccccatccgggctgtgaaaacgcttctcaaaatcgtttttcatagcctcggtcatgattgtttttgcctgttttaccgtacgtgcctttgcaaatgcatccagcttttctccttggatctgcaataccggcttcagtttcagtaaggttcccagtgctgctgcagccggtgtaatacgtccgccctttttcagatactccagtgtgtcaaccataatgtatatagaggattcaaatttttccttttccagaatctctttgatttcttctgcaccttttccctgctctgccagcattttggcatcgagcacggactgccgcatcgttacggagatacgctggttattgactacctgtacttttccgtcatagtcctgggaaagcatatatgccgtctcacaggaactgcttaagcccgaagacatcggtatgtatacaatttcatcgtattctttcaaaagttcatcccatttatcggtcacatctccaaccagcggcatggaggttttgatctctccgccctctttgagtttctgataaaactgctcctgtgtcaggtcaatatcttcataaaacatctgtccgttaatataaaaaggcatcggcattaccactacgccaagctcttttgcctcgctctgtgtaataccactgttactgtccgttacaacaatcactcgactcattttttccactcctgattttcgttgtttttccaaacgattcctttggctttgaaccgttacgcttttactatcatatcataggacaaaaaaaatgaaaagccttgattttcaaggcttttcatatctatttcacatagtttttgatactatgtttactttataacgcaacggttatgtccgattacatcattccgcccattcccggagcaccgccggctggcattgcaggagtatcttccttaatatttgcgacagcagactctgtggtgagtaatgtagaagcaacggatgttgcattctgcagggcacttcttgtaaccttaaccggatcaagaattccggattctaccatgtcaacatactcttcggtagctgcattgaaaccggttcccggtgcagattcctttaccttattgatgataacagcaccttcaagacctgcgtttgcagcgatgtaatacaaaggagcttccagtgcctttaagataaccttcgcaccggtcttttcatctccctctaaggaatcagcaagctctgcaaccttcttggatgcatggatgtatgcagatccaccacctgcgataataccttcctcgactgctgcacgggtagcatttaatgcatcttccatacgaagctttgcttccttcatctcggtctctgttgcagcaccgacacggatgactgcgacaccacctgccatctttgcaagtctttcctgtaacttttctttatcaaactcagaagtagtctcctcgatctgtccacggatctgtttgatacgtccctgaatcttatccttgtctccggcaccatccacgataacggtgttctctttctgaaccttaacggattttgcacgtccaagcatatccatggtggtatctttcagttctaatccaagatcggagctgatcacctgaccgccggtaaggattgcgatatcctcaagcatggcctttcttctgtcaccatatccaggagccttgacagctactacgttgaatgtaccacgcagtttgtttacgatcaatgtggtgagtgcttctccctctatatcctcagcgatgatcagaagtcttgcaccggactgtacgatctgctcaagcagtggcaggatatcctggatattggaaatcttcttgtctgtgatcaagatgtatggatcatcgagatttgcttccatcttatccatatctgtgcacatataagcagataagtaacctctgtcaaactgcataccttctaccaggtcaagctctgtctgcatggttttggactcttcgattgtgatgacaccatcgtttgtaaccttctccatagcgtctgctaccagattaccaacttcttcatcaccggcagaaattgctgcaacttttgcgatctgctctttgcccttaaccttctggctcatttcctttaatgcctcaacagcggcatctgttgccttcttcataccacgtcttaacacgatcggatttgctcctgcttccaggttcttcataccttcctgaaccatagcctgtgttaaaacagtagcggtagttgtaccatcaccggctacatcattggtcttggttgcaacttcttttacaagctgtgcacccatgttctcaaatgcatcctcaagttccacttcttttgcgattgttacaccatcgtttgtgatcagtggagcaccaaaggatttatccagtacaacgttacgtcctttcggtcctaatgttacacgaacggtatttgctaatttatcgacacctgcaccaagtgctgctctggcgtctgaaccatatttaatctcttttgccatgactacaataacctctcttctttaaaattcagcctataatttccaatttataaaaactactcaacaattgcaagaatatcattctgtcttacgataatgtactcttccccatcaagttttacttctgtccctgcatatttggaatagattactttctggccttcttttacctgcataacgatttcttttccgtctactactccgccaggacctacagcgattacttccgcttcctgtggcttctcctgtgctgctcccggtaatacgataccggatgcggtagtctcttctgcttctaactgttttaatactactctgtctgttaatggcactaatttcattacaaatagcctccttttcgtctttactagcactcactttattcgagtgctaactctttctgtaaataaaatatcactgttgtttttcattgtcaacagtgatactcaatttttatattttttttagattcccggaattcactttctttgtatgctttattatttcatcgtactgtgcatacattttttgtgtttcgttttcaagtgtataataatgaaaaatatacggcacaagaagcacaaggagcagcatggtaaaaccatagagtgtcatgatccccgtcaaaagcggagcaaacaacgacagtaccgttatcacagcaaatgtaaccgttacaatcagatgaatcagacgttcgtgctggaaaaatccaatctgaaccagatgttcttccaaaatacattcccattcctcatatgttttctcttcttcgtctgccagaagccggtccacacgtttccggtactctgtaattctttttttcatttctgcctcgattcagactctatattaatccatagtgttccattgcatgctttattccatcatcgtagatatccgttgtcacaaattcagccgcctcttttgccggaggtgttccatttcccatggcaattccatgtcccacaaaagaaagcatatccagatcattgacactgtcaccaatcgcataggtatcctcatttttaatacccatatgcctgcagagccagtctatcccggtcgctttcgatgttcctttcggaacaaattccacaacatgtccctcgtgttcgagacagtcaaaatccgcatccagctccttgcgcacccgtttataatcggttgttggcaggatatcccctgacattttattaatgcggatctccggtgaataaccttttaatattttagcagatgctcccattgcctcaaaaagatacagcacatagggatccgtcctgaaattttctttatctatccagtggcagtccgggccttccagcacaatcggcatccggcattcttccatgacccggacaattttttctgtcagttccggggaaagaatattttcatacagaacctttccatccatctccacatggtttccgcatgctgcaacaatcccatcaaagccgatcccaagcagccgcttatcgttaatattgctgcgggatcttccactgcacagaaatgtcttatgtccgtttttctgcaattgtctgatggttggaattgtactctccggaatctgcattttttcatcccacagtgttccgtctatatcaaaaaatatgtatgccatttttactcttgtatgataattaggaagttaattatcacacgtttcctttcttttaatatcgtggttcaatacaattcagat

SEQ ID NO: 1001 - DNA, 11192 bp, Unknown
  gut microbiota DNA sequence
aaaaaagtgctgttaagctagagaagctaaatggcattgaaacatgtggtgcctgacacaataaacagtaagaaaacattatcaagtacgcagttttaactgaccaggtaagtttcatttactaaaccacgtgtgagattgttggacataaacagcgaatgcctgattttaaggaatttatgagggttcgctgtttgtggtaaatacatttttgacgttatttgcccataacacagaagtgataaaactgctgattgtatgattctggaattaaaggtagatcatacaccggatgaggctattgcacaaataaaagataaaaagtatgcactcaggtttgcaccaaagattgccgggaacagagagtatacaggaagaatattggcagttggtatttttgtagtatgaaaaaggtacgggagtgtacttgcgtttccaatcgttttctgctacagtaggcgtaaacagaacaggtgattagcaaaggagctttctcggataagaggaagctcttcttttatataacgaaaaaagagtcgaaaaggaggcgaatctatggatgcagaaatgatcatactctgcgacggtgtggtaatcccacagagcaaaaaagaaattgacgggggtgtcgcaattgcaggaggacatatcctacggatcggggcgcgtgcggaattgtcagattatctgggagtggatacggaggtggtggaataccataattccaccctgtttacatttgaccgtacaaatacagagggagatgccaatattgcagttgtggcaggaaacatgaaacaccatggacatggagatctcaaaaagaccgtggggcttcgctttttgatgtatcacggagatgtggtaattcagaaggaattatgaaaagtataaacaataagtgaaatatctgccggaaaccttgacgcaggggctttcccgacttactcttgtaattaagagatgtgtggatacacatagacagggaggaaaagaccgtgggtaaggtaataggaattgatttgggaacgacaaacagctgtgtcgctgttttggaaaatgatcagccggttgtgatcacaaacgcggaaggctcgcggaccacaccatcggttgtggcatttaccaaaaacggagagcgtctggtgggagatgctgccagacgacaggcagctgtcaatgtagaccggacatttttctccattaagcgtgagatgggaagtgcgttccgggcaaaaatagatggcaaacagtatacgccgcaggagatttccgcgatgatcctgcgcaaactcaaaaaagatgcggaggaatatctgggggaaacagtttcggatgcggtgattaccgtaccggcatatttcagtgattcccagcgacaggcgacaaaggatgccggaaaaattgccggattaaatgtccttcggattatcaacgagccgacatctgcggcactggcatacggactggatcacggggagccacagaaaattctggtgtatgatctcggtggcggcacatttgacgtatcggttattgaaatcggggacaacctcatcgaagtacttgccaccgcgggagacaatcacctcggtggggatgatttcgatgcgcgcatcacggagtatctggtatcggaattccagcgcacggagcgtgtggatctgcggaaagatgcgacggctatgcagcgtgtgcgtgaggaggcggaaaaggccaaaaaggtattgtcctcctcttccacaacgggcatcaacctgccgtttattgcgaccgtaaagggtgagccaaagcatatggaaatgactctgacgcgtgcaaaatttgaggaactgacgatggatctcattgagcgcacggcaggtccggtgcagcaggcactttcggatgcgggaattacggcagcggatctgggcatggtacttctggtaggtggttctacccgtgtaccggcggtattcgaggaagtgcgcagactgacaggaaaagaaccttcacgcaatttaaacccggatgaatgtgtggcactgggagcggctgtgcagggtggaaaacttggcggtgcgctgatggcaggatcacaggcggcagagattattctgatggatgtcacaccactttcgctttccattgagacggtaggaggtgtttcgacgaagctgattgaccggaataccacgattccgacacggttcagtaaagtgtttacaactgccggaaatttccagacatctgtggatatcaaagtactgcagggcgagcgtcagtttgcaagagacaacaagctgcttgggcggttccagctgcggggcattaaaccggcgccggcgggtgtgccgcagatagaggtaacgtttgatattgatgcgaacggtattgtacaggtttccgcaaaggatctgggaaccggacggcatcaggagatcacaatcacggcaagttccaatttgtcagacgcagagattgaccgcgcgataagagaagccgcggaatatgaagcaacagacgggcagagaaaggcttatattgatgcgcgaagcgaggccgacacgttgatccgtcaggtggaagtagcttataaagagaagaaaaagaccatcgacagtggtgcgcgtcaccagatcaagagcagcctttcttatgtaaagaaactggtcagccgtacaaagccgggaaatgtgtccgaagagcaggcggctgagctgcagcgggcagccgcggaactgcgcagtgctgcaggagtgcttggagtataaaaggtttccatcataaagaaagctgttttgatataaaaaggcacagatacgttttctgtcaaaaggcagagaaccgtatccgtgccttttatttatttgcactaacttttattctcttttgttttgcacttgcgtttgcttttgaactgtgctatattaaggctgacagataaaaacaaacgtaaataaaaatggaggtattttattatgaagtttttcgtggatacagcaaatgtagaggatattaagaaagcaaatgatatgggggttatctgtggagttaccacaaacccatccctgatcgcaaaagagggaagagattttacagaagtcatcaaagaaattacatccatcgttgacggaccgatcagcggcgaggtaaaggcaacaacggtagatgcagagggcatgatcaaagagggacgtgagattgcagccatccatccaaacatggttgtaaagatccctatgaccgtagagggacttaaagccgtaaaggtactttcttccgagggcatcaagacaaacgttaccctgattttcagcgcaaatcaggcaatccttgcagcaaacgcaggagctacttatgtatccccattccttggcagattagatgacatcagccagccgggtatcgaactgatccgccagatcgcagagatctttgatatttacggatatgacacagagatcattgcagcatccatccgtaacccgatccatgtaacagactgcgcacttgcaggtgccgatattgcgaccatcccttacaaggtaatcgagcagatgacaaagcatccgcttaccgatcagggaatcgaaaaattccaggcagactacaaggcagtttttggggagtaatatttcagattttcgaagaaaatctgaaatgtagcgtcagcccattgccgcaggcaattttcatgggctgatgttcacgcatacggaggaacgaacatgaacaaacaggagcttcagctgaaggcaaatgaagtccgcaaaggcattgtgactgccgtccatgcagccaaagccggacatccgggcggatcgctttccgcagcagatatttttacttatttatattttgaagaattaaatattgatccaaaagatccgaagaaaccggacagagatcgttttgtactgtccaaaggccatactgcaccgggactgtattccgcactggcactgcgcggctatttcccggtcgaggatttaaagacactgcgtcacctcggttcgtatctgcagggacatccggatatgaagcacattccgggtgtggatatgtcgagcggttccttaggacagggaatttccgcagcagtcggcatggcattgtccgccaaactttccggggatgattaccgcgtgtatacactactcggagatggagagattcaggaaggacaggtatgggaagctgccatgtttgccggattccgcaaactggataacctcgttgtgatcgtggataacaacggactgcagatcgacggaccggtggatcaggtatgctctccgtacccgatcaacgagaaattcaaagcattcaatttccatgtggttgaccttgcagacggcaatgacatggatcagatcgccgctgcatttgcagaggcaagaaacaccaagggacagccgaccgcaatcattgcgcatacggtcaaaggaaagggtgtctctttcatggaaaatcaggtaggatggcacggaaaagcgccaaacgatgaagaatatgcgatcgcaatggaagacctgaagaaagaaggtgaagcattatgtcagaagtaacaaaaatcgcaacccgtgtcagctacggaaacgctctcgtagagctggcaaaggagcatgatgatgtatatgttttagacgcagatcttgcagcggcaacacagactgcaatcttcaaaaaggaatttccggagcgccacattgactgtggtatcgcagaatgtaacatgattggcattgcagcaggccttgccgcaaccggtaaagttccgtttgcaagttcgtttgccatgtttgcagcaggacgtgcattcgagcaggtgcgaaactcggtcggttatccgcacctgaatgtaaaaatcggtgcaacccatgccggaatttccgtcggtgaagacggtgcaacgcaccagtgtaatgaggatattgcgctcatgcgcaccatcccgggcatggtcatcttaaatccgagtgatgatatcgaggcaaaagctgcagtaaaagccgcatatgaacacgaaggcccggtttacatgcgttttggccgtctggcagttccgatcatcaatgaccgtccggattacaaatttgaaatcggcaaaggtgtgaccttgcgggaaggcaaagatgtggcaatcattgcgaccggtttatgtgtgtccgagtcgcttgcagccgcagaaaaacttgcagcagacggcattgatgcaaaagtgatcaacatccatacgatcaagccgctcgatgaggatcttgtcgtcgccgcagcaaaagaatgcgggaaagtagtaaccgttgaggaacactccgtcatcggaggcctcggttccgctgtatgtgagacactttcgagaaaggcaccgacaccggtaaagaccatcggtgtacaggactgcttcggcgaatccggtccggcagtggcactgcttgagaagtatggcctgaatgcagaaggcatttatgcttccgtaaaagagtttgtttagagaatgcgttttccgtctgcaaactccattttaactttgttagtcattgttttccactggaaacggccattttccataatcaggtagccgtgccagcttccagcttttggaatagcaacagatccgggattcatgcaggtataggtgtcgtgtgggacgcatgccgggacgtgggtatgtccgtgcagcagaatgtccccgcgatgcagtggaggcaggttctgttcattatacgtatggccgtgggtggcataaatcagcgtatcaccgtctgcaatggcgcagtaatctgccataatgggaaattggagtaccatctggtcgacttcggcatcgcagttgccccggacacagagaatatgttgttttttggcgttgagcagttcaatcacctgttttggatcatattcttccggcaggtcattgcgcggaccgtggtataaaagatcgccaaggagcagcagacggtcggcctgttcccgattgtatgcatttaacagctgtctgcagtagtatgctgagccgtggatatcagatgctatcatccatttcatgtttatcaatgttcatcccatccagttagactggatgggatgtttcctttctcccagatacggccggggtattcaccttattgttttataatggattataatgaacattttcttctggctcaatacctttttgaaaaaggtttcttaattttttataaatcccttagttctggccgatgccgttttctaaaatttttttcagttctgcctgtgcgctttctttcaggttcgacgggtaaccgatgtgaatgccatataaaatcgtgtcttcggtcctgtaagcgtctatggaatcattgaaatcatcaccctgagaggtggtcgtaatcagttgccaggtatcgccggaagccgtggtgtacagttcgttggtggatacggcatccggcgtttcctcatacgatggatagtccatatcgatataggaaccgatgttggatgattctgtatagagatcggcggcggccgtcacattgatctgtccgtctgcacaactgtatagttcggaaagcgagatgtagcagatgtttccttttttatccgcggttgcgttgacggaaatgctgtctgctttctgtgggagggcaaatgaccgcagatttttgtatccgatataagcgagtgcatctttttcggaagaaaatgatttgctgattgatcccggcgaccagctgttggtcggcagataactttcatattgcttaataatattttgtttttcgttttgaatcgtcccggtaatttccgcatccggaacattgttgagctgctccgtcaggcggtatccctggtttccggacagtctggaaaagacgggatcgcttaagatgccggtttttgcaagcagtgtctgaaactctgtggcagaactgcggaagtagttacaggtgccaagaaattcattttctccctgttctttcgtataagtaaaatctgtcgtttttccatccaatgtgtaggaaaacgttacacttcccagatttttggtgcaggcgagaatgaccatggcatagtttttcatggttttttcaactgtggtctgctgtttttttgtaaatgcgtcatccagatatatggtccagccgtaaggggtttccgtggtctgcagtttgaagtttgcaatcgaaaatacattggagatgccaagtgccgcaagtgttttttcattggcagacatatcaccgacgtatggatggatcgtggcataaatctgtgctgctttcggcagaatagaggtgccgtcctcccatgcaatctgatcgtttacatatactttttttacggcatgggtttctgtctttttatcggaaaatgtattgtgcccggctgccgatatgcggttggttttgacattgattgtgacggtttccgggtgatccggatcacaggagtagtcgattccggcaacaccaagtgtctgatcggttaaagatcctttaatctgaatggttttattgtcttttacggtaaccgcatagtcgatcagtgcggtatttttcagcggtgcagggtagaaatacgtccgatatccccagatgctgccgagcaacagtgtcacgatcaggatggcggcaagaatccggcgtttgttccttttgttgctcttttttaaaaagtcgatagttgaagcatccgttgccgtttctgccggcacgggttccggagtctgcatatcggaaagtatccggcgacagtcggcacactcccggatatgtgtttcgatcgccgtatttgtgacgtcactcgtcaggtgatcgacatagcttggcagcagatcctgtacgacctcacaggtcaaatcatttttcatgttggttcagctcctttcgcaggcgctccttgccgcgataaaacatcacgcgcgcccagttttcactctgtcccataatttgtccgatttcccggaacgagagatttccaaatacccgcagatagatcacttcccggtagggttcctgaaactggtgcaggcattgcagcaattccatttttccggcggaggaaagcgcctcctgctctgcagacggtgtgtgcggaagttccgcttcggtgtctgtcagatcctcgtgcagtgggtgctttcgcagataggacagatattgatttttggcaatggcacaaagccatgtggtgatcttgcagcttccgtcatagcggtggatactgctgacagcctggcagaaagtttcctgtgccagttcttccgcaacatccggctggtgcgtcagtgacatcaggtactgatacaccatgcgaaaatgctgacggtagactgcgtccatatcctgcatgtgcgacctccttttttctggaatttatatgggttacatttattgatgtaaaaatacggtgtttcgttacagcattttttattttttcatatatttatataatgtaacataaatgcagcatattttacatgaaaatgagctatgaaaacgatggctctttctgctaaaataatataattttcagaataatttagaaaattcacaaaatcttcacaaaaattgttagcagtcatacttgacgagtgctaaaaacggtggtataacatatcatgaacaaagggaaaagaggttgagagaaatgaataatctcttgaaactttgataataaaatagatgattaagatttggaaggagagatgacttatgttaatgcctagtatttttggtaacaattttatgaatgatttctttggtggtttcccatacaaatcaaacggaacaatgcagacggatgtgtctgagacagataaaggatacaaagtaacaatgaatcttccgggataccagaaggaagatatcaaaggtgaggtaaaggatggttatttaaccgtaaccgcaaccaccagtaagaataacgatgagaaggataaggatggcaagtacatccgcaaggaacgttacagcggaagctgcagccgaagcttttatgtcggcgatgcagtaacgcaggatgacgtgaaagcaaaatttgaaaacggtgttctgacactggaagttccaaagaaagaggaagcaccgaaggtagaagaaaagaagtatatttctattgaaggctaattattcagaagggggacagtcgagaggctgtcccctttttcttataatatatcgcaggcgattgcaaagaatgcgcatgtgccgcacgtgttttgcaatgtctgtgaaaaagggaggatgaaagtttgaaaaaccgaaacatgatctttgattttacacaatgctatccaaagcgaaaagaaccgggattggagtggcatgactgcagtgcgatcggaggcagccgtctgtattgcagcagagatgcggaagaaaaaataaaagcgctgattgcgccggccggagtatccggaattcattttatagattcgggggattatcattatatttccaaaattatgacggattttatcaaggagccgtttacgctggtgttaattgaccatcacacggatatgcaggatgcaagtctgggcggagatatcttaagttgcggaaactgggcgaaaaaggtattgcaggaaaatccgtatctgcaaaggctggttttgatcgggcaggagaagaaagtgcttgataagttacagtccggagctaggcagcaggagacagatggaaagcttgttgaaatcagttacgaggaattaaaaaacggaaaggcacatgaaaaaataaaagaactgtcggatgaagttcctgtttatatttccattgacaaggatgtgctggacgaaaaatatgcagtgacaaactgggaccagggaaaaatgtcaatgggaatgctggaacagatattaaaaacgctggttacggaatatgatgtgatcggagtggatatttgtgggatgtatccggaggaaaacagtctgccggagtatctgcgggcagaacgggtaaatatacggagcgatgaggaactgtatcggtttttgcaaatgagtttgctgaagaaaaaagaattgttaagtttataaagattgacagatgaataaattaagattaaaatcaaattacctgaaaggtaattcgctgaaaggagggaggcattggatgaaaataagaaactgtacagcccgtgcaatatagatgaaattgcgcaatatgtcagaatagtagagataacggaggtgagcaaacattatgggtaattatatagagtataatgatacaattgcgtttcacccgggatattatataaaagagcttgttgatgagagtggacttacgcaggaagattttgcaaaaagactggatacaactccaaagaatttaagtctgttaattcgtggagagcagagtctgtcaatggatatagcgatgaagttgtccagaatgcttggtacaaccgtaaattattggttaaacctgcagaatgcatatgatgttttgattgctgagtttaaatcgcaaaaagagctggaagcggagagaaaaatatttgagtattttgattatcgttttttcagggaaaatttcgggctgccagatttaccaagaaagaaagatgaacaaataaaagcactcagagaattttttagtgttgctacacttactgtatttacaaagagagacatggcagttagttttcgaagttcaacgaaagatttaccagaggcaagtatagtgaaagcaaatgcaatggttcagattgcaacaaataaagcacttaaagtggatgcccctaaatttaataaaaagaaatttgaaactgcagttcagtatgcattaacactgacaacgcagcataaagaattttatccattgataaaaaaagcttttatggatgccggagtaatttgggttattcttccgaatatttcgggctcaaagattaatggtgcgactaaaaagattggcgagaacattatgttaatggttaatgacagaaggctgaatgcagattccttctggttcacattatttcatgaaatagggcacataattaatggagattatggaatctcgtttgagaaggaaacgggtgaacaggaggtctctgcagataagttcgcagaggattgtttaattccgcctgaggaatatgaacgttttatttcagataaaaaattcggtttgcaagacatccggaagtttgcaaatgaaatagaaagagatccggggattgtattgggaagattacagaatgatggt

SEQ ID NO: 1002 - DNA, 18217 bp, Unknown
  gut microbiota DNA sequence
cagcaacggacagtttatatgcccggctgattgcgctggtcgatgcaggaaaaatcaatgaagcggaaaatcgcttgtatgaagaattagaaagagatgaggagggcacatttgaagtagcactcggattttacgattatctgaatgaacttccggaggaatttcttgaagagcacgattattcgaaggaggaagtcaaagaaggcgcacagagtcttgcggaccgcaaggggctgggacttcttggggaaggacttgattaggaataactgttcgaaggagaaatgatgaaccgtagtagattaagtgaaaaagatatataagacagagaataactcttgacaatacaacatatatgctgtattttgtaattacaaaacaaaagtggagacagcatatgatattacacaattatctttcgaattcgggaagagatttaatatatgaatacattaatagtcttccggaagctgaaaaaattgatggttataccgtactgcagcatatggaaaaaggagaatttgataaaattctttttaaaagatgggaaaagaaagtgtatgaggtatattttcagaaaaataaccgtgtattctatattacagtagataaggaaaatatatatctgctccattcctgtcgaaaacagaaaaataaaacagaaaaaaaggatgcaaatatagtacggaagcgggcaaaagaattaggaaatatgttaggcaggaagtttatttagagggagtggtcaatatgccttttttgcaagtaaatgtagagcaggaaattcaaaagcaaagagagaacgatccggagtttaaaaaaatatgggatgagtcccgtgcagagtatagattgattggtgaaatgatttctttacgtaaaaagaaaaaaattacacaaaaggaattagctttgctgacagggaataaacaacaggttatatcaaggattgaaaggaaagaaagtatcccgacaattcgggcatttagtcgtatcttagatgctctcgggtatgaattacagattgtaaaaaagaagtcagtgtaatatataatttaaattggtgtccaaatagcatttaacagaaatgttagatgctattttttttcaaaaacacatccgcccgtcacatcccgccagaaaccggtagtatacagataagagatgctccagtcccagccgcaggtggctttaaaaggactggcatccaacagaagggaggaatcatcatggaagatactgcaatcatccgcttatttcaggagcggtcacagcaggcaattgccgaattgtcgcagaaatacggaaaactctgtcagagcctgtcccgccggatcttaaataacgaagaggatgcaaaagaatgtgttaatgatacgtggcttggtgtgtggaacagcatcccaccgcagaccccgaatccgctggtctcctatgtctgcaggattacccgcaatctgtccgtcaaaaggctgcggcataacatggcggcaaagcgcaacagctattacgatgtatcgcttgcggaactggaagaatgtattccggcagcgcaggagcaggagccgtgggaagaacaggaggtgacgaaagtcctggaacgctttttacgggaactggattccggcagtcgcgtgatgttcgtcaaacggtactggtatgcggagtctgtcgcacagattgcggaaacgtttgggatgaaagaaaacagtgtgtccgtaaaactgatgcgtctgcgcaaaaagctgagaaagaaactggagaaggagggtgtagtgttatgagaaaatccgaaaaattatccgatgcaatcggtgaaatcagtgatgacattatagaggaagcgtatacatataagccaaaacatgacatgcaccaaagaaaggcttcttttaaatggagagcagctgcagcagttcttgccatgcttgttttggcgggagtcggtgtgtccgtagggggaggaacttcctttttccggcttggaacaattgtttccagatttacggggaaggctgcaaaggtggtttaccgtatccagggaattccggtaacacagcaggaaatccaggcaggagtggcattgcgtgtggaaaacggagaaccggtaaaaaccgcaaaaaaagaggttataaaagatattattacaaaaaagacgttgtatgcacttgcaaaaaagaacggatgcaccgtgtcggatcaggaatatgatgattatgcaaaactgctgaagacacagatgaacaaagcggagaaccggaaagaaatccgcgatttttatgcgggattcggtggagagagtgcttactggaagaatatggagccggttattcgtcagaatcttgcggtgcgcaagtatatagacagccagacaggaacgcagacggaggaagaaatcaaacaggaggcatatgaaagcggtgcaaagcagacggatctggatgcatttgaacaggtggtggaagatgtctgtgaagagattggcgattatctgaaaacactgcagaagtcggatgcttcggtatattattttgcgtcttccgacaaagagcgtgtgacagaatctggtggatgagcagcagtataaagacagcagttcctattaacaatattttgccggatatatggagaaattccagaaaatgttcgatatataagatgatattatgaaaaaataaagggggaattatcatatgtcattgacgattcaggcaccacatgctaacatgaatgcatacgaaatcggagacgatgaaacgcgcaaaaacaaagtatccgacaaaggaaccatatatgccggagatctgcagtttgcccagaccacaggcaatgctgcaagcgacaagaaacaaagtgccaggaaacaggcgatgaagctgatccgggatgcatgggacagtgataacaaggcggtaagccagcgggatcagatagcacagcagaaagaggaaaaactcaaagaagtccgtgagtgtaacgaggaattgaaacagattcgcgagagtaaagaaatcgcgcggcagagttatggggtggattcggattctcaggagcagaaagacttagaactgctggaaaaatatcaggattatcagaaaggtgtgcagacggatgacttttccaaggaagagatagaccgtttgaaagaactgcagaatacccctctgaccgattatcagaccagggcattacagctgaatgcacaaaaggatgtcattctgaacaagaaagacagggcgcagcgtaacgtgacttctctgactgaggcagcggcagatgcaaagctcgaccagctgaaatcacaggatatgcaaaaagcgcaggatgcagcggatgaattgctggatgcttccgataaagatgtttttggcatgctgatacaggatgcggtagatcacatcgacgagaaacaggaagaagagaaagagaaagcagaggaagcgcaggagaagcgcgacgagcagcaggaaaagattgacgaaaagaaagaggaaaaacagcagcaggagaagatgattgagggttctgtcgaggcagacaggctggaggcagatgtaacggtggatcagactggtacgagtaagctggaggaggcgcagcagcacatccagacgattcttaaaaagaacaatctcgtaaacgaggatctgaaggggattaaaattgacttgaatttctaatgccaggaggatgaggtgtaatgcaatccggtaacgggatgaccatgcaggaagcagaacaggaaatcaaatattatcagaagatttttcaggtagcacgtctgttaaaaggagaagatgttgagcggacattttaccagcaagggaaaggaacgtgcgaaaatgtgcaggatggatgtccgtgctacagtttctggaagaaaaacggtaagtgcgaaaactgcagttcctataaagcgttgcgcgaaaagaagcagatgattaagctggaatttctggaatcagaagtctatcaggtaatctcccggtatatggaaattgatggacagccatacgtcatggaattgatcaatcatctggaggacgacaccttaatcgacatatcctgcagagaaaagctgatcaataaactgaccggatataatgaaaaattatataaggatgtcctgaccggagtttataatcgtctgtattttgaggaagagataaaaatgtggacgggaaatgccggaattgttgtgattgatgtggatgatttcaagctttgcaatgatacatatggacatctgaccggagatatggcacttgcggcggttgctggtgtgatctggcgttgtatccgcagagaggatacgcttgtgcgctatggtggagatgaatttgttcttgtgctgccggagataaaggaagctggtctggtagaaaaactgcaggagattcaggaaaagatccagaatgcagtgattccgaggtattccaatattcagctttctgtcagtatgggtgccgtgatttcgcagaacgaatctgttgagcatgcaatgcttcgcgcacataaactgatgtatcaggcaaaaaataagaaaaacatggccatcaccgagaataacatgattgatcatgagggaaagatacacgcacagaagcaaccggaaaagatgattccggagatccttgtagtggatgatgaggaggtcaaccggacgcttctggatatgattttttccaaggattatcatgtcctgcaggcggagagcggagaaaaatgcatagaaatactggaacagcaggtcaatagtatttctttggttctgctggatgtggtattgccgaagatggatggatttgatgtcctgacatatatgaataaaaatcactggattgaggatattccggttattatgatgtccggagccgatgccccggaggctgtgaagcgggcatatgcacttggtgcagtggattttgtcagcaagccatgcgatgcacagatcgtttatcagcgtgtgacgaacaccatgaaattatatgcgaagcagcgtcggctgacttccctgattaccgcgcagatcaacgaaaaagagaaaaacagcgagatgctgattcatattctcagtcatattgtggagtttagaaacggagagagcggaagccatgtgcttcacattcacaaacttacggagatgcttctggagagactggcgcagaaaaccgaaaagtatcatctggatggggataccagagccatgatcgcacttgcttcttctttgcatgatatcggaaaaatcggtgtggatgaaaaaatcctgaataaaccgggaaaactgacaaaagaagaatttgagattatgaaaacgcataccgtcatcggtgcagaaatgctggaacagcttggtatttatcaggacgagccactggtaaagatcgcacaccagatctgccgctggcatcatgagcgctacgatggaaaaggctatccggatggacttgttggagatgaaatcccgatttccgcacaggtagtttctgtagcggatgtgtacgatgcgctggcgagtgagcgtgtttataagaaagcagtaccgcatgaaaaggtactggaaatgatcctgcatggggaatgcggacagtttaatccgatcctcatagaatgtctgcaggagatcagttcgcggatcagaagcgaatgttatgatgaggaacaggagacctgatatgttagaccagaatacatttacagaaaccatacgtgcggtacaggatattatccgcacttcggcggagccgatgacaagagaggagatcctttcctattttaaggatatggatttgaatgcacagcaggaagagatggtgttagagtttctgtcaacaccacatgatgatccgcagccggaagagaacgaaccggaaacaaaggaagcggaatatgaggagaccgcagagaaagaagaaatcaaagaatcttctgcgaaaaaggaatccgcaaaagattccgtcacagacaacatttccacttctcccatgtttcagatgtatctggaggaactgaaagatattccggagtataccaaggagcagcagattgatatgtataagaagctgctggcaggggaagagagcatggtacacgcgctctccaatgcatggctgcgcaacgtactggaagtagcaaagaaactggcagtttccccggaaggatttgaggatattgtgcaggaaggaaatatggcgcttttcctgcgcctgagcgagctgtgcggcagccacgaaaaagtggatgtggaagaggaacttcttaccgcggtggaagaagcgatgaaatcctgcatccgggaacagaccggtgaggatgagaatgaaaattccgtggttggaaaagttgcgctggtaagtgaagcggtgaactatctgaaaaaacagaacggtgcacagccaacgcagaaagaacttgcggattatgtcaaaattccggaagatgagcttgcagatattctttatatgattgataaggcgaaaaaagattcctgatcgaggaacgaaacagcccccctatttgacgggagggctttttttattttcttgcaacaaaaatacacctccgatacactgtatagataggagggccttccatggatgaacgtttattagtaaaaagggcaaagcgcggggataccgcagcgtttgccgaattgtatgggacaatttataagaggctgtatcagtttgcgctgtatacgcttggaaatacacaggatgcggaggatgtggtcagtgccgctgtgatggaagcatttgaaaatatcgggaaattgcggaaggaagatgctttttccgcctggatgtatcgtatcgtggcaaatatgtgcaaacagaaaatgcgggaatactatcaacggggagaagaactgacggaagaaaacggtggctgggacggctatgtatggggtgatacccgtgaggaatatatagaagtccggcgtgcatttcttacgatggatgaggaggaccgcatgattgtgggaatgcatgtcttcggtggatataagacgcgggagattgcacagattcttgcaatgaatgagaatactgtgcggtcgagagaacatcgggcgttgcagcggatggaaaaacagctgaagggattgaggtgagaatatgcaggaacagaacctggaagaatggaaagagaaaatagacagatccgcagagcagattaccgtgccggatactctgagacccggggcggtgcagcagatgctggaggagcggaaaaaccggacatccgcaggcaggaaagaacacagacattaccggagatttgccggaattgctgcggcagttgcggtgctggtgattgcggtcggaacctatggatggaataagtatggaaccgatgatgtgcaaccgaaaaaggctgctctttccgtaacagaaactgtcgacagtacgcaggatacagaaaagaaagaacaaattggtgcatttactctggcaaaaagttaccaggatgtatatgcagcggtacagaaaaaatccaattcacaaaaggagttggcagaaggcacagtggatgatttgttttccgtggaagataccggttctgccgaggcgaaaaaagagtcatccggtacccattccgacaccaatttgcaggtaaacggtgtggacgagggggacatcgtcaaaaatgacggaaattatctgtatgtgctgaatgatgaccgggtgaccattgtggatattcgggacaaaaatatgcgtaagctgtcggaaatacggccggaactgacggaaaatgacatccttttgcagctatacgtggataatgaccggctgtatgttatcaagcagggatgggaaacacaacaggaggagattcagtccgacagcacggaggctgacaatgattccggttttatcggatgttataaagatatcgcttatgaaccggacggaaatgtgagtacagttcttttgacgtatgacatttccgaacgcgcaaatccggtattaagtgcaaccatgaaaatggatggagcataccagagttcccgtaaggttggaaattttatttatctgtttactgaccgttgggtgtccagagacggaaagaactggaaggctcaggtcattccggagattgccggggaaaaagcagatgccggatgtttttatgtgcagaagaatgggacaacagaagtcattatggcatctataaatcttaaagagccatcgaaggctgcagacaatatggtgcttcttgacagcggacgacaggtttatatgggaacggatgcaatctatctgtatcagatggaatatgagcgtggagaaaagacaaagatcgccaagttttcttataagaatggaatgttttcagcaattgcagaaacaaccgtaaagggggcgatccgggatacgtttgctatttcggaaagtgggggagaacttcgtattctgacaacagattcccaaaattctttatccgaaaaccgcctgtatctgctggatgcggacctgaaaaaagagggattgctggaaaatattgcaaagggagaagaaatttatgcggcacggtatctgggaaatatagcatatttcattacttatcataataccgacccgttgtttgcagtagatatttccgatccggcacatccgaagccgctgggaaatgtgaagatgacaggatattccgattatctgcacccgtttggagatggactgttgcttggcatcggctatgaaaccaatgctaagacaagcgagaagacaggggtaaaactgacaatgtttgatatctccgatccgataaacctcaggattttggattctgtgacgataaacgaagatttctgcagtgccgcagagaattacaagtgtgcatttgtagataccggacgtggactggtcggatttgcgacagagacctggaccaaaaccaattataacaggtatatgctgtttcagtgggatggaacgtcttttgtaaagaaaatttccttaaagaaaacacagcagaaaatggatacgtggactggtgcagaacagatgaggggactttcttcgggtgactgtttttatgtgcttcatgtggaacgggatgatttttcacttatttcgtatgatatgaaaaatgatttccaggagattgagaccaaaaaatattaaaaatacataaaaaatgagataaaaatgaaacttttttgcacatttttcttgaaaaagcctctgatttttgttactatatgttatagttaagtaacaaagttgtaacaaattggaggataggcattgaaatttaaggttacatggggtaagaagctgatcgcaggtattttgctggcggcagttgtagtagggggtactgcagcaccggcagaagcagcaggaaagaaaagtactgcggttgtggcacaggataattaccggaaaacattgtgtaagggatttctgggaaagagttatggcagtgtggttgatggaatccgctgtgactgcagtggttacacacgggcagccctgaatcgtctggagagtaagggacggaaagggactgcactgaaaaatgtcagtgttggagcacattgtaccagagactgggtaagcggatcgagtatttcgtatacaacaggggttgcaacaaagggtgcgatccagtggaattccggcacaaagaagtctattggaagaaaaagcagtgggaaaagcctttcccagttggaacttggagatgttgttgtttatggaaagggtggttcttcctcccatatagccatatatttcggagaattttcttcaatggaagcggtaaaggattatctggaagatattggggtttatgagaaaggaacgattaagagatctgcaggagataagtacagttacagtggccgcacgattgtgcataagtatggaaacagtaggtactggcggattcattctacatgcagcggaattatgattgacaatgatattgcaggaaccagcagatacacatcttcctttggtcagtggaaatggacctttgatacgggaattgaagtagaataaaagaacagataaaaagccctgcgttttcggaatttccgaaagcgcagggcttttttacatggcagatacttaatcgaccagtttatccagttctttgatgtattcggtttcacttgagaactgatgatttgcttttttggcatacagaccgaccgctgtctgggatttcttgattgcctgcatggttccggcaccggcgacacatccgcccggacaggccatgccttcgagcagatagcccggatatttgcctaatgtggcaagctttaaaagctgacggcattcctttaatccttcggcatttgccaccttgatctcctgttccgggtgatcccgtttgatgacatctacgacagcctgtgcaacgccaccggcaacggcaaagtttcttccgtctgtggaagcgtcacttacaccatccggatcttcttccatgttttccagatccacatgttttgcatcaaaaataccggccatttcttcaaaggtgagcacgaaatctacttcgctgcggacgctgcggcgcattgcttcgagtttcttggccgcacatggtccaataaagacaaccttcgcatttgggttatgctttttgataagacgtgcagttaatgtcatcggagtcagtgccatggaaatacagttggcgtgatccgggaataatttctttgccatgacagaccatgccggacagcaggaagttgccatgaatggaagttcatctggcacttcttttaagaaatcttctgcttcctgctttgcgcacagatccgcaccgattgctacctcaaaaacgtctgcaaacccgagttctttcatggcagcacgcagcttgccaggggtaacctttggtccgaactgaccgacaaatgcaggagcgacagctgcataaaccttttcaccggactggatggcacggattgtctggaaaatctgggatttgtcagcaatggcaccgaacgggcagtttactagacactgaccgcaggaaacacacttgtcataatcgatattggctttgccgttttcatctgaagtaatggcatccataccgcacgctttggcacatggacgttcctgaatgataatggcgttataggagcagacacttgcacagcggccgcacttgatacatttctcctggtcaatgatagatctgccggtggtacggtctaaggatacggcatcctttggacagacctccatacaagggtgtgccagacatccctgacagccgtccgttacatgcacacgttttgtgggacaggcattgcaggcaaatttaatgacattaatgagaggcggagtatagtaagtttctgcctggtcagcagcttcaatgccatcggataccggggcatgctctgctgcactgcggtttggcaggcccattgccagacgcaggcgttcgcctacaattgcacgctccaaaaatacatcgtttctgaaatttccggtttctcccggaataatcttatatggaagttcttccatacgttcctttacaggccattcggtatgataagccatacgggctacttctgtaaaaattttgtgacggatttcctgaattcgggtttcgacgcctctcatgataattcctccttgtgtttgtaatggataattgtaaaataaaattttctgcatttctataagataataccaagaaactcacagaaaaacctgttttgtcatattccggggatattgtagcaaataatacacatactctcaataagtatgctgttctttttgtagaacaaattgtatttttgtgcttactacatgatagtttatacgataatgaaacgatagaaaggacagggcatggttcagacagaggcaatccggcgatttctcctgcattttagaggctgttggaattttttcaattttcagcaagcctcgtacatggatgtacgaggcaggtggtcactgagcccggaaggcgaatgaccaccggttgcgtccgcctgatagcaattaaaacaaaaattcctacagcctcttaattgcaaggagcatgagccggattgccattggtgtccccctcccctgtcctttcgagccatagccgccttgttcaataacatgacattatgcacaaaatcccagttctgtttttgtgaatgattttgacggaaaatgattgacgatgacagaaaaccccactataatgaaaatcatcaaatgaacgattttgaaagattgtgaacgaaaaagaaacaaaaggagtgaggcatatgcttgcagaagaacgattttcaaggatactgtccataatagaagcggagggcagtgccacaatacaggaacttatgactgcacttgacgcttcagaatcaaccgtccgccgggatttaatcacaatggatgagaatggtcttctgaccaaagtgcatggcggtgcaatcgccaaacggccgagtgtgagtacacatgatgaggacgtcagaaaccgtaagacgatgaatgcggaacaaaagaatgcaattgcaaagtatgcagcatccctcatccgcccggatgattttgtttatctggatgccggaacatccaccgaggcgatgatcccttttattaaggagacacaggcggtgtttgtgacaaatgccatcagccatgcaaagcttctggcggaaaagggctgccgtgtttatctgctgggaggcgaatttaaatcccagacggaggcgattgtcggggaggaagccatggagatgctttccaagtataactttaccaaaggattctggggaacgaacggaatcagcgtcagcaaaggatattccaccccggagatcaaggaagccatggtaaagaaatattccatgaagaattgcaaacgctgctatattctggcagatgccagcaagtttgaccagctttccagtgtgaaatttgctgattttgatcaggcaaccatcttaacaacggagctgtacaagccggcacttaaaaaatataaaaatattgtggaggtgaaagaatgatctataccgtaacatttaacccatccattgattacattgtaaatgtgggcaactttatgaccggtgtggtcaaccgtaccagcaaggaaattatttttccgggtgggaaaggaatcaatgtttcaatggtactgaaaaatctcggggaagaaagcacggcacttggatttatggcaggatttaccggagatgccatcacacggcttcttcaggagaaaggtgttaccgcagattttattcacgttgccgaaggattgtcccgcatcaacgtaaaactccgggcacagaccgagacggaaatcaacggacagggaccaaagattgcatcagaagatatccggaagctttacggaaaactggatgcattgcaggatggcgatacactggtacttgccggaagcatcccggacacaatgccggaatccatgtatatggatatcatggagcatctgcagaacaagaaactcaatattgtagtagacgcgaccagagatctgctgatgaacgtacttgcgtatcatccgtttttgatcaaaccaaacaatcatgagctgggagagattttccacacgataatcaatgataaggatgatgttgtaacatatgcaaaacgcatgcaggaaaaaggtgcaagaaatgttcttgtttccatggcaggcgacggagccgtccttgtgacggaagacggtcaggagttccgggcagatgcaccgaaaggaaaacttgtcaattcggtaggcgccggagattccatggtggctggttttatatatggatatttaaatggtggcagctatgcagatgcgttccgctacggtgtatgtaccggaagtgccagtgctttttccgaagaactggcaacaaaaaaggaagtacttgcattgatggatgcaaatcaaaaattattttaaggagggtatactatgagaatcagagatttgcttgcagccgagagcattgaactgaacggttctgcagccggaaaacaggatgttttaaacaaaatggttgatctcatggcaaaaagcggaaaaatccgcgatgtggaaacttaccgcaagggggtttttgcaagagaagaagaaggaacaaccggaattggagagggaattgcgatcccacactgcaagtcagatgctgtgaaagcaccgggactggcagctatggtagtaaaggatggtgtagagtttgacgcgttagatggagcacctgtcaatttactgtttctgattgcagctccaaacaccgaggataatgtacatctggaggtgctcagcaaactttccgtacttctgatggatgagaattttaccaacggactgaaaaatgcaaagaccgtagacgaattcttaaaagtcatcgatgatgcggaaagcgcaaaagatgaggatgaaaaagaagacgaaaccggggcaaaatacaaggtacttgccgtaaccggatgcccgaccggaatcgcacatacttatatggcagcggaaagcttagagaagcatgcggctgagatggggatcacgattaaggtagagaccagaggttccggcggagccaagcatgtgcttaccgatgaagagatcgcaggagcggccgcaatcatcgttgcagccgataccaaagttccgatggaccgcttcgatgggaagaaagtcatcgagtgcaaggttgcagacggcatcaacaaggcagagcagctgttaaaccgtgccgtggccggggatgcacctgtctaccatgcggcagagggcagcagaaaagaggaaaaagcagaaggtggttctaccgcacacatgatctatacgcacctgatgagcggggtatcccacatgcttccgttcgttatcggcggtggtatcatgacagcgattgcatttctgatcgataccctgcttggctatggtgcaaccggtggatcggcattcggttcctgcaccccgttatccgcattcttcaaatatgccggtggtctggcgatgggactgatggttccggtactggcaggttacattgcatattcgattgctgaccggccgggacttgcggtaggttttacaggcggtttgttagcttcgagtggtaatgcacttatcaccggatataactgggcagattctacgactggtttccagaaatttatcgcagattttgcatttcagggtgccaatggcggtaacacggtttccggtttcctcggtggaatcttagccggatttcttgccggatttattgtactgttcctcaaaaaagcgttttcaaaactgccggcttccttagatggaatcaagccgacactgatttatccgttacttggtattttaatcatcagtattctgatgtgctttatctttaacccgctgatcggactgatcaataccggactgagcaatggactgaccgcaatctccgatgcaggatatattaccgtacttggtctgatcctgggagctatgatggcgatcgacatgggtggcccaatcaacaaagccgcttatgtatttggtaccggcgtactggcaactgcaagccagatgcttgaaaaaggtgcacagccaggcgacccggctgtgcaggcatgttacattgccatggcagcgatcatggtcggtggtatggttcctccgatcggaatcgcgcttgcctgccagttcttcccgaagaaatttacaaaggaagaacgtggatccaaggtatccaacttcgtaatgggtgcttccttcatcaccgagggtgccattccatttgcagcagcagatccgcttcacgtaattccatgtactcttgtgggtgccggagttgcaggatttttatccgcactgtttaagtgtacactgatggctccacacggtggaatctttgtatttgcaacggtaggccatccactgttatacatccttgcatgggctgtcggctctgttattacagccgtaatgcttggcgtaatcaaaaaggatgcagcataataaatccatttgacaggagatacacacaaaaagcttccttcggaaacggaggaagcaacaacaaaaagaaaaggagaatgatcatgaaagaatttacgtataccatcaaagacgagcagggaatccacgcaagaccggcaggagagctggtaaaagcagccgctgcatatccatgtaaagttaccatcagtaaggatggcaaggaagtagacgcaaagagaatcctcggagttatgggtcttggtgttaaatgcggacaggaaattgtattaaagacggatggagatcaggaagaggaagcaatcgcagcacttggcaaattcttagaggagaaactgtaagaaaccgttccggcaaccgtttacggagaatgaatcagcaaaaggatgaggtgacgctatgacaattcagggtaaaagtgtatacagcggggtggccatcggccgccttgccatataccgcaaatcagaaaatcaggtaaagcgggagaaaatcacagataccgcaaaagaggtaaaacggtttgaagatgccaaagataccgcaaaacagcagcttgccgggctttatgataaggcattaaaagaggtcggtgaagtcaatgcagcaatctttgaagtacatcagatgatgctgaatgaccttgattatatcgaatccatcacaaatatgattgaaggccagcaggtgaatgccgaatatgccgtggcaacgaccggagatacattttccgagatgtttgcggcaatggatgatgattatatgcgtgagcgtgcagccgatgtcagggatgtgtcaaaccgcgtagtttccatcctgcagggcaacggaggaaatggcctgaatgccgatgagccggtgattttacttgccgatgatctggcaccaagtgagaccgtacagcttgataaatcgaaggtgctttcctttgtcacccgtcacggttccaccaattcccataccgcgattctggcccgtaccatgaatatcccggcactgatcggtgtcgattttccggaagatgtcgatggaaaaatgggtatcgtcgatggatacgaaggcaggatcatcattgatccaccggtctccgttatggaagcttaccagaagaagaaagcagaggatgaagagaaaaagcgtctgctgcaggaactcaagggcaaggagaatatcacaaaggacggaacaaagatcaacctgtatgcaaatatcggaagcgttggggatgtggcatcggtactggcaaatgatgccggcggcatcggactgttccgaagcgaattcctttatctggagagcagggattatccaaccgaggaagaacagtttgcagcataccgcaaggtagccgaggcaatggcaggaaagaaagtcatcatccgtacactcgatatcggtgcggacaagcaggtggattatttcggactcgacaaagaagataatccggcaatgggttaccgtgcgatccgtatttgccttgaccgccgcgaggtattcaagacacagcttcgtgcactgtatcgggcaagctattacggaaccatcgccatcatgttcccgatgatcatttctgtcacagaggtacagaccataaagaagatcatcgaggaagtgaaaaaagaactggatgaggaaaagattccgtacaaggatgtcgagcttggtattatgatcgagactccggcagctgtcatgatgtccgaagaactggcacaggaagtggatttcttctctgtcggaacgaatgatctgacacagtatacactggcgatcgaccggcagaatccaaagcttgacaacatttatgattcccatcatccggcaatccttaagatgcttaagatgattgtggacaacggtcataagggtggctgctgggttggtatctgtggcgagcttggggcagacacgacactgaccgagacatttcttagtatgggatatgatgagctttctgtcagcccgtccatgattttaaaggttcggcaggagatccgttcactggatctgaaagcttaaaagagtggctgacttaacagccgatacaagggagtattttatatagtaaacggaaaaaccggtgcatcgtctgggatgcaccggcttttttctgtctggaacactattggaatttcgcatgtttttctgtataattgaggaagaaagtacgcaagataatatgcaagataattcatacacgggtaatgtctttatggaacggagagcatctgccgaaacatgtgaaagacaa

SEQ ID NO: 1003 - DNA, 72855 bp, Unknown
  gut microbiota DNA sequence
tctgtatcatcggtgttggtctggtattgagtttccgaacccggttcttacagattcgcaagttcccatacgcgatgaaagtgacatttggccgcatgtttaagaagcgtgaggcatcggatggagccatgacaccgtttcaggcggtctgtacggcacttgcggcaacggttggcacgggaaatattgccggggtggcaggagcgattgccatcggtggtccgggagccgtgttctggatgtggatttccgcaattctcggtatgtgtacgaagttttcagaagtgacgcttgcggtgcatttccgtgaaaagaatgtgcatggcgatctggtcggcggtccgatgtattatattaagaacggactgaaaaaacactggcactggctggcgtatctcttttccgcgtttggcgtactgaccgtattcggaacagggaatgccacacaggtaaatacgattaccacagccatcaatacggcattaatgaattatcatgtcatttcaaaagatgcggtgccgactgttaaccttgtagtcgggatcattctggcggttctgatcgcactcattctgcttggaggtatcaggcggattggacaggtgacagaaaagctggtaccgtttatggcactggtctatattgttctggcagtgggagtgatcttatttaatatcggtcatatcccggctgtatttgcttcgattgtggagggagcatttcacccggcggcagtgaccggtggagcagtgggaagcttctttatgagtatgaaaaaaggtgtctcccgtggaattttttcaaatgaggccggacttggcacgggatcaattgcacatgcctgtgcagatacgagaaaaccggtcaaacagggattttttggaattttcgaggtgtttgtagatacgattgtgatctgtacgcttaccgcgctggttattttgtgcagccaggttccggtcagttacggacaggcggcaggagcagaacttaccatcagtggatttaccgcaacatacgggaactgggtatctgtttttactgcggttgccatgtgctgttttgcattttccaccattatcggatggggattatacgggacgcgctgcatcgagtttttgttcggctcccgtgtcaataagccgttcatgctggtgtatgcattggttgccattgtgggtgcgaccatggatctgggcctgatgtggagtattgcggaaacgtttaacggactcatggcaattccgaacctgatcgcagtatttttgctttccggtgtcgttgttaaactggtgaaggaatactttgccggagaaggtgcaaaaagttaggggaagctggaaagaaaaagggcgaaaaacttgacatttgtgcgtttatcataaataataaggtactgaaaaaacaaaggaggaacttgttatgaaaaaatttggaatcaaagaagttgtagcaaccggtatcggaaccgcattgttcattgttttgacagaagtgcagattccgctgggaattatcccgaatacatccatgcagccacgtgcagcagtgctggcatttcttgcagcagtgtttggaccggttgtcggaggaatcattggtctgctgggacatgcactcggagatgcactgttttacggtggtgtatggtggagctgggtattcccagatgcgatctttggaattttagttggtttattcgcaaagagctttgagattaaggccggtgggtttaataggaagaaagtagttctttttaatgtcgttcaggtggttgcaaatgcaattgcatggatcgttgttgcaccggtgcttgatattctcatttatgcagagcctgcaaagaaagtattctcacagggcgtatttgcgtttgtagccaatattattattgtgggtgtacttggttcattactcggactgggatatacaaagattggagcaaaatcatcaagtcttacaaaggaagactaaaaacgtatggaaccgattattgaatttgaaaattttacatttaaatatcggtcacagatggagccgacactccgggatatcaatttaaagatttatcccggagagaaggttctcattattggaccatcgggatcaggaaagtcgacattatcaaattgtatcaacggactgatccctttttcgtatgagggagatagtaccgggacgctgagaatcgagggaaaagatccgaaaaaacttgggatttttgggctttccaagatggttggaactgtattacaggatacggacgggcagtttatcggtctgacggttgcggaagatattgcttttgtgctggaaaatgactgcatggcacaggaagaaatgtttcgcaaagtggacggtgtggcagagacggtagaagtaaaagagttgctttcccatgcaccatcggagatgtccggtggacagaaacagagagtttccatggcgggcgttatgattgatgatgtggatattcttttgtttgacgagccacttgccaatcttgatccggcgacaggaaagaaagcgatcgcgttaattgacagaatccaaaaggaacagaaaaaaacgatcgtaatcattgagcatcgtctggaggatgtgctgtacaaagatgtagaccgtattgttgtggtcggagacggaaccattgttgcggacatgaaaccggatgatctgctggttggaaatatcttagaggaacagggaatccgggaaccgctctatgtcacggcactcaaacatgccggatgtaccatcactgcacaggatcatccgcagcatgtggaaaccatgaattttgaaccatacaaaacacaggtgcgggaatggtttgagactacgcagattccgcagaaacaggaaacacaggagaaggtacttaaagtagaccatctgcatttttcttatcagccggaaaaagcaattctttcggatatcagttttgatgtaaagaaaggcgaaatgatcagtattgtcgggaaaaatggtgccggaaagacgacactgtccaatctgatctgtggatttttagaaccgagcaaaggaaaaattgagctgaacggaaacgatatctcaccactttcggtcaaagagcgtggggagcatattggaattgtcatgcagaatccgaatcaaatgatttctaagcctatgatttatgaggaagtggcacttgggcttactgtgcgcggagttccagaggaagaaatccgtgagcgtgtgcatgagacactgaaaatctgtggattgtaccagttccggaactggccggtttctgcattgagtttcggtcagaagaagcgggtgaccattgcgtccattcttgttatgaagccggagatcctgattttagatgagccaactgctggtcaggattatcgtcattatacggaaattatggagtttttaaaggaaatcaacgagacacaggggacgaccattatcatgattacgcatgatatgcatctgatgctggaatataccaaccgtgcgattgttgtggcagatggaaaacttctgaccattgatacgccggcaaaagtattgaccaatgaaacgatcacagctccggcatatttaaagcagacgtcactctatgagatggcagtcaaatgtggaatcgaagagccgtctcagttcgtacagaggtttatcaattacgaaagggcggtgcggtaatggcaaagttattgacctatgagcaaaaagacacctggatggatcggctgtgcggtgtcacaaagctgatctattttctggcatggtccatcacaagcatgcttacttatgatacccgtgtactcgccgtgatgctggtttttagtctgatcctgtttaagatttcaaaaacagagtggaaacaggtcggttctatttttaagttcattatgttctttctggtgatcaatgtgcttgccatttttatttttgcaccggatcagggaacaaaaatttatggtacaaagcatgtactctggcagctttcggcgcattatccgattaccgctgagcagctgttttatgagctgaacattattttgaaatattttacaattatcccggcggtgttcatttttgtcgtgaccaccaatccgtcggagtttgcagcatcgttaaatcgtattggaatcagttacaacatcggctatgcagtggcgattgcactgcgctatattccggatgtgcaggatgatttccataaaattaaaaatgcgcaggaagcgcgtggaatcgagatgtctggaaaagcgaagttgatgagtcggattaagagtacagcctctatcattttcccgctcatttttacaagtatcggccgtattgacacgatcagtaacgcaatggagctgcgtggatatgggaaacacagaaagcgtacctggtatatgggaagaaagttacagcgcaatgattatctgtgtattgcactggtgcttggatttgccgtggttgcacttgtgattacctatcatgatggcagccggttttataacccgtttatataaacagtagagattgcgcaactcgttttaataaaattagaaaaggagctatcgcaccagcgaatatcggcggcacgacagctccttttgttttccatgtctgtttttaagcttcggttgaagcatctggtgcagaggctttagtcggggtttcggaagcattttccgacacggtctcagaagctggttcctcagacggctgttccggaggaatcacctcgacatcctcttccttaaccggttccggctttggcttttccggcattttctgtccacaggcactgcagaatgcagcatcggcatccacgcttgcaccgcaggatgggcagatcgctacacctttcatctggtgaatgctttcacggcattccttaattctggcttcggaaacagcaatcgcatccagccaggtttttacatcttcttcggcatcttcgcgatgtttttccacataccattttccaatctgttcgtatgcagtatcaatcttgcgttcttcctcggagatatttaagtttaattttgcagtatctgccagatcttttgtttttttaatggtagtctggctcacatcactgatcttttgtcctaagttgttaaaaaaagacatatatttcactcctttcctatatcaaaaaccttatgttatgaattatcataacatgctgtctgaaaaacacaaggaagtttacagattatttatgtctttttctgtttttcttccgggacatgcgtggtgctttaacggatggttttgcagccggagtattttcgccagctggagtttccacagtagcagattcagccggtgccagagcttccacaggagcagattccgctgatgccgaagtttccacagtagcagattccgctgatgccgaagtttccacaggagcagattccgctggtgacggagctgcggatgaaccggtgacaatttcatttaacagcaatgcttttgcaagatttccttccgcagaaattttcccactctggtaagcttcgagaatgtcaaggctgccctgcgcgagtgcaagcagatcagcagctgaagttgtgactaaaatgtcacggtcgtaatattcatatggttcaacatgaagctgtccgtttgcaatttccagatacagggcaccttcggcttctccctgtatgttaaattggatggcaagatgttcactgattttggaagcatctttctcctgataagtatcttttaattttgaaactaattcctgatatgtcatagtcagtcatttctcccttctccatctgctaattagattggtgattgcgcaactcgtttctgcgggctgtcgttttgtcggggacaccgtctgagcgattttgtgtctgccttagagggaagcttcgaataagcatgcccacggttctatttgcgcagtcacagagtgacatattgaaaataaagtaaatatcaagacaaatggggagtgggcgtaataaacgtttcgaagattccctcttaggcagactagaaattgcgaacggtgtccccgacaaaacgacagcccgcagaaacgagttgcgcacccacctgtttgctaattagagtatagcttttctgttatgcttgtcaagcaaactttatgaaattatcattgcgggaagccgctaaaaagcgtacaatagggataacaaaattttaaaataaaggaagggatcaagattatgagaaaaaccaaaacgcacaatgtactcaggcgtctgcttgcgtttgtcctgattgtttcactgcttccactggggtatgcgggcaatgtgatggctgcaacaaccggtacacggaacgtaagtattcaggttacatacggacagacggatgccagaaatgtctatggcatgatcaacagtatgcgcagaaatttatccgatgcatggtactgggatgcaaacaattacacgaagacatattgtaataatctgcagccgcttacttacgactatgcactggagcaggtagccatgaaacgtgcagcagagattgcactttcgtattcacacaccagaccaaatggcacaaattattatactgcttacagtgaaaacggtgtctatgcgggagtttatgcagagaatatcggtgtgaattattcttcagcatctgcacttcacaacgcaatgcgggaagacaatgcaaattattccggacaggaacagcgtagaaatatgttaaacagccagtttacagctgtcggaatcggacatgtatattacaatggctaccattactgggtagaggaattcgccaacacagtaaccagaactgcctatacggcaccaaacaaccagacaacaaccgtaaataatcttcaggttgcagagagcaatattacttctgaccagattgttgttccgtcatctattggaacctatatccagatgtctgtcggacagacgaaagatttatccggatgctatgaaaacattaaggtatcgaatcactggccaggcaatgcaaactgcccgattgtacaggggctgaatatgtatgtatccaatactgcggttgcctatatcagcggaacaaaactgatcgcaaattcgacagggtctacaacactgacactgaaccgtccggatggtaaaattcccctgcagattccggttcaggtaacaggaaccaataacagcagcaatacctattcgtactatattccaaatgcttccgttggtacaatcgttgaccagatatacaccggatatgatatccgtccgtctgtatcggtatggctgaatggcggatatctgtatgagggaagagattatacccttacttacagcaacaaccgcaatatcggtactgcatccgttacaattaacggaatcggaaattattatggaagccggacggtttatttccgtatcgtaaatcatgggaacggaaatacaacggtttcatccaataaccttgcaaatgcggtgatcagtaagattgcagcacaaagatatacgggatcttccgtaaaaccggaagttaccgttacattaaataacattgttttaaaagaaggttcggattactatctgaattacagtgacaatggtgcaccgggaaaagctgctgttatggtagtgggaaccggtaattatacgggatctgcaaagacaagctttattattaagccggagaagccggttatcacaagattgcgtgcacacggatcaaaagtccgtatcacatggctgccaggtacttccgttaccggctatgaaatctaccgctccaagggagcatatgattatggatacaagaagattgcggctacaaaagatggtgagatgcagtcttatacaagggcaaaactcaccaaaggaacttattattacaagatccgcagctatgttacggtagatggaacaaagtattacagtccatacagcagtgtgaagtctgtaaagatccgccgctaggatcaaagcataattgaaaataagaattaaaaatgtcggtagatatctgtcagatatctaccgacatttttggtatacaaagttaaaagatttatttcatctgtgcgacccggtcaaattcctcttcgatttctttggaaggttttggtgtcagcagactgacgattacgatcgcagcgcaggcaatcaggaatgcaggaagcagttcatagatgttccagataccaccgagcgggcggatcaggtatttccagataaataccatggaacccccgcagaccataccggcaagtgcgccccatttgttggtacgtttccagaacagggaaaacagaacaaccggtccgaatgcggcaccgaatccagcccaggcgaaagaaacgatggcaaatacggaactgtccggatttctggcaatgaatgcggcaacgacagaaattacaaggagtgtaattcttgcggcggccatgcttccgtttttgttggaagaatctttgcggaaagcaccgagaatgtcggaagaaaccgcagaagatgcagccagcagctgcgagtccgaagtggacatggtggaagctaaaatgccggcgagaatcacacccgcaagcagggcaaatatcacaccgtgctgggagagcagggcggaaatttttacgataatggtttcggaattcgatccggtcagcatctccagtgcgccgactttgctcatggtataaccgatcacaccgataaagacggcaacgaacagggagattacgacccagatggttgcaacgcggcgggacagtttcagttttttctcatcctcgattgccataaaacggagcaggatatgcggcataccgaaatatccaagtccccatgcggcagtggaaacaatggtcagggcactgtaaggagcggcctttccggtgtttacatcataggaaagtgtcatggagagatatcccggaagctcggaggcgttgtggataacagcaccgataccgccagcagtttctacaccaaagatcagaactacaatcagagcaaccgacatgatgatactctggataaagtccgttgtggaagcagcaagaaatccgccaagtgtcgtgtatgccacaattacgatagcactgatgatcatggcggtcagatactttaccccgaataagctggaaaaaagttttccgcatgcggcaaatccagaggccgtataaggaataaaaaagataacaataaaaatagcagcaatgacctgcagcatctttttttcatcgcgatagcggttgctgaagaacgatgggatggtaatggaattgttgcaggtgtgcgtatagcggcggatacgtttggcaacgatcagccagttaatgtatgtaccggcagccagtccgattgctgtccatccggcatctgaaattccggtgaggtaagcaacgcccggaagtcccatcagaagccagctgctcatgtcggaagcttcggcactcatcgcggttacgaaaggaccgagttttctgccacccagatagaaatcgtcagtactgttgtttttcttggaacatcggaaaccaatatagatcataccaataaggtataccataatggcaatcatgatgcatatttgtgcagatgtcataaataaatcctcctcttttgtacgctttcacacgctaattgttcatagtatagcacagatgataattataccgcaaccgggaaatcctgtttgacactatgggcaataagatgataaactgtctttgtctatacatgagaaaagcaattccgtttggccttcaacatgtgcttgccatgtttgtagcaaatctggcacccgtactgatcgtctgcagtgcagctctggttcggggcatggtatcatctgctggtaggtgctctgacacttatcgtgtgtctggtgtccagatatgtgttaaagggcgtttataagaatctgaatattctggtaggacttattttcggatatattctttctatatttacggttgcagggatagcacctatggtggatttccccggaattcaggagaccattgatcaggtaggatttttcagcattccaaaacttgtgttttttaccagtcacaagccggtatttaatcttggagcctttttaaccattgcgattgtttttctggtttctgcagcagagacaactggcgcgacaactgctgtgtgtaccggagcacttggacgtgaccttaaaatggaggaacttcagggctcacttgctgtggatggattttccagtgcaatttccggatgctttggatgcctgccactgacatcgttcagccagaatgtcggactggttacgcaggagtgtttgttgtttcccttctgctgagccttcttttgccgaagaagaaacaggcaaattaaatacacgttgttaaggtaacgttaaggtgcagcgatttttaagataaggatttggtgttatgatgatatcatcaaaaaggaaatggaggaatttgatatgtggagtcgcgcacaattaaagggaagggcgaaagcaacatttaaacgaaattattggaaatgtattctgatcagcctgttgctgacactgattgcagggggaagcggagctgcttcgggcaacctcagcagtgcaaccggttccttacatggatcggataatcaggcagacagttcctatgattatgacagcagttatgacagtgatgatggttcactgcgcgattttgaggctgggcttgaagaaggctttaaggacggactgaaagcaggaaacaggggaatgatgggcggtatggccgcagcagcgatcgcgatcgccatcggcatactcatagttctggtgatttttgtccttatacttctggttgatgtatttatcataaatccgtttgaggttggatgcaggagattctttatccgcaacttaaatgagccggcacagattgggaacattggatatggatttgacaataattacaggaatgttgcaaagacaatgtttttccgtgatctgtttacggttttatggtcattgctttttatcattccgggtattgtaaaagcatatgaatatatgatgattccgtaccttctggcagataacccgcagatgaccaaagagcaggcatttgcggaaagcaagcgtatgatgcagggacagaaatggaaagcatttgttttggatctgtcctttatcggatggtacattttatccggactgacacttggaattcttgcaatcttttatgtgtcaccatatgtgaatgcaacacatgccgcactgtatgaggcactgtgctatgcaaacccggctggttcaaacggatttacacagcaggcggatccggtgaattcacctttccggcaggagaatgtatgaattatacgattttaattgcagatgatgaaccggagatacgaacgcttctccggctgtatctggaaaatgaaaattatcagattattgaggcagaaaacgggaagcaggcactggaactgctaaagaaagaacatgtggatctgtgtctgctggatattatgatgccggagatggacggataccatgtgttgcaggaattacgtaaaacaagcaatattcccgttatgatactttcggcaaaggatgcggattccgagaagattctggggttaaatctcggggcagatgattatctggcaaaaccgttcaatcctttggaggcagtagcacgtgtcaattcaaatatccgtcggttttatgcgctggggacagcggaactgtcatccggtatactgaccgtccgggatctggaactggatccggaaggctgcgtactcaaaaaaaatggagaaccgattgaactgacttcggtagagtaccggatcatggagttatttatgaagcatccgggaaaagtgtttaccaaacaacagatctatgaacagggatggggtgacacttatgtggttgcagacaataatattatggtctgcatcagcaagctgagggcaaaacttgatgaagacccggcagcttatattcgaaccatccgcggattgggctatcggctggagaaatagcaatgcgtgatttacaggcatttttgatcaaacggtttatttatatccttgtactggtgacagttgcacagtcgctgatcagttttttgatcagtcaggcggttatgcctgtggtgatgaaagtttttttcccggattaccagaggcagtcatccgttggaaagacggatctgtttatttttatcatatgtgttctgttattgctgatagtaaatgccgtccggatgcttttgccatcaccgctgcagggaatgatgcagtggacaggggaaaggttacaggactggctgggcaatgcacttccggcgacaaggagttccgtcgtcgtacaggagatggaaggatggaaagccatcctgctgtttgtggttcttctgctgttaatggtgtgtatgctgcttccttatattttgggcgcgataacgttcgcgcggattgtgatggcggagtttcatcagatccaggaggagcgcgaacaacagcagagagagtttgaccgcaagcggaatctgatgctttccgatatcgcacatgatcttcggacaccggtcacgaccgtatccggttacgcaaaagcattggcggatcatatggtacaggaaccggaaaaacagcaggaatatctgaacgccatccagaataaatcggttcggatcggaaatctgatcaatttgctgtttgaatatgtaaaactggatagtgaagggtttgcattaaatggaaaaacacttgatttgtgtgaacttctcagagaaaatgcggcaatgctgtatgcagagatggaagaaaacggaatgacactgacagcagatattccggaggaaacgataccggtctgggcggatgaacttcagttatcccgtgtagtgacaaatcttctgacaaatgccatgcagcacaatccaaagggaacaagaatcggactgtttgcttatagggagctggagcggatttatgtattggtggcagacagcggaattctaattccggaggaacaggcgcagcatttgtttgatccttttacgcgtggggacaaagcgcgggtaagcgatgggagaaacggacttggactttccatcgtgtcaaaaatcgtgcagatgcacggatgggacttaaaactggtgcaacagccacaaattcagcattatgcaaaagcagccggatttgcaaaagcatttgtgatccggatggaaaatgccggtatgtattctgtgcatccgctaaaataaaaaagtggcagaaaagagggagagtctatgataattataagagcgatggatccgtatgaattgctttggatggtacttttgattgtgtttgttctgggagaacttgcaacaatcggactaacgtgcatatggtttgccgcaggtgcacttgcggcactggttatggcaatggcaggggtaaatccggtggtgcagtttctggtatttttagtggtatccattcttttgcttgctgcgacaagaccgtgggcgcgtaaatatgtaaatgctaaaatgcaaagaacaaacgcggatagcctgattggggaaaatatacggatttccgagcgcgtcagtaatatggatcagaccgggatggcagttgttcatggacaggagtggacggtgcgtacccgtaatgataatgagatcattgaaccgggagaagaagcaaaaattctggcaatcagtggtgtcaaacttatagtagaaaaggtataggtaaaggaggaaaaagttatgcctgttgtaattctcattgtagtgatcattgcattggtcgttattgtgaactgtgtgaaaattgttccacaggcgcatgcggtagttgtggagagacttggagggtatcttaccacatggtcggtagggctgcattttaaggtgccgtttattgaccgtattgcaaaaagggtattgttgaaggaacaggtggttgatttcccaccacagccggtaatcacaaaagataacgtaacaatgcagattgatacggttgtatattttcagatcacggatccaaagctgtatgcatacggtgtggaaaatccaatcatggcaattgaaaatctgactgctacgacgcttcgtaatatcattggtgatctggaactggatgagacactgacatcgcgtgagaccatcaacaccaagatgcgtgcaacgctggatgtggcaacagatccgtggggtatcaaagtaaatcgtgtggagttaaagaacattattccgccaaaggcaattcaggatgccatggagaaacagatgaaggcagagcgcgagcggcgtgaagccattctgcgtgcagaaggtgagaaaaaatctacaattctggttgcagaaggaaataaggagtctgcaattctcgatgcagaggctgaaaaacaggctgcaatcctgcgtgccgaggcacagaaggaagcaaccatcaaagaggcagaaggtcaggcagaggctacattaaagatccagcaggccaatgcagatggtctgcgtatgctcaaagaagctgctccggataatgcggtacttcagattaagagcctggaggcatttgccaaggcagcagacggtcaggcaaccaagattattatcccatcggatattcaggggattgcaggactgagcaaatccattgtggaaattgcaaaagaaaacggataacgcagatacatctgtgatgcattggacgaaactgctccatgaaaatggggcagtttttgttatctcagtaaggtctttattttgcacagggaaaatgttatactatagattattgatgtgggggtatattccacagttgggcgatgatgtggaaagaacaggagcgtaaatgaaatcaaaggttcggtttaagggaaaactgagatcgtatctctgctggccattgtggctgacgatcccgatgacactcgcagatgtggggctttatttttacgatgtgacggcaggctttttgctgacggtatttattgctatctattttgtactggaactgggattatattataataccagaccgcggcttgcaaatgagattatcaattttgccacacagtatgcaacggtacagaaaaaacttttgaatgagtttgaaattccatatgcgctgttggactatacaggaaaaattctttgggtgaatgaacgcttttccgagctgacgggagtggggagaaactatcataaatcaattacaacccttttttccaatattacccgtgagtttcttcagaaacacgaagatgcacagaatattacgattgaaaaaaaggagcgcattttccggatttccctgaatcgtatttattttgacgatatcatggaggagagcaaggaaattgacgtgaaggattccgatgaattcctgacggcactgtatctgtttgatgagaccgaactgcagcattgcaagcaggaaaatctggatcagaagcaggtatcggcacttgtttatattgataactatgacgaagcacttgacagtatcgaggatgtgaagcgttcgcttctgattgcgcttgtcgatcgaaaagtgaaccagtatttctcaaagatggacgcgcttgtccgcaaaatcgaaaaagacaagtattttgtagtatttaagtataaatatttacagaagcttatggatgaccggttcagtgtacttgaagatgtcaagacggtcaaagttggcaatgagatggcggttacgctgagtatcggtgtcggtatcaaggggacttcttataacgagaactatgagcaggcacgtgcggcaattgatctggcactcggacgaggtggggatcaggtcgttgtcaaaaatggtgaggacattgcatattttggaggcaaggcaaaacaggtggagcgcaacacccgtgtaaaagcgagggttaaggcacatgcgctgcatgaaattattgagagccgtgagaacgtgattatcatggggcacagcctgacagatgtcgattcccttggtgcagggattggaattttctgtgcagcccgtgtgcttggaaaaaaggcacagatcgtgatcaatgagccaacaacttccatccggccgcttatggaatgttttactccgggaaaaggctatccggaagacatgtttatcaatagtgagattgcgattgaagaggtaagtcgcaattcccttgttatggtggtggacacgaaccgtccaagttatacggaatgcccggaactgcttacgcgtaccgatacaattgttgtatttgaccatcaccgtcagggcagtgaagtgattgaaaatccgctgctgtcctatattgagccatacgcatcttctgcctgtgagatggtagcagaagttttacagtatttccaggaaggatttaagctttctccggcagaggcagactgcatttatgcaggtattttgattgataccaataactttatgaccaaaacaggtgtccgtacatttgaggcggcagcatatctcagacgctccggggcagaagtgacccgtgtgcgtaaaatgctgcgaaatgatatggcatgctataaagcccgtgcggaggcagtgcgtcatgcggaagtataccgcggtgcatttgcaatttctgtctgtccgagtgaggacgtggaaagtccgacgattgtcggcgcgcaggcagcaaatgagctgctcaatattataggaatcaaggcatcttttgtgctgacagagtatgcaggaaaaatatacatcagctcacgttctattgatgaaattaatgtacagttaatcatggaacgaatgggtggcggcggtcatttgaatgtggctggtgcacagttgacgggatgtacgatttccgaggcaaaacatgccattatgcggaccattgatgaaatgcttgaagaaggagatatacaggaatgaaagtaattttattacaggatgtgaaagctcttgggaaaaagggcgaaatcgtaaatgtgagtgacggttatgcacgcaatgcaattctgccgaagaaacttggagtagaggcaacgacaaagaatctgaatgacctcaaattgcagaatcagcatgcagacaaagtggcagctgaaaatttagagcacgcaaaggaactggcggaggagatcggaacaaagaaagttgttgtaaagatcaaatccggtgagggcggacgtattttcgggtctgtttccaccaaggaaattgcacaggctgcaaaagagcaggcagggctggatctggataaaaagaagatgcagctgggcgaatccatcaaggctcttggaacttatgagattccggtgaagcttcatccaaaggtaaccgcaacactgcgtgttcaggttgttgaggaataggaggaagttcgcttggaagaaacgctgatcaagcgggtgatgccgaacagtttggaagccgagcagtcggtcattggttccatgatcatggatcaggatgccattgtcacagccatggagatccttctgcaggaagatttttatcacaagcagtatggaattctctttgatgcgatgatcgaattgtacagcagcggacagccggtggatctggttacactgcagaataaactcaaggaaaaggatgtaccacaggaagtctccagtctggaattcgttggagaattggtgcgtgcggttccgacatccgcgaatgtcaaatattattgtaatattgtaaaagaaaattccatgaagcggaagctcatccgggtcacggaagagatagagaatgagtgctatgcgggcaaagaatcgctcgaaagtgttctggataagaccgaacatgatatttttgcattgttgtcaagccgtaccggtggagactatgtgccgattcgtcaggttgtcatgaacgcactggaaaagattgaaaaagcgtcacagcaagacggaaatgttacgggaataccgacagggtttattgatttggattaccggacagcaggattacagccatcggatctggtattgattgcagcccgtccgtctatgggaaagacagcgtttgttttaaacattgcacagtatgtggcatttcatgaaaacatgtgcacggcgatattttcattggaaatgtcgaaggagcagctggtaaaccgactgttctccctggaatcccgtgtagatgcacaggcacttcgtaccggtaatctgtcggatgctgactgggcgaaactcgtcgaaggagccggaatcataggggattccgaactgatcattgatgatacgccgggaatcagtatttccgagatgcgcagtaaatgtcgtaaatataagctggagcatgatctgaaacttatcatcattgactatctgcagttgatgtctgggtccggcaggagtacagacagccggcagcaggagatttcggacatctcccgttccctgaaagcacttgcccgtgaactgaatgtaccggtgcttgctttgtcccagctttcccgtgcagtcgagcagagaccggatcatcgtccgatgctctccgatctgcgagaatccggagcgatcgagcaggatgccgatgtcgtgatgtttatttatcgtgatgattattataacaaggatacggaactgaaaggaatttcagaaatcattatcgccaaacagcgtaatggtccgatcggtacggtgaacctcgcatggctgccggaatacacgaagtttgcaaatctggaacgataaaatttttcttatgatcatgcatcaaattaaatacatttgccgaaatgcttgcgctttggacgggtttgtactagaataccattaagccaataaggcaataatgatcattattcataaggaggattttattatggcatacgttatttctgattcatgcgttagctgtggtacatgtgcaggcgagtgtcctgtaggagcaatctctgcaggtgcttctcagtacgagatcgatgcaaatagttgtgttgattgtggtacatgtgctggtgtttgcccaactggagcaatctctcagggctaatcacataataaaacgaaacgaagagctgtctcttaaaccacggaggcagctctttttcgattatagaaagagaggaataacatggctacattaggaaatcctaagaacacgattgcagtattgcagaaataccagtttaattttcagaaaaaatttggacagaattttttgattgatacaggaattttagaggaaattatagaagctgcgcagatcacaaaggatgattttgtgctggaaatcggtccgggaatcggaaccatgacacaatatctctgtgaggcggcacgcgcggtagtggcagtggaaatagataccaatctgattccgattctaaaagatacgcttgcggaatataataatgttgatgtattgaatgaagatattttaaaagtaaatatttcaaaacttgcggaagaaaaaaataacgggaagccgatcaaggtcgttgcaaatcttccgtattacattacgactccgatcatcatgggattgtttgaaagccatgtgccgatcgacagtatcacgatcatggtacagaaagaagtagcggatcgtatgcaggaaggaccgggaagcaaggaatatggcgcactttccctggcggtgcaatattacgcaaaaccggaaatcgtagtcaatgttccgccaagctgttttatgccgcagccgaaagtcggcagtgccgtgatccgtctgacacgacacagtgaaccgccggttaccgtaaaaagtgaaaaactgctgtttcaggtgatccgggcatcgttcaatcagcgcaggaaaacactggcaaacgggcttgccaattatggtgcattcggtcttccgaaagaagaactgcaggcatgtattgaggaacttggcgtaccggttaatattcgtggagaggcactttctttagagcagtttgcacagctctccaatattatttatgatcacaggagtgctgtataaaaacagcgcgggcagtccatactatcatcaaagaccataaaacgaaatgatgatggaggtaagccaaatgagaaaacaacagtatatagccactgtcgcatgtctggtagcgggagtgattggatttgtcagtgtatatgccacggataaaggaaaagaacgcagggaagcagaacaggaaattgcagaaacaacacagcaggagacaccggcttcctacgaagtaaaaccgagaacaactgtggaagatgcaacaaaaaaagcagaagaacaggcattaaagcttgcagaacaggaaaagatggagcaggaggaaacccagcaggagcagaaacaggacgaggaaaaagctgtagaaacagcggctgcggtgacacaacattttgataagagttctgctgtctggccaatagaaggagatgttcttctggattatagcatggattccaccatttattttcccacgttagagcagtaccgatgcaatcctgctatggtgatcagcggaaaagtcaatgacaaagtatttgcaatggcaaagggaaaaatcacagatattcaggaaaatgaagagacgggatgtactgtgatacaggatctgggtgacggatatgctgcggtttacggacagttgaaggaactgaattttgcaaaaggggatacgccggaagctggtcaggtgctgggttatgtcagtgagccgacaaaatattatacaaccgaaggcagtaacgtctattttcagctgaaaaaagatggaaaagctgtggatccgaaagagtatcttccgcagatggcgatggatacgctggattgacattcatagttttttctaatacaataaaatgtaaacggttttggagctttatgcgaaaaaaccgtacataatcaagaggtatctcagcttaagagggataaaatatggaatttaaccagtacaatacaaccgtacaacagtggattcatacagttctggaaaatcgggaaaccaatgcggacgtggtgttggaatgctgtcgggatatcatagcgtatggacgggaaacagatgatccaaagctgatgggattcggtttcttttatggtggggaaatctattatgaattaaatgacggagcacattttttccatatgatgacagaggcactgacgtatctggaccgtgcagaggaatgggaacttgtggtgcgttgttacaattttctgggaatcgcatccatgagcagaggaaatccatcgcttgcgcttgactattatatgaatggtcttaaggacagtgatacatatgatcttccaatgcaaaagattatgattctgatcaatatggggttattgtatctggagtgtgggcattatgcagattccgagaattcttttttagaagcttatcagattttgcagacaaaacagaaggatgaaaagtataatttttatatgtatgctttttatggaaatatggcagaatgtctgatcctgcaggatcgtctggaggaagcaaaaccatatctggagtatctgcataaagatggctgggaacaggttgcccttacagagcggctgtttatcgacatcgtggatgtaatttattatcacaagatgggagatgtacagaagcggaatgagagtattcagatgatccatcagaatcttccggataatctgacggtactggactttttttcggattattaccgttgttgtctggtgttgctggaaacggaccaggatgaatcgttctggcgtatcattgaagtaatcgaaccacaggtggtgaattttaagatcattaatctgcagctgaaagttctgtccctgaagatgaaattttaccggaagcataaccagaatgcggaatatctgcaggcggcagggctttactatgaattgtctgaacggaatgaagtagtgacgcgcaacatgctttcgagtatgattacgttgcgcaaaaatctggaaaatatgcgcaaagccagaatgaaggcggaacgaaagaatcttgtattacaggagcgttccgagcaggatccgttgacgcgtatggcaaacaggttccgtctgaatgattatgcagaagaggtgtttgcctattcgcaggagaatgatattccggttgcgatggaaatactcgatattgattattttaaggaatataatgataattacggacatcaggaaggagaccggtgtctggtaagtatcgcaaatacgatccgtaatctggtggaggaagcggaaggattctgtgcacggtatggaggggatgagtttgtcattatctatgcgaatgtgacacgggaacaggctgtttcctttgcagaagagttgcgcagatgtgtacttgcattagaaatggaacaccggttttccaaggcacttccggtagtgacgatttctcagggaatctgttggggaatcccgcgcaagggaaaccgcagctgggattttttgcatgcagcagataatatgctttaccgggtgaagaaattcagccggaacaattattgtgtaggggggcttgatgaaactgaagacgtgaccatgggaactgcattgtagcggcatggcagtcgaaacctggcaaaaaagaaaaggatgaaaatggaaacagttaaatttgaagaattagggttatatccgcagcttctgcgggcaatcaaagagatgggatttgaagaggcaacacccatccagtcacaggcgattccggttgtgatgagcggggtagatgtgatcggtcaggcacagaccggaaccggaaagacagcttcttttggaatcccccttttgatgaaagtggaccctaataataaaaaaacacaggcaatcgtactttccccgacaagggagctggccatccagagcgcggaagaaatccggaaacttgcaaaatatatgcatgggatcaaagtgcttcccatttatggagggcaggatatttcccgtcagatcaaggcattaaaaggtggggcaaccatcatcatcggaacaccggggcgtgtgatggatcatctgcgccgcaaaaccattcgctgtgattatattaacacgattgtgctggatgaagcggatgagatgcttaatatgggattccgcgaggatatagaaacaattttatcctatatcccggatgaagaccggcagaccgtacttttttcggcaactatgccaaagccgattctggaaatcacaagaaaattccagcatgatgcgactacgatcaaggtgacgaagaaagaactgacggttccaaatattgaccagtattattatgatgtgcgcagaaatgataagatggaagtgctgacacgcctgctggattattataatccaaagctttcgctggtattttgtaataccaagcgcatggtggatgaactggcatcggaattacaggggcgcggctatgcagcagagggaattcatggcgatatgaaacaggtgcagcgtgaccgagtgatgaaaaaattccgaaatgggaaaacagatatcttgattgcaaccgatgtcgcagcgcgtggaattgatgtggatgatgttgaagcggtattcaactatgatctgccgcaggacaatgaatattatgtgcaccggatcggaagaaccggacgcgccggccgtaccggaaaagcgtttaatttcgttaagggcaaggaagtatacaaactcaaagagatccagcgctattgcaagacaaagatcaaggcgcagccaatcccatcttcggatgatgtggcagcgatcaaggcggataagattcttgacggcatcggacagattatcgaggacggagatctgcgcgatatgattgaactgatagagcagcaggtgaacaactctgattataccgcgatggatattgcagctgcatttttaaaacaggcaatcggcggagtggaattatcaaaggaggatcacgaatttgatgatgcattagcaggagataccggagccgaggaagggatggtacgtctgttcattaacatcggaaagagccagcggatccgcccgggagatattctcggggctgtagccggagaggcaaagattccgggcaaacttgtgggggcaattgacatgtatgataattacacatttgtcgaggtgccgcaggagtatggaaaagatgtattaaaagccatgaaaaatgtaaagatcaaaggaaagtcggtcaacgtggagccggcaaatgcacgatagaggataagacgacatgccagataccgtgggttttcaggatttcagtgaaatcggaaacccacggtttttgcatttagaagaaatatcagatatgaaagtagtaaataaaactacgtataaaagaaatgaaaacaaatacatgttgacaaagaaaccacattgccatatactgaaaattgtttgatagtcaaacaattttgaaatatggaggaaacgtgcatgataagcacatatacatcaaagttgaaacaactgcagatcggggatctgattgcaaaaattccgatcatccagggtggcatgggggtaggaatcagcagaagccatctggcgggagctgtggcaaaggagggcggtgtaggtatcatttctactgcgcagatcggctacgatgaagaaggcttcgagaatgatcaggcaggctgtaacttaaaagccatcaaaaaacatatccggaaagcaaaggagcttgcctgtggaaacggacttgtgggtgtcaatattatggttgcattaaagcattacaaagagcatgtccgggcagcagttgcggcaggggcagatgtgattatcagtggagccgggcttcctatgaatctgccggagcttgtcagcaaaacctgccggacaaagatagctccgattgtatcctcgaagcgtgcaacccagctgatattgaagatgtgggcgcaccgctatgaccgcacggcggactttattgtagtggagggaccgaaagccggcgggcatctggggttttccaatgaacagctggcacatatggatgccattaattttgacggagagatccggcagattatcgactgcaaaaaggaatacgaacagcggtatcagaaaaatattccggtcattgtggccggcgggatatttgatcagaaagatatttcgcatgcgctggatctcggcgcagatggtgtgcagattgccagccgctttgttgcaaccgaagaatgtgatgcatcggaggcatacaaggaggcgtatattcacgccagtgaggaaaatatcgagattatccaaagcccggtcggtatgccgggacgtgcattgcgcaataagtttatcgatcgtgtaaagcgcgcaaagctgccaatcagtaagtgttacaactgtctggaaaaatgcagtccgcagaaagttccttactgtattacgaaagcgttgatcgatgccgtgcgtggggatgtggaaaacggtctggtattctgtggggcgaatacgggacggattcacgagattactacggtacatcatctgatgcaggagctggctggagatctacaataaaaatggtttgtgtgatttttccttggaatcaaagaattcctgtagtaaaataagaagtaaagcagtaatgcagatacgggaaaacaggaaagaaggagaacacgcagcatgacggtggccgcacacggtggggatatttatcaaaatcagatcacatatgatttttctgtaaataccaatccgctgccgctgccggagatattgcagaaacggatggcggaagcggcggttcacagcaaccgttatccacagtatgacaatgtgctgttgcgggaacggcttgcagcactttatggtttttcaacagaagaagtagtgtgtggcaacggagcatccgaattatttgttgcgattgtgcatgcactgcgcccgaagcgggtgggcattttggctccttctttttcgggatatgcctgggcagctcagacagtgggagccgaggtatgcagtatcccgttgcaggaagaaaataattttgccatggacatggcacagatggagtcattgtgcaggcatctggatggaatcagcttattatttttggcgaatccagcgaatccggcgggaaacaaaatggaagcgtctcttttggagacgcttcttgacgtgtgtgaaaagaaacagattactgtggtgctggacgaatgtttcattgcattcacggggacggaaggatatgtttcctggatccggaaatatccgcatctgattgtcgtgcgggcatatacaaagatctatgcgattccgggaattcggctggggtatctgctggcgcagaaagatatctgtgaaaaaattgcgcatcagctgccggagtggaatgtatctgtggttgcgcagcggatcggcatggatattctggatgattcgcttcctggttggagtcgtagaaagtatctgaaggatacgattgagctgattcaggaagaaaagcactttttaaaacacgagttaacaaaaatatttggagatcaaatgaaaatttttccttctgaagctaattttttgttgctgaaaacacaaattccactgtacagattattgctggaaagaggaattctgatccgaaactgcgcaaactatacaggactgggacaggacttttacagaattgccgtaaaaggtcatccggaaaatgtacaactgattgaggcattgctggatataaagaagaaaggggaagaaaaacgttatggaaaacattgaatatgttcttccgggagagattgaaaaacgaagttttgccatcataggggaagaactaaaggagcgtggtatcgtgctcccaccggagcaggagccggtgacaaagcgcgtgatccatacaagtgcggattttgattatgcaaagacgatgacgtattctccccatgccgtgcagattgccaaagaactgattgcaggtggcgctgacattgtcacggataccaatatggcgcttgcaggcatcaacaaaaaacggttagcggaattcggaggaacggtgcactgttttatggcagatgaggatgtggcgcgggaggcaaagacacggcaggtgacacgtgcgacggtcagcatggaacatgcagcacatattgacaaacctgtaatttttgccgtgggaaatgcgccgacggcattgatttcactctatgaactgatgcagaaaagtgattggcgtcctgcatttattattggagttccggtgggatttgtaaatgtagaggcggcaaaagaactgattttaaaaacagatgtgccgcatattgtcaaccgcggtagaaaaggcggcagcaatgtagcggcagcaatcgtaaacgcactgttatatcagatccggccggtataaaggaaagaaggaggcgtatctggtgtgaggtacggatttacaaccggcagctgtgctgccgctgctgcaaaggctgcggcatatatgcttctgacgggaaaaataaaaaactgtataacgattgagaccccaaaaggaattccatacaccgcggaagtgacggatatcgtgcgcggggaatctcaggtttcctgcgctgtggtcaaggatggcggcgatgatccggatgtgaccagcggaagtaaaatctgtgccacggtcaccgcggacaaccgtggggatggagaaaaagaacttctgcagattgacggaggaaagggtgtgggccgtgtgacgagacccgggctggatcagcccgtaggcaatgccgcaatcaatcatgtgccgcgggaaatgatcacccgggaagtgcaggaagtgtgccggatttgtgattttcacggaacactgcatattctgatttctgtgccggatggggaagcacttgcagagcgtacgtttaatccaagactggggattgtcgggggaatctcaatactggggacgacaggaattgtggaaccgatgagcagtcaggcacttaaggagaccatccgtgtggaactccgccagcagcgtgcagaagggcagaccattgcggcagtttcaccgggaaattatggattggatttcatgcagcagacctatggatatgatcttgaccgcagtgtgaaatgcagtaattttatcggtgagacgatcgatatggcggcggaactgggattttgtgcaatgcttctgaccggacatattggaaaactgattaaggtggcgggaggcattatgaacacccattcccatgagggagattgtcggatggaacttttagcggcagccggcatccgtgaaaatgtatctttagaatgtttaaagaagattttagattgcgtcacaaccgaggaagcacttgcgtttattgatgccgaaggtaaaaaagaagaggttatggaagatatcatggaaaaaattgatttctatctgaaaaaacgtgcggccggtcggttacagattgcttgtattgtctattccaatacttacgggctgcttgggatgactgcaaaagcagaagaattactcaggaggttgctatgatttattttgtcggagcaggaagcggggcaccggatctgattactgtgcggggaatgcgtctgctgcagaaagcagatgtcatcatctatgccggttcgctggtcaatccacagcttctcgattatgcaaaagagggctgtgagattcataacagcgccaaaatgacacttgaagaggttatttcggtgatggaacaggcagaaaaaaataatttaatcacgattcgacttcatacgggagaacccagtatatacggagcggtgcgggaacagatggatattctcgatcagaaggggattgcgtatgagagttgtccgggtgtgagtgcctgttttggagcagcggcatcgctgaatctggaatatacccttccggatgtgtcacagtcactgatcatcacccggatggccggaaggacggcggtaccggaaaaggagagtattgagagttttgccgcacaccatgcttccatggcaatttatctgagtaccggaatgctggaggaattatcacggcgccttgtaaatggcggatatgagccggatacacctgcggcactggtgtacaaggcaacctggtcggacgaggaagcatatatctgtactgtgcaggagctgccggaggtggcaaagaaacataatattacaaaaaccgctctggtgctggtcggggatgtaatatcaaatcagcattatacgcgctccagactctacgcaccggattttacaactgaattccgcaaggcaaaaacaccaaaaaacgcagaagacgatagattaatgcgtgacacggatgcgggaaaggagttaccggaatgatcctgtatatgacctggttttcggaacgtggaagagagcttgcggcacgaatcgcggaactttcactttctgtttcgtatggattttggcagagccgttacggtggtcaccctgcggtttcaaagatacagataagagaaagaggaaaccggtcacttccggattttctggaagaggcttttgcacaacagtttcccgtgattttcattggagctctcgggattgccgtacgggccatcgcacctttgatccgccacaaaaccgtggacagtccggtactggtgctggatgaggccggacagtttgtgattccggtgctgtctggacatctgggtggtgccaatgaactggcgcagcagatcgcagaatcattgcattccgctgcggttgtgacgacggcaacagacgtgaatgggctttttgccgttgatgtgtttgcaagaaaaaatggcctgcgggtgtgtaaccccgaagcgatccggcatgtgtccggaaaactgttacagggcgaaatcattgtgatggcggtagatccggcatgtatgtccccggaggaggtggcaaaattacagccgccaaaggaagtaaagctgatttcgtggaacgaagcacaggcggaacatgctgtggatgtgtggattacaaaaaaagagccacaggaagaccgtaaaacgcttgttttagctccgaaaacagccgtacttggcatgggatgcagaaaaaataaaagttataacgagataaaacaaatgataaaaacatttgtggatagcagaaaaatagacctggatgatatctatgccctggcatcggttgatgtgaaggaaaaagaacccggtctgcaggaactggcacagcatttgcgggtaccgtttgtcgttttttctgccggagaactgaaaaaagtgccgggtgatttcaccgcatccgcgtttgtggctcagacagtgggagtggataatgtgtgtgagcgtgctgcggtcgctgcagcagacggaggtagtttgctgatacataagcaggctatggatggcgtgacaattgccgtggcaaaacgggagaaaatcgtattgcagtttgtgtgaaacgaaaggaaggagaaagaaatgaaacaccggatttatgtggtcggtatgggaccgggacaggaaaatatgatgacgcaggaagccatgcaggtgttagaagccagtgatgtgatcatcggttataccgtatatctgaaattgcttggggaacgatttgggtgcaaagaattattgtctacaccgatgcggcaggagcgggaacgctgccagatgtgtttcgagaaggcaagagaaggcaaaaaagtggcattgatctgcagcggagatgccggaatttacgggatggcatccctcatgctggaaattggaaaattatatgatgattgtatcattgaagtaattcccggaataacagcagcaagcagcggtgcggcagtgcttggggctcctctcaaccatgatttttgcgtgatcagcctgagtgatcttctcaccccgtgggagaggattaaaaagcggctgattgcagccgcggagggagattttgcaatggcaatttataatccgtcgagccataaacgggcagactatctggagcgtgcctgcagaattctgatggaacacggggtggaaccggagcgtgcctgtgggtatgtggaaaatatcggacgcgatgatacgcatgccgtaacccttaccatggcggaactggtgcatacacaggtgaacatgtttaccacagtatttatcgggaattcccagacaaaaattattgatggaaagcttgtgacaccgagaggataccatatatagcagcagaaaacggggaagaggaataagatggcagagaaagtgttaatttatgcgggaacaacggaaggtcgtcttctcgcacaggaactttcacgggcacatattgcctgtgatgtgcatgtagcaaccgaatacggtcagatggtcatgccggaacttgccggggtgaaggtctgtgtaggaagactggacgtagaggatatgcgcgccctgctgaaaaaaaacggacagaacaactatgcggcagtcgtggatgctacgcatccgtttgccacagaagtgtctgccaacatccgggagagtacaaaaggaagtggaattccatatctgcgtctccagcggcgaatggacgatggaatctgtagcataccggaaaacgaaagcatgaaagagcgcgctggaaccgtgcatgtgtttgccgattatgaaagctgtgtccaggcacttacggacacatctggaaacattcttctgacaactggaagcaaagagctggcggtatttgcacccctgaaggagcgtttgtttgtgcgtgtgcttcccggattggagagtatcggtctctgtgaaaaggcgggtatccgcggaaagcagattcttgcgatgcagggcccgttttcggaggaaatgaatctggcaatgatccatcagttttcgatccgctatctggttacaaaagccagtggtgcgcacagcggatttcaggaaaaacttgcggcagcacagaaggcaggtattacggcatgcgtgatcgggaaacaggaacaggagcagggaatgtcttatgcacaggtaaccgaaacactttcccgtttgcttggacatacgatttccggtcgtccggaggtggaaatttccctgattggcatcggtatgagtgcggcgacactgacacaggaagcaaaaagagcgctggaagagtctgatgtggtttttggggcagaacggatgctcgaagtggtggaaaacagtaaggaaacctatcctttttatctcgcaaaagatattttaccggttttaagacaaaaggaatcccaaatggatggccagaaactgaaagtctccatattattttccggagatactggattttacagcggaacagaaaaaataaaaacagaattaaataaaaataattacaaaaaaattcgtatttttccaggaatttcatccgtttcctacctctctgcggcaacgggaattgcctggcaggatgcaaaaattataagtatccacgggaaaaaagatgccgcagagaccagagcactcgttctcgatgcaatccggcattttcccaagacgtttctgctggtttccggggtggaggatgtccgacggatcggatgctggatagaagaagaaaaattgacgcaaacccgcattattgctggatttcagctctcttatggcagagaaaaaatccgcgagctatcgtatgaagaggcaaaaaatgtaaaagaagaaggtctgtataccctgttattatgcaatgaaaatgtgcaaaaaagacgtcttgttccagggatgtctgatgaattatttttgcgtgtcgtggaaggggaaaaaacggttccaatgaccaaggaagaagtgcgtgcactttcattatgtaaacttggcctgacagaagatgctgtggtatacgatgtggggagtggtaccggatcgattgcagtggaatgtgcaacgtgcagtccggggattcgtgtgtacgccattgagcaaaaagccacagcacagcagcttctgcgccggaatctggaaaaatttcatctggcaaatgtgattccggtggatgggaaagcaccggaaatattggaaccactggaacctccgacacatgtatttattgggggaagcagtggacgccttgcggatattctgcatgtcatctgggagaagaatccacggacacgtgtggttgtcaatgccataagtcttgaaaccgtggctcagattacagaacttgctgcagggaaaatgcagacagaaatcatacaggtgcaggtcagcagagcaaaaaccgtgggaacctatcatctgatgcaggctgagaaccccgtatatatctgtgtgctgacgatggcataatgaggagaaaactatgttacacagtggaatggtactggcagcgccgcaaagcggcagtggaaaaacgacaatcacctgtgcgctgctggcagcaatgaaaaacagaaaacttgcggttcgtgcgttcaaaagcggaccagactatattgatcccatgtttcaccgtcaggtaattggtgtaccatcgcgcaatctggatacgtttttttcagaggcagatcagatccgggaactgtatgaatatgacagggagaacttcacctattcggtgatcgagggagcgatgggattatacgatggtcttgggggcacacaaaaagagggctccgcctatcatctggcgcagactctggatctgccggttgtgcttgtgctggatgcccgtgggatggggcgcacgatggttgcacttctggcaggtatgttacagtatgacagggatcaccggatcattggtgtgatattaaaccgcacatcggaagggttctgccggacaatgacgccggtgattgagaaagaactgggccttccggtgctgggatgttttccggtacagaaaagtctgcatctggagagccggcatctgggactgaaaatgccacaggaaatggaaggtctgcgcaagcaggtcaatcaggctgcggaaaaactggaagagaccgcagatctggatcggatgctgcagctgttgcaaagctgggcacttttacatgcgtttcgggacggaaaaacgaaactgcctaaattacaggaaccgggaaaagaaaaagagattttgcagaaaaggaaaaaacagcaggaggaatgtccggttattgcagttgcaaaagatgaggcattttgtttttattatgaggataacctgcggcttctggaagcgtatggtggaaaactcgtctggttttcaccgcttgcacaggaaaaaattccagaggaagcggatgcgcttcttctgggaggaggctatccggagttgtgtgcccggcagctttcagaaaatgtctccatgcgcaattccatccgggaggcaattgaaaatggtatgccatccgtggcagagtgcggcgggtttatgtatctgcatgaatccatgacagatgaagaaggagaaaactggccgatggcaggtatcataacgggcagctgtcataaccggggaaaacttgtacgttttggctatgtgaatgtgacggaacagacgtcccatttcctggcgggaaaacctgtccgtgcacatgaatttcattactatgacagtgacaacaatggagaaagctgcgtggccgtgaaaccggtaagcggaacatcctggacatgtatccacgaggacgacagaaactggtggggttatccacatttgtattatccgtccaatccggcatttgtggaacactttgtacaggcagcacgcttatatcacagagaggggaatgcaaaataacatgaaaaaagcaattttaattgtgagttttggaacaacctatccggatacccggcagaaaaatattgcagccatcacgcggcaggtccgggcattgtatccggatgccgtggtagaggaagctgtctcgagtacgattgtgcgtaacgcaatgaaaaagcgcgagcatatagaagcaaagagtccgacggaagctctcgaaagcatgaaaaaacagggagtgacgcatgtagctgtatttcctacccatgtgattgacggaattgaaaatcacagactcaaggaagcggcgaaaaaatatgccggtgctttcgaacagattgcagttgccgatgcgcttttggcaaaaccgcaggattatgaggatgtggcaaaagcactgtgggagtcgctgaaggaagaggtgggagatttcccattgattttgatggggcatggaaccgaacatgcggcagatgccagttatgcgatgatggaacagtcgctgcgtgcttatgcaaagcatgaaatctatatcgcaacagtggagggaagtattaccattaaagatgtgattgcacggatgaagtccgggcagcagagcagacagaacgggaaagtgcttcttacaccgtttatgctggtggcgggagaccacgcaaacaatgatatggcaggcggcatgcaggatggggagcagccggatgaggattcctttgccggaaaattacaggcggcgggataccggccggaatgtgtgattcggggaattggggagtatccggctgtccgggaagtgtatctgactcatttgcgacaggtaacgaaaaaattattttgtgatttaacaacagaaaatcgtccgggtatcctttatggaatcggtgtgggaccgggagatccgaaacttatgaccttacaggcactggaaacgattcgcagctgtgatctcattgtgcttccggcagtgtcaaaagaggaatgttatgcgtatcggatcgtggagcaggtttgtccggaaattgcagatatgccgcttctttgcatgccatttccgatgatcaaagatgcgcagaaactggaactggcacacaaacggatttatgatgctgtggaagattatctccgacagggactgcgggtaggaatgctcacaattggagatccggggatatattctacctatatgtttatgcacagatgtgcagcagatgccggctgggaggcgcggatcgtaagtggtgtgccgtcgttttgtgcagtagcggcaagactggggatttctctgggagaaaaagatgaggaaatccatattattccggcggcgtatgacgtgcgtgagtcactcggttttcatggtacacgcatttatatgaaatccgggaaaaaactcgaagagttattacgggtgctccgggaatcgatgcaggataaagagagaagagcgcaccaggacatttatggaatatccaattgcggcatggagaatgaacaggtgtattgtggcctggatgaactggaacaggcaaaaggatatctgacaactgtgattgtgaaggaacatgtggtacaatagaaagcgttcgattttagaaaaatcttttaatgtctggaaaaaggagtgtcatatgtggaagatcaagcacatttttgacggagagtatgggtgtgaggaactggcagaagggcagcggccgaaggtgtcagtgactctgattaatgaaaaagaagaagaaacctgtttttctgtggaggacggctggctgattgaacatggattaaatgagggagatctctggccaaaagaagatgagttcctataaaaacagtgaaataaaaagagcaggtgatacgaaccgtatcacctgcttttgctttgcattttataaggagatgtcaatatgcatattctgcgtactgattaaggacataatgttgtcctgtacagcggaattcatcttacgggaaagcttgacgagcttctgcggatattcctgatccgaagagagcagctttcgtgccttggaattattggcagttttcagcagatccttgttgaggtctaaagttccgtcgctgttaaccgtgataccaaggtctgacagttcatctgcatgttttttactcagcgtgttgagctgcttgacatagcgtttggtttcgtagtcggaactggattttccggaagtgatcgtataattgtaagtatccacaaaggcttcaatggcggcctgtgatgtcttattgagatcatcgtctttctcatcggtgtcagaaccgaaatcacttttggaaagtcgcttggcagccctgtttaaagcacggctgtcttcgtaggaaagctccacattactgtaactggaccggccggaggttttggctgctttctgattgttggtatagaaatttcttaaaaaataattcgtggataatgatatcccagaagaaacttttatggacataataaacatcctttctttactaaaaggttataatttctatatttctacaatttacatcggcacttgttctttacttcttaacccaaacagggtaaaatattttattatagatgtgatacagagcagtaaaattttaggaggcaattacagttatggaacaaaaatcgtttggaaagcttgccgatggagaaggggcaacgctttatactatttctaacacaaaggggatgtgtgcacagattacagatttcggagcggcgatcgtatcgcttgtggtaaaagataagaatggaaaagacaccgatgtggttcttggctatgaagatgcacagacatatcagcagcagacagcaagttttggagcaatcgtcggaagaaactgcaatcgtattgcagatgctcagattgtaatcaatgatgtgacatatcagcttgagagaaatgataacgagaataatctgcacagtggatcacaggctacatccagacgtctgtgggatgtggaagaacatactgcaaacaaagttacatttgtgatcgaagatgcagatggacagcagggatatccgggaaatgcagttatgaaagtgacttatgaggtgaccgaagcagatgaactttccattacatatcatgcaactgcggacaaaacaactgtttttaatatgacaaatcatgcatattttaatttgaatggggcaggcagcggtactgccatggaccagattttgcagattcgtgcttcccattatactccggtaatcgatgcgaagtcgattccgaccggagagattgcgtcagtggagggaacaccgtttgatttccgtgaagccaaaccgatgggcagagatattgagcaggcaaatgatcagctttcttacggccatggatacgatcataacttcgttttggataaggagcgggcagggcttgaaaagattgccaccgcatacagtacaaagagtggcataaagatggatgtgattacggattgtatcgggatgcagctttacactgcgaatttcattcagggacagaaagtgcagggcggagcagtatgcaaagatcgggatgctttttgtctggaaacacagtattttccaaattccatcaatgagccaaattttacaacaccattgacagaagccggaaaatcatatgatacaaaaacggtctatgcattttcgattgcatagatataaatacaggatgtaaaggggaagaggatgttagaaaaggcagcctctttttcttttggaatcagaatagggtaggaggatcaaatgaaaatcgtatttttggatgcaaaaacaattggagatgatattgatctgtctgcatttgaaaaactgggagaggtggtaacatataatttttccactacagaagaagctttggaacggaccgtggatgcagacgtgatcgtgttaaacaaagtggagattaatgagcattcgattggaaaagcaaaaaaactgaaacttgtctgtgtgacggcaacgggaacaaacaatctggataaggaatatttaaaaagccgtggcatagaatggcgtaatgtcgcaggatactccacggaaagcgtagcccagcatacgtttgccatgctgttttatctttgggaaaagcttgcgtattatgatcagtatgtcaaatcggagaaatatgtgggagatgttatgtttacccattttgagaaaaggtttcatgagctgagcggaaaaacctggggaatcattggtctgggaaatatcgggagacgtgtggcggatattgcaaaggcattcggatgccgggtgatctattattccacttccggtaagaattctcagcagggatatgaacgtgtggaatttgatgcgttgttggaacaatcagatattgtttctgttcatgcacctcttgataaaaatacgcggggactcatgaaccgggaagcatttcgggaaatgaaatcgtctgcagtttttttgaatcttggacgaggaccgattgttgtggaacaggatctggcggatgcgcttgagaccggagaaatcgcgggtgcggggctggatgtcctttccgcagaaccaatgcggaaggataatccgcttcgcaaaatcaaagacagcgaaaagctgattatcactcctcatattggctgggcaagcgtggaagcacgcacgcgtttgatggaaattatctgtcagcagattgcggatttccaaaatcagattatattataatcatatgtctcatatataataggaagaaactcttttattcatcacaaggcagaccactcagaaacgaaagattaccgtacgcggatagaaagcgtgcggtttctttttgcgggaaaccagagtgctgcagatgcgcgtattggaccagacgttgatgataaattttttcagcctgatcataaagctctggaaaagaagccgtggaagatttctttgtccatggatgaatccagacgcggtggtgcagattcatcggatcttttataaaacgataataatcgctggcaaccatcggagataaaaaagcacgtccaaggaaaatcttttcgatcagacgggataatactttcttctggccacttggatcattcagtaaatgggttccaagtttcatccagaatggtgcaccgctcaggaaaaactcactcacggaaatatctggataggtgttccggtatgcgtaacacagcattcgcacaatgactttccgctggagcgtcgtcagacgaatcgttgcgttctgatgaaactgggaaggatacagatgctttttctcatataaaagttcggaatcgagttccgtttcgaaataagcatgctgaccaaaatattccgtattggaaggtggggtctgggcattatagcctgtaaatgcatatacatagggatgaatcgtacaatccagtgtgtaatgacccataaatccacagatgtaagcgtctgcaatagagagggaatgttttttccctgcaaaaagtttgcggctttgcagcagattggcaaaaaactggccagtatccttgcgatgtgccagatctccaatattttttcgatgcatcaggtaagagggaagatagtaaaaaaacagatcaggtccctgcagaccaagtgcatatgcgctgtgatcgcgtcggatcatattgtgcatggatgtggaggtcagacgtctgcatgcgtctatgccaaacagatagtgggtggtaaaacccggcatacaatcactccaatcttcagtaaataatcaattttttaaagaaacaacagcattatagtatattttattgcttcggtcaattttcagcagatgtaaatattttatgttgactttacataagatagtggtataatgtcacgtagtattcaaaactacgttttgagtctgcaacaaaaattatatccaaaaatcgttggaaaaatgcacaaatcatgtttttttagacattttcagaagattgtatattgcaaacatacatggttttgtgattgaatatgttcattcggtggaaaaacaactatacttccaatggatgaaatatcttatgatttatttacacaagaaagaaaacggaggagtaagaaaatggcaagtttaaaagatgcggcagaaagacaggcgttttcgctcgctatcgatgctacgttaaagagtctgaataaggacagagagaaaggtttgctcaatattgtaaacctcgcacagaagtttatgggaagcaatttccgttctgaggcatacgaaggcgcaaagaaaatgattcagaatccggacagcaagtggatgcgttatgtgaatcgtcttctggatgagacagatccgcatgttgccaagatgacagcactgaatcttggatatcaggcagcgtttgcaggaaccaagaagattcgtaaaatgagagaaattgagaactgcaatattccgtggctcattcttatggacccgaccagtgcatgcaacctccattgtacaggatgctgggcagcagagtatggtcataaattaaatctgacatttgatgagttagacaacattgttacacagggtaaggaactgggcgtatatttttatatgatgaccggtggagaaccactggtgcgcaaggctgatattatccgtctgtgtgagaaacacaatgactgcgcattccattgctacacaaacggaacacttgtagatgagaagctttgcgaggatatgaagcgtgtaggaaatctttccctttctatttcccttgagggatttgaagatgccaacgatttccgacgtggagaaggtgtatacaataaagtccttcacgcaatggatctgttacatgagaacggactgatctttggaaacagtgtatgttatacaagcaagaatatggatgcggttaccagtgatgagttctttgatcttctgatcgagcatggaagccgtttcgcatggtattttcatctgatgccggtaggaatgaaggcttcaccggaactgatgccgaccaaggagcagagagaatatatttaccacagactgcgtgaagttcgtggatttgaaggtggaaaagaaatcttcgttatggatttccagaacgacggtgaatatgttggaggatgtatcgccggaggacgtaactactgccatatcaacccgaagggtgatgtagagccatgtgtatttattcactactctggagcaaacatccgcgagaaatccctgcttgagtgtctgaagcagccgttgtttatggcttaccgtgataaccagccattcaacgaaaacatgcttcgtccatgtccgatgcttgagaatccggagattttacagaagatggttcatgagaccggagctcattctacagatgtagaacaggaggagccggttgagcatctgtgtggaaagtgcgtagattacgcaaaggattggaaagaaacagcagataaactctgggctgcacatccatataagcagaagggatacacaaacttcaaaaagaaataattcacacaaaattaagatttcagacaggattcccggtttacatgccgggaattttgttgtattgtaatggcatgaaaccaaaatttaaaatcaaacttcaatacgataaaaaaaataacatctgggcggcgattgcaattatattggcagtcgtaatgtatgtgaccattgatttttccatcgttgcattgatcgcatatggatttttgtactatctggtaaaaagtctgcatctggaactggatgaccggtgtccgtggctctggacactgattctgtttatcggaggttcctgtctcaccactttttcgatacagtatatgctgcttgatcctgaaaactttacgaggacaacgtacgagaagctctttttaaatgtgctttgctgtctgattgtctattttgttgtgcagatttttacgaacaacagtgggctgacctgcatcattgcccatgtgtcgctgctttcgtttggatttgtagactattttgtatatctgttccgcggaaatgaatttacgttttccgatatcagatccattggaaccggtctgagtgtggcgggaaattataaattgcaattgaacgatcgtggagtatatgtgatctttctggcagcattgtttattgcttttgtccgcaaatggcatgtccggtttaccggaaaaattcagatgcgggtaatttctgtgatggcgattgccttaagttgtgtgatcattgcagcaaatgcttatgatgtaaacacagagacgtgggaacagaagggaacttatcgcaatggatatctgttgaattacgtactgggggttcgtgacagttttatttctgctccggaaggatattccaaagataagatcaaagaactggagaaaacctatcaatccgataaaaaggattacagcacaacaaatgaaaaagcaaaaaatccgacgatcattgccattatgaatgaatcgttttccgatctgagtgtgttgggggatctgcagaccaacatgccgctcacaccgtttatcgattctttgaaagagaatacaacgaagggatatgcactttcgtcggtatttggcgcgaagactcctaattcggagtgggaatttatgtccggaaattccatggcatttcttccgatgggatccgttgtttatcagcagtatatcagtgatactccgacaacgattgtgtcaaatctgaaagatgacgggtatacgtgcattgccatgcatccatattatgaaaccggatggagccggaatctggtgtatccgcatatcgggtttgacgaaatgcactttattgattattttgaccagacaaagatcctgcgggaatatattaccgaccaggaactgtatgataagattatcaagcgttatgaaaaccgtaaaaataatgaaaaactgttctttatgggaattaccatgcagaaccacggtggttatacggaaacctatgacaattttccggagaattattataaagttggacgttcttatacggatgccaaccagtatctgtccctggtacacgagagtgatgaggcagtaaaaaacctgatcagttatttttcaaaggtagatgatccggtagaaatcattttctttggagatcatcagccaagcttaaacagtaatttttatccgattctgaatggaaaaggactcacagggctgacggaagatgagctggaaaaactgtacacagttccgttttttatctggaccaattatgatacaccggaagaaacggtagacattaccagtcttgattatctgtctaccatggcactggaacgggctggaattgagcttccggcatacaataagtttctggcagatatgcaggaggttgttccagccatcaattccagaggctattattccaaaagtaaaggttgctatttgcatatcgatgaggccgagggagaagaaaaagaatggattgaaaagtatcatatgctgcaatataattcgatgtttgacaaaaagaaccgcagcagctttttcttcccatataatctaaaaagcaagtagaacaatcaggcaaggggaattaagatgaaactgagtgagttattagcgtatgacaatattgtaatacagtgccataacaatccggatgcagataccattgcatgtggatttggggtctatctgtatttgaaatccaaaggaaaagaaccacgtctgatttacggagggcagaatgtgatccggaaaacgaatctggtgatgctgatccgggatctgaaaataccaatcgagcatgtggattatctgcacaaaccagagttattggtgatggtggactgccagtaccattccggaaattctgcagtgtttgaagcagaacatattgctgtaattgaccatcaccggatctgcacggaattaccagagctttccgaggtgcgttctaatctgggcgcgtgctcgacactggtctggaatatgctcaaaacagaaggatttgatgtacggggtaatcgtgagttgtcaacagcactgtattatggattatatacggataccggaagtttgacggaaattgtacatccgctagaccgggatctgcgtgacgaggcaaactttgacccggcaatcatgaggaaactccgcaatgccaatctttcgctggaagaactggaagttgctggagcagcacttcttcatacggattatgtagaagaatttcgtgccgcgattgtaaaagtggggcagtgtgatccgaatattctcggactgatttccgatctggtactggaagtggatgcgattgatatctgtgtggcatttaatctgcaaccagaaggtgtgaagttttcagtgagaagctgtgtgaaagaagtcaaggcgagtgaacttgcggcagagttgtgcaaaggaattggttccggcggaggacatctggaaaaagcgggtggcctgattccgatggaattgatgacacaggaatatttaaagttttgcaaagaacatcattttgcaccgcgcatggggtatgatgcacagggaagacatgaacagccggcagcttcgggtattaaatctgttatcgagcagcgtatgcgggactatatgggaaataccgatattgtgtatgcacaggattgcagaatagaggcagaggatgcaaagacgtactgcagacgctccgttccgtggggatatgtccgggcaacggatctctttgcggagggaacgcaggtgactgtgcggactctgcagggagatatgaaagctacagtggaagcaggaattgtttttatcattggaccgaaaggggaatgtttctttcgtaatgaagaggcttttatggaagaattccggatttacacggattggaagtttgatctgagaaatgcagagtatgaacctaccatcaaagatgtagagaaaggaatcatcgtagaaccgatgaaatgtgcaaaggtctgcgtgccaaagggaactacaattgttcgtgcacgcaggctggagcgcaaggtaaaactgttccgggataaagatgaaaacgaacagtatacacttggccgggttggagattacatggttgacagcagtgatacgatcaacaatatccggattatgcgtaaagatctgtttgaagaaatctatcgggattccggtgagcaggaagagcaaaaaagtgtgatctttgatctggacggaaccttgttatattcgttggaagatttaaaaaacgctaccaacgcggcattggagtcacagaatatgccgacttgtacgctggatcaggtgcgcagatatgtaggaaacggggtgcgcatgctgatggtgcgtgccgtgccggatggggagaaaaacccgaagtttgaagagacatttgcggaatttaaaaaatattacggggagcattgtctggatcatacaaagccatatccggatatcatgcatcttttgactgaattaaaggcgcgcggagtgaagacagcaattgtatccaataagctggactcggcagtaaaagaattggatgaacgttttttccgggggtatatgactacggcaatcggtgagatggaaggtgtggcaaaaaaaccggcacccgatatggtacaaaaagccatgaaaattttaaaaacggacacgaagaaggccatttatgtaggtgattccgaggtggatattcagaccgcggaaaacacgggacttccatgtgtttcggtcatgtggggattccgcgatgcggagttccttcgtaaaaacagagcacaggtacttattcaaagaccactggaattgttgtacttaatttaaaagttatggtatcatataaccaacatacaaggacaggagaaaaaagatggaagaaagaatttcaggacatacagggttacttgcactgatcggttcgccggtaggacattccggttccccggcaatgtacaattacagctttgcaaagctggggctggattatgcatatgttgcatttgatgtaaaagaagatcaggtaaaagaagcacttgacgcggtgaaactgtttcatatgcgtggaatcaatgtgacgatgccggataagaccgaggcggcaaagtatgtggatgagctgtctccggcagcacagattatcggagctgtaaacacaattgtcaacgatgacggcagattgaccggatatatcacggacggagaaggctttgtacacaacctcaaggaccatggcgtagatattaaaggaaaaaagatcacggtcgcaggcggtggcggagctgcgacagccattcaggtacaatgtgcattagatggagctagagagatcacgattttcaatattaaggatgcattttttgagcgtactcttcagaccgcagaaaagattcgaaaagcagtgccgggaattgttgtcaatgtatatgacattgcagatacggcaaagatgacagaggagatcacatccagtgacatttttgcaaatgcgacgatcgttggtatgaaaccgatggatgaccagagtgtggtaaaagatttatctgcatttcgcccgggattggttgtatgtgatgcggtttataatccggcagagacaaaactgttgcgggaagcaaaagaagcaggatgtacctgtattggaggtaagggaatgcttctgtggcagggagttgctgcattccggttatatacaggtatggatatgccggtagaagaagtgaaggagaaattttttcatgaataaagaaaagaaaaatattttcctgatcggttttatgggagccggtaaaagcacgattgcacgtgcgataaagcaaaagctgggttatccggttgtggagatggacgagcgtatcgtaaaagaacagggaatgccgatcagcaaaattttcgaaacatacggagaactttatttccgggagcttgagacaaaactgatccagtcactaaatcagcaggagccgacaatcgtatcctgtggaggcggtgtggcaatgcgacaggaaaatgtagactgcatgcgggatgggggaagaatcgtatttcttacggcaacaccgcagaccatatacgaacgtgtaaaaaacagtacggatcgtccacttttaaacggtcatatgaatgttgcatacatttctgaactgatggaagcacgccggccaaagtatgaggcggctgcagacattctcgtagctacggatggaaaaacaaaagaagaaatcgcagaagaaattattgggcgactggaggaataagcgtgaaatttaattgggataatattgtatttcagatgctgggaaaacttgtggactgcgtgtgggtcagcattttatgggtgatctgctgcattccggtttttacgatcggggcatcgaccaccgcgttgtattacacggtacataaatccatccgcggtgaccgcggatataccacaagaacctttttcggagcgttcagggacaactttaaggctgcaacactgccatatcttatatggctggccgttatgattgttctgggctgtgatgcctatatcacctatcaggtattaaaaaccggcagtatgaagggcgcatttttctatttctttctggttatgattgctgttgcgattatgtggagcgcatttttatttccatatattgcaagatttgaaaataccgtaaaacagacgttgaaaaatgcattcctgctgatggtaagacatctgccatggtcactgttgctgctggtgattttgattgcatcggctctgtcgatttatattataccggtactgcttgtggtaattccggcagttgcatcgattgtatttgattttattttagagcgcctgttccgccgctatatgagtccggaggatttagagcgtgaagaggaaaatgatatgtatgcatcataatacataaataaaaacaaaaagagagggagaaacaaatgagtgtaacaatttctgaagcagtaaagtatatcggagtagatgataagacgattgacctgttcgagagccagtatgtggttccgcatggcgtatcttataattcttatctgatttttgatgaaaaggtagctttgatggatacggtagatgccaggggcatggagcagtgggagaagaatctgctggccgcattagacggacggaaagtggattatctgatagtttcccatctggagccggatcatgccggaagtatcggacgtttggtagagcttttcccggaagtgaccctggtgggaaatgccaagacatttcagatgcttccacagttttttgacgagcttccggtagatgagaaccataaaattacagtggcagaaggagagtctttgtcccttggtacccatacgctgaatttttatatggcaccgatggtacactggccggaagttatggtaacatacgagagcagtgaaaagattttattctcggcagacggattcggaaaattcggcgcactggattatgaagatccggaaggatgggcctgtgaagcgagaagatattactttaatattgtaggaaaatacggcgcaccggtacaggcactgttaaagaaagcggcaggactggatatccggacgatctgcccgctgcatggtccggtattaaaagaaaaccttggctattacattgggttatatgatacctggagcagctataagccggaggataagggtgttcttgtagcatatgcatcgatccatggaaatactgcaaaagcagcacagaaatttgctgagatgctgcgtgccaaaggagtagagaaagtttctgtcatggatctttcccgtgatgatatggcagaagttgtggaagatgcgttccgttatgaccgtatggttcttgcagcagcaagttacgatggcggggtattcccatgtatgcaggacttcctgaatcatttacagtccaaggcattccagaaccgtaccgtaggtattattgagaacggtacctggggaccgacggccggaagaacgatgaagggaattctggaaaccatgaaaaatattaccattgtggagccgatggtaacgatccgttccgccatgaaagagtccgacctaccagcgatggaagctctggcagatgtgattgcaaatgcataagcacttcggaaaacggaccaaaaagaaacatcatattgtgctgatctgttccgctgtggtcattgcggcgtttgtgcttcgcatgccggtggagatgaatgtagcagatgcctgtggaatgcagcagaaggtcaatgtgcttagcagcagtatgcataaccggcaggcggaggattacctgaatgatgcaggagagttttgcatttcccagacagtgctcagggaagggaaaccgtccgttgttccgcaagtcaggcgaatcgggcttcgtttccttccggtgagccatatgacacagcagtggctgctggtacagagaattctgacctcgaagcccaaatttcttgttccaccggcgcgtcggctgatcgtcgggcggtatatccgcgcaaatcccgtctgtgtgtgacagaatgaaactcaggggatacaaaaaaatttggatagagacaggagaacaagcattatgagaaaaacaaagattatttgtaccatcggacctgcaagtgaaagcgaatctgtactgacacagatgtgcaaagccggcatgaatgtagccagattaaacttttcccatggaagccatgaggaacatcagaagaagattgatacgatcaaaaaagtgcgtaaggcgttaggtcttccaattgcgatcatgctggataccaagggaccggagtaccggatcaaaaccttcgaaaacggaaagatcacgttaaaagatggagatacatttacactgacaacggatgatattgtgggaaatcaggagagagtttccgtaacctacaaaaacctgatcaacaatctgaaggtgggagatcatgtcctgatcaacaatggtctgattattctggaagtagaaaagctgaaagcaccggatgccatctgtaaggttcttgtcggaggcgaggtgtcggataaaaagagcatgaattttccgaacaaggtcatggatcatgcatttttgagtgagcaggataagaaagacctgctgtttggtatcaaaaacgacgtggatttcgttgcagcatctttcgtctccgtaaagaaagatgtcgaggatatgcgtaaattccttgacgagaacggcggcgaagatattgatattattgcaaagattgagaaccgttcgggtgtggagcacattgaagaaatctgtgagattgccaatggtgtcatgattgcccgtggagatctcggagtcgaaatcccgggcatggaagtgcctgcggttcagaagtatctgatcagcaagtgccgtatgctcggaaaacgtgtcataaccgcgaccgagatgctcgagtccatgattcacaatccgcgtccgacacgtgcagagctttccgatgtggcaaatgcggtatacgatggatcatccgcgatcatgctgtccggggaatcagctgccggtaaatatccggtagatgccgtgcggaacatggcagagattgctgagtatacggaatcccagatcaaatataccaagcgtttccgcacttctgattttgagacaagaagcattcaggatgccatttcgcatgcaacctgcgcgatggcagttgatgtccaggcaaaatgtattgtcgcaagtacactcagcggaactaccgcacgtatggtcagccgtttccgttgtccggtagatatcatcggaatgacgacttccgagaaagtatggcggaaattgaacttaagctggggggttactccggttctctgcgaggaattcagttcgatggaagttatgttctaccatgcaatgaaaaaggcaaaagaagtattttcattacagagcggagatgctgttgttctgaccggtggtctgatcaatggcaaagtaggaaatacgaatgtgattaaggtagaaaccgtaaaataaaatagaacataagcgaatgctgtgtagttggaaagcgcatgtgacatctctgttgcatgcgcttttcgtgtgtttttgtgaaaatttactacctttacgaggaaaatagtttatgctatagtatatttgtacagaaataatcagacaatatttacagtttaccagggaaaggcaggcctatggtagaaaaaatcgatcagaagaagtgcagggatatatcaacagagattcaggagactctggcaaaatggggaaagtattttttttactattatcccaaagaacacaggatcagaccatcagagtttgcagcccgtcacatgggaatcgtggagaatgttgcggatctggagcatagtatcctcatggacagaattatggaaaaagagaaactgttaaaactgtttcaggatattgaccatggcgcaaagacggtaagtgcaaagattcagtcttcgggaaaagacatggtatatcagatctctatgggtaggattcagggcggttcacagaaacaaccggaatatgtattgggtctgatcgaacagatcagggcagacacacgccagaatgagattattcaggcactgggaagcaattttaacagtgtatattatgtagatgtggatcatgataaggtatatgcatataaggtgaactccgcagtgcgctctgtgctcaatgatacgcttaaggaaattccgggatatgaagctatcatgtcagaatatgtggggaaggttgtccttaccgaagatcgtgagacaatgctgtatgagacctccattgaaaatctccgtaagcagctgaacctgaaaaaagcatatcagtatgattaccggattgtgcgggatgggaaagtaaaatactgccgtgcaaaatttgtaaatacatcggatggaggacagctgcaccggatggtagcaggattttccgatatcagttccgaaaaacagagggaacttgagcgcatggcgtatgtggacagtgtgaccggcggaaataattacgaaagttttaagaagaaaatccgggatttccggcaaccgggatatctggtgtccatggacatccactcctttaaaattatcaattcgatctgtggaattatcaaaggggatgaaacactcaaaggaatctggaagtgtattcaggggatactggaaaaagatgatctggcaggacatatcaatgcagaccgttttgtgatttacagtagtggaaaggatcaggaaaagacgatccggcagttacagcagctggagaccatactggcagaattgtcggaaagactgaaggttccgaagctgatcccttattttggagtgacgaagtggaaaccggattccaaagtggaagaggtatacagcgaagcaaattttgccaagaatcagatcaaggatcgcaaagatatcagctatcagttttacagccatgaagatacgatccgcatgcttgaagataaagccatggaggatgaatttaaacattctctggaaaataactgttttgaggtgtggtatcagccgaaatatgatccggaaacagagcggatggtaggggcagaaggtctgatccgctggagagatgaaaagggaaatgttattccacccggcaaattcattccgttgtttgagagagacggactgataaaagttctggatgagtatgttttccgaaaagtatgtatgcagcagttagaatggcagaaacagggaaaggagattattccggtatccatcaatctgtccagggcgagtctgtattttgacagtgtggtcagccggtatcagcagatcgctgatgaaatcggagtaaaaacccatctggttccgattgagattacagagagcgcagcaattgacaatgacaatatcaaggggctggcagataagttccatgacaatggttttccattgcttgtagatgattttggatcggggtattcttcccttgcaacactgaacatgaaatgtttcgatacgttaaaaattgacaaaagtctgattgattacatcggggatttcagtggggaacgattgctggaacatacgattttacttgcaaaggaacttggattgtgcgttacggcagaaggtgttgagagagaagaacaggtggatttcctcaaacagatgaagtgtgacagtattcagggatattactattcgagaccgcttccaaaagaagagtttgaaaaacttttgctgacagcttaaatgataagaaaacagggaaaacttttatggaatcatagaagttttccctgttttatttattgaccgagaagggaatctacataattgcgtattgcataattgtcttccggcatctgacatcccacaatatatacaccttcatcatccgagcaccggatgacatgtccttccagatgggactgatccgaaagggcaaaattttggatatcgatagcaacatctgcatgtttgtgatccatgaaaaacggatcccggatcagaaatgcaaatccattggcactgatattgtcaagctgaccggagaacgttgtgtcggaatctttcagcgtgatggtacatggattggacacatctgcccgtgggtatttccggcggtttttaatctccggacgtgcggaaagctgcaatgcatagacgtgggaaccggacgccgtgtcagcttgtatctgcgcctgatcccaacagtagagaacattgtcaaccgtgacctgaaccttacaggtttcggatccgtttaactgtggattgtcagacaaaatcagggaaatactattttccgcaacagatctgacttctccatgatactccatgcgttccagatgttttggaagaataacttttgctttcataccggcatgaatatcatccagacccatgaaaccaccgatgcccagttcacacatcagctcctgaattacattttctatgttattgatgttggaagcactttcctcatatttgctgagcatgcgtttgcttgtttcatcggaatcactgatgcatgtggtcatggtttccacgatggaagatacctgttccatattttccaccagctgacgattggaagattccacttctttcatggcagaatcaattgtctggatgtgttcacccagaagagaagaatcctgtgtaattttatttacattttcaccggtctgggttactttttccagagtggcctgaataagttttaaggtttcttcaatggaagaagtcatttttcctgaaatttcatccagccgcgagagtgcttcgctgatctgtccggaagaatctttggtttcggtactcagcttgcggatctgttctgcaacgacggagaatccttttccggcttcccctgcgcgggcagcttcaatggaagcattaagtgccagcagattggtctggctggaaatactgtcaatggttccggtttcctgttttacggtttcaaattctgccttgaaagcgtccagaatatgttctacctcattggacagatctgccatcgttccggcagtctgtaccagactctccagatcaacggaacttgtctttgcgtgtttgccggattccgcagtcagggataccatatcattgatcatggaagcaacattctgtacctgggaattgatatctcccgtcatttcctgtgaggaggctgtccgggactgcagctgatcgttattgtcggtcagtttgttcattccgtctacgacgatgtctgaaccatgtttgttttccgtggcaagttcgcggacaacggtgattccgtccatgatggtattgctggcggttttaacctgttcaacggttgtaataacccgttttaaatctgctttgatactgtctgtcagggcaccgtcggattcgatgaggtggcggatagacatgatatagccgatataacagagcaggagacaggcaacctgcagctgataatttttctggtccgttgcagtattctgaccgagaacgaccagatgataaaagacactgacaatgacactggcgatattggcgattgcacatcccaccataaatttctggtctttgtaaagaaccagaagactgacaaccggaagaatataggtaaaggcaatcggtgaatcggtggtgcagatcaggaacgtgtaaaaaataccgtaaccgatgacaagtgcataccgatagcggtcatcggcctttcccctgatgcgcaaaagaagatcaccggcaaaaaaaggaacccagcacagtattaaaaaaatgatgtaatttgtggaaggatacccaccctgggatacatctgagccgtagtttgcactaagaagaagggcaaatacaagccagatgcgtctggctttgatattggccttggccttaaattcattttcattataatccataatacgtttctcctatgtgaatgttagttctattgtatgacgggatgaacgttttttcaagtaaaatgctttgttttctgtgcataatttttccgggattccggcatactacccatacaacatgaatatggaaagtaatctggaaaacaggaggaaatttatcatatgaaagcaactggaattgtgcgcagaatcgatgatctgggaagaattgtggttccgaaagaaattcgcaggacactgcgcatccgggagggggatcccctggagatttttacaagccgggagggcgaaattatgctcaaaaaatactcaccggttggggaactgggcgagtttgcacgaagttatgcacaggcactggcacagaccacagaggctctggtctgcattacggatcgggaatatgtgatcgcagcagcgggaaccgggaaaaaggaagttgagggggaacagctgagcgaagaaatggaagaaatgattgaaaagcgcagcacagttgtgaaaacaggagaagaacaggcctgctccattacaaaaaaaacaatgtcaacccttccgaagggaattgtgctttcaagtattctgtgcaatggagactgtcagggtgctgtgattctggcagataacagcggacaaaaggaaacacttggactgttgaaagcattgtctgccacagctgcaaattttctggggaaaaatatggaacagtgaaaataataaaatcttaataaaaagataatttgcatatactgtccaaaagagataaaatgtatgatgtatgtttccaaaataaatatggaggagagtatatgtcaaccaagaagaaaaagaaaagaaagaaaaagcagcatcgctttttctggtttgtcataaagctgcagatcgtgctgatgcttgttgtgctggcaggttttggatactactattttggcggatatgcggatcagatacagcagatgcgccgtgaggcagtgcaggaagtatctgcttccgacgattctacgtttatcccttcacagacctgctccgtttttgataaagacggaaaactgatctctgaacgaaggggagacaagaatgcgcagtatgtcaaatacgaggatattccaaaggattttgtcgcagcgattatcagtattgaggacaagaagttttaccagcataacggtgtggatctgaaaggacttgtgcgcgcggtcaaagccacagtcatgtcgaaactgaaaaaatcgcagggtggtacgcagggtggaagcacgattaccatgcagcttgccaagctgatttatatgcagccgaaacagacgtggcagtacaaggtgaagcagatgtttcttgcgtgggaactcgaaaaacgttacagtaaggataaaattatggaattttatctgaataacgtgtattttgcaaacggctattacggaattgacgctgcctgtcatggatattttaactgtgaactgaaagatcttgatgtatcgcagaccgcgtatctgtgtgcgatcccgaaccgcccgtccaattatgatccggtgacacacccggacaataccattacccggcggaatctgatcttaaagaatatgcgggatgacgggaaaatctcccaggaagagtattatgaggcaaccaaagaagagattgcgctgaaccggccgaaaaagagtgacacggagaaaattaacagttcgattgacacttacacgtatgactgcgcaacccgtgcactgatggaacaggaaggtttccagtttaaatattattttgattcggataaggaaaagaagtcttatggggaagcatatgacgaactttacagtgcgtgtcagaagaaactgttttccggaggatacaaaatctatacgacgattgatatggaaaaacaaaaggaactgcagtctgccattgatgataccctgaaaggatttaaagacaaatccaaagacggaacttacaagatgcaggcggcagcagtatcaattgataacaacagcggatatgttgtggcaatcgtgggcggccgtaagcaggattcggataattatacgttaaaccgtgcataccagagttaccgtcagccgggaagttcgattaagccattgctggtatatactccgcagctggagcgcgggtatactccggataccgttgtggatgaccataaactaaaagacggaccgtcgaatgcaaacaatacatatgccggaaagattccgctcagatatgcggttgcacattccattaatacgattgcctggcagctgtatgatgaactgacaccaaaagcaggcctgcagtatttaaaaaatatgaattttgcacagatcaaggacggagattataccctcgccacatctcttggtggatttaccaaaggtgtttctccacttgagatggcatccgggtatgcagcggttgaaaatgacggactttacagggaaccgacctgtgtaaaatcaattgtggattctgacgaaaatgtagtctatacgtccagcctgacggaaaaaacggtttataagcaggatgcggcgcggatgatgacggatatcatgacctccgttatggacagtggaaccggacgttctgcaaagcttgccgatatgccgtgtgccggaaagacgggtacaacaaacgatcacaaagatggatggttctgcggatttaccagatattatacaaccgcagtctgggtgggatgtgattatccaaaagccatttccaatctgagtggaagcacatatccggcacagatctggaaagcatatatgtctgcggcccacgagggattatcttcgcttgatttccttccttatgcccagctttcggatgattttaaaaatcagcagaagaaggaagaggaagaacacgacaagatgcgcgaagaaaaccagacggaggaaaaccagacggatgaccagcagacttccgagagccagcagaaagataatacaacggacggaagctccgaaaatgataaccagccggacaataacgacagcaatgccggtgatcagaataacaattccaaaccggaacatagtggggacaacgattccggagaaagtggaggaaacactgatacaccggaaaatggagaaaataccaataaaccggacaatagcggaaccacggataatagcggtgataccggagagagtggagataccggtggtggaaacgtacaataaacatatataaaacagtgcaaccggtgtatttatggatacatcggttgattttttttatcgatactaggcagaaattccggaatatggtagaatacagatacatggggtagaagaaaaatacatatcacatagatcaaggaggaatcaggaattgaagaaatatggatttggcgtagacgtgggaggaaccaccgtaaaaatgggattttttgagacaagcggagggcttcttgacaaatgggaaatcaagaccgataccagcgataacggaaaggcagtactgccggatattgcacaggcgattgataataagctggcgcaggaaggcatcagtaagagtgatgtagagggcgtgggaatcggtgttccgggtcctgtgcggagtgatggcgttgttaacgggtgtgtcaatctcggctggggagtgatcaatgttgcggaggaactcggtgcacagacaggtctgaaagtaaaagtcggaaatgatgcgaacgttgcaggtcttggcgaaatgtggcagggcggtggaaaaggaagtaaagatgtcatcatggtaacgcttggtaccggtgtcggcggtggaatcattgtagacggtcatgtggttgctggatataacggtgcaggcggagaaatcggacatattaccgtaaaccatgatgagatcgagccttgtaactgtgggcagtatggctgtctggaacagtatacttctgcgaccggtattgtacgcatggcaaaacgtaaacttgccaaaacacaggatgcgacaaagcttcgtgattataaggatattactgcaaaagacatttttgatgtggcaaaagaaggcgatgaaatagcactcggactggtagatgaagtaggagaaattttagggtcaaccctttcgaatattgcatgcgtgaccaatccggaagttatcgtgatcggtggtggtgtgtccaaagccggacagattttaatcgatacgatccagaagcactttaaggaaagctgcttccatgcatgtcgtgatacccgctttgaactggcacagcttggcaatgatgccggaatatacggggcaatgcaactcattatcggataagttcaaaaaacagaaccatatgcacagcagacattttcgtgtaggaagaaagtgtttgctgtgcttttttgtactcttttatcattaccctgttgaaaaaatatcttgacaatcaaactatttatgcatatactttgactaagaaactgtttgacaatcaaactatttcacaatcaaacaaaattgaagacagtaaaaggagaacccattatgttagaaaagttaaaagaaatcattgcagaccagttaaacgtagatgcagattctatcaccgcagagtcccgcttcaaagaggatcttgaggcagattccttagatctgtttgagctggttatggctttggaagaagagtacggtgtagagattccttctgaggatttagagaagatccttaccgttcaggatgtcattgattatatgaaaaataagggtgttgaggcataagctatgaaaacaagagtgacagagcttctgggaatcgaatatccgatcattcagggcggtatggcatgggtcgcaacacatgaactggccagtgcggtatccaatgccggcggacttggcatcatcggagcaggtggagcaccggcttcctgtgtgcgtgagcagattcaggcagcaaaaaaagaaaccgacaagccgtttggagtaaatctcatgctgatgaatccggaagcggatgagattgcaaaagtaattgtggaggaaggcgttaaggtagtaacaaccggcgccggcaatccggccaaatatatgagcatgtggaaagaagccaaaatcaaagtgatcccggttgtggcaagcgtggcattggcaaagctgatggagcgtggcggtgcagatgcactggtcgctgagggaatggagtccggtggacacatcggtgcccagacgacgatgacactcgtaccacaggtagtagatgcggtatccattccggtcattgcagccggtggaattgcagatggacgtggatttgcggcagctatgatgcttggcgcagaggcagtacagatgggaacccgttttgttgttgcaaaagaatccacggttcatgaaaattacaagcagcgcgtggtcaaagcaaaagatattgacagtgaagtgaccggcatgtccacaggccatccgattcgcgttattcgtaacaaaatgacccgcgagtacttaaagaaagaaaaagaaggtgcaccgttcgaagaacttgagcagatgacactcggagcactgcgcaaagcagttgtcgagggtgatgtcatgtacggcagtgttatggcaggccagtctgcgggtctggtaaaaaaagaagagacctgtgcggaaattatccgggatgttatgagtggtgccgaaaagttattgggacagaaataggagaagacagtgaagagagtatttatgttccctggacagggatctcagtatattggtatgggaaaagagttttacgacgccatgccggaagcaaaagcggtctatgatctggcaaatgaagtgacaggtctggatgtggcagctctttgctttgaagaaaatgataagctgaacattacagagtacacacagatctgtatgctcacaaccgaggcggctatttatacagcattaaaagcagcgggaattggctgcgacgttacggcgggcttaagccttggtgaatatggtgcgctgattgcatccggagcgatgacaatgcgggatgcatttgcggttgtccgcaagcgcggtatttatatggaacaggcatatccggtaggcggcggtatgtctgcaattcttggactggatgcggaaaagattgcagcaatctgtgaggaaaccgctgcaaaaacaaacaaagttgtttccattgcaaattacaactgtccgggacagatcgttatcaccggagcagcagatgctgtaggtgaggcaggagatgcctgcaaggaagccggagcaaagcgcgtggttccgcttaaagtcagtggcccgttccattctgcacttttagcagaagcaggaaagaaactcggggaggcactcgaagatgtaacgattcagccgatcaccattccgtatctgaccaatgtgactgcagattatgtcaaagatccggcagacgtcaaggattatctggtacgtcaggtttcttcttccgtgcgctggcagcagacaattgagcgcctgattgcagacggagcagaggaatttgtggagatcggaccgggacgcagcctttccggatttatgagaaagatcaatcgcgaggttaccacatgcaacatcgacaaaatggaggatttcaataaatatgttaaccggtaaaaatgcacttgttacaggtgcttccaggggaatcggaagagccattgcgctggagctggcaaaacgcggagcatttgttgtggtgaactacaatggttccgaagatgctgcaaatgaaacggttgcagcgatcaaagcggccggaggagatgccgtgagtgttcgctgcaatgtctctgattttacagcctgtcaggagatgattgaatcccttatcaaagaatataagcatatggatattctggtgaacaatgccggaattacaagggatgatctgctgatgcgcatgaaggaaagcgattttgatgctgtgatcaataccaacctgaagggaactttcaatacaattcgtcatctgtcacgctatctgttaaaacagcgtgccggaaaaattatcaatatttcttcggtatccggaatccttggaaatgcgggacagtcaaactatgcagccagcaaggcgggcgtgatcggtctgacaaaatctgttgcaagggagcttgcatccaggggaatctgcgtcaacgcggtagctcccggatttgtagagacagagatgaccgcagtattgccggaaaagacccaggaagaattaaaaaagcagattccgcttggcagagccggacaggtacaggatattgcgaatgcagtcgcatttcttgcatcaccggagtcggattatattaccggacagatactttccgtagacggtggtatggccatttaaggaacttgatagaaagaaaggaaaaggaaaatgagaagagtcgttgtgacgggaatgggagcaatcacgccgatcggcctgaatgtggaagaattctggaaaggaatccatgccggacagattggatttggtcctatcacgaagtttgatgcaagtgaatataaagcacatcttgcggcagaagtcaaaggttttgtcggaaaagagcatatggattttaaggcagcaaagcgtatggaactgtttgcacagtacgcagtagcagcagccaaagaagccgttgcggatgcagggcttgatatggaaaaagaggacgcttaccgttgcggtacagccgttggatgcggtgttggaagtcttcaggcaatcgagcgcgagtatacaaagattgtggaaaaaggaccgggcagagtcaatccgattttcgttccattgatgatctcaaacatggcagcaggaaatgtctccatccagttgggattgcagggaaaatgtaccaatgatgtaactgcctgtgcgaccggtacgaataatatcggtgatgcgttccgcagcattcagtacggagaggcagatgtcatggtagccggaggaaccgaggcagccgtatgtccgtgtgcgattgccggattcggtgcactgacggcgctttctccatccgatgatccagaaaaatgttcccttcctttcgataaaaaccgcagcggttttgtattgggtgaaggtgccggcattgttgttcttgaggaacttgagcatgcgaaggcaagaggcgcaaaaatctatgcagaagttgtgggatatggatgttctgcagatgcttaccatattacttccccactcgaagacggtgcaggtgcagcacgcgctatgcagaatgccatcgaggatgcaggggtagacaaaaacgagatcacatacatcaatgcgcatggtactgcaacgcatcacaacgatctttttgagacccgtgccattaagttactgtttggggatcatgcaaaggacattaagatcaattctacaaagtccatgatcggtcatcttcttggcgccgcaggtgcggttgaatttatcacctgtgtcaaagagctggaagaaggatacatccaccgtacagttggttatgagacaccggatgacgagatggatctgaactattgtaaagaagaatcccacgagtcatttacctatgcactgtcaaactctcttggatttggcggacataacgcaagtcttctggttcgcaaatacgaggagtagaagctatgagtatgacaacacaggaaattatggaaattctgccgcacagacatccgtttctgctgattgacacagtggaagaagtagagccgggcgtgcgcgcagtggcaaagaaaaatgtaaccttcaatgaaccgttttttgccggtcattttccgggaaatccggttatgccgggtgtgctgatcgtggaagcactggcacagaccggtgcggttgcgattctttcgcagccggaatggaaaggaaagacggcatattttgcaggaatcaataaagcaaaattcaagcagaaagttgttccgggggatactctggtgcttgaaaccgaaattatcaaggtgaagggaccgatcggtgtggggcaggcaacagcaaaagtaaatggaaaactggcatgttccgcagaactgacatttgcaatcggataggggaaaggcaatgttttttaataaaaaatatatcaaagtaaatcacaacgaagaaccagaaaaaacacaggcagaagagccaaagcaggaagaggcaaaggaagcagcacctgttgtagagaccgttacctgtaaaatctgcaaaaaagaactggataaacagcgtgtcatcaaaaataaatatgtctgctacgagtgcggatattattttcgtgtccgcaccaaaaaccgtattcgtatggtggcggatgcaggaacttttgaaacctgggataatgatctgaagaccggaaatccgctgaatttcccggaatacgaagaaaaagttgccgcaacacaggaaaaaaccggattaaacgaaggcgtaaccatgggaagttgtacaatcaacggagagaagacagttctcggtgtgattgatgcccgtttcatgatgggaagtatgggacacgtagtcggtgagcgaattacacgtgcaatggaaaaggcaacggaacagaaacttccggtgatcttattctgctgttccggtggtgcacgtatgcaggagggaattatttccctgatgcagatggcaaagacttcggcagctgtaaaacggcattcggatgcaggacttctttatattccggttctgacagatccgacaaccggtggtgtgaccgcaagttttgcaatgcttggagacattattcttgcagagccgggagcactgattggttttgccggtccgcgtgtgattgagcagaccatcggggagaagcttccggatggattccagagagctgagtttcagctgaaacacggatttgtggatgcaattgtagagcgtgacgagttaaaagatacgctggggaaaattcttcgtctgcatcgtccgaccgaaggctatgcaaactttgatccggcacatgacgatgaccgttatgagccgaccgaactgatgcgcgagagaaatacgttttccagaccgttagaaccgtgggataaagtgatggcggcacgtcagatgaaacgtctggcatctgtcgattatatggggcagatttttgacgaattcatggaattgcacggagaccgttatttccgtgatgatccggcaattgtcggtggtattgcctatctggatggacagccggtaaccgtgatcggggtgcataagggaaaagatttaaaggactgcaaggaacgcaactttggtatgccttcgccggaaggataccgtaaggcaatccgtctgatgaagcaggcagaaaaattcaatcgcccgatcattacatttgtaaatacatccggtgcatatccgggaaaagaagccgaggagaacggacagggtgaggcaattgcaagaaacctttatgaaatgtccggtattcaggtgccaatcctttgcctgatgattggcgaaggcggcagtggcggagctcttgcccttgcggttggtaatgaagtatggatgatggaaaatgccacctattcgattctttctccggaaggatttgcttccattctctggaaggatggaaaacgtgcaaaagaagcggcaactgtcatgaagatcacggcgcaggatctgaaagaactgtctgttgtggataaggtgattccggagtatggcggagcggatgacgatgcgctgacttcgattgcggcatggatgaaaggaaatatgaaagaatttttacgtgcacagaatgacaagagtgggaaacagcttgcacaggagcggtatgatcgcttcagaaagttctaattgttccatagaggagaatcataaaatgaaatttttaggaaccggaagtgcgcttccgaaaaaagttgtaagcaatgatgacctggcccaggttatggacacttcagatgagtggattcgttcccgtaccgggattggcatgcgccatattgcagtggaagagacaacaacttccatggcggtagaggcggcagagaaagcacttgcagatgcaaaaatatccggatgtgaaattgatctgattatcgcgggaaccatttccccggattacatatttccatcgctggcatgtgaagtacaggctgcaattggagcaaaaagtgcaacggcatttgatctgagtgcgggatgttccggatttttatttgcactggctacggcggatgcctatttccgtaccggacgttacaaacatgcactggttatcggggcggaaaccctgtcaaaaatgatgaactgggcagaccgcagtatctgtgtgcttttcggggatggagccggagctgctgtagttagtgcagaaggaagccagctgctttccatggtgcagggatcagacggagccggtggcatggcactgcattgtgagaaccgtccggtgaataatctttaccgccagcttggtgcacagcattatgcgttcacccagatggatgggagagaggtttataagtttgccgtgcgcacggttccaaaggcggtcagtgaagcacttgaacaggcagaacttccaattgaagatgtaaaatattttctgcttcaccaggcaaatatccggattattgagtcagtggcaaagcgtctgcatcagccaatggaaaaatttccatgtaatttacagaagtgtggaaatgtttcggctgcaagcgtacctattttacttgataatgtccacaaacatggtatgataagcgggggcgataaaatcgtattagctggatttggtgccggacttacctggggggcatgtgcagtcgagtggtaggtcacaccagatcatgaaggagtttaacatgacgctggaagagaccttaaatgatcttcttgtaaaattattcaaagatattctggagattgaggcgaaaagcctgatcacagaagagtttaaagatattagttataatgatatgcatattattgaggcagtgggaattgatgagccgcgaaatatgaaaaccgttgcaaaactgatgtccgttacaacaggcacactcacgaaagcaatggatgccttgtgtgagaaaggatatgttgtccgggaacggagtacgcgggataaaagagtaataaagctgcgcctgacagataaagggaaagctgcctattatcatcacgaacagtttcaccgccagatgattaaaaatgttgcggatgagatgaacgattctgaaaaagagatacttgtctttgccctggcaaaactggtggattactttaaactgacctactatgatacggacgaggaatccgaattcgttgactggtcgaaaataagcagggataaataaaatatatacttatttagtgttataaccgggcggctcagaatgcaagttttgaatcgctctgtttcattttgtactcaaaaagccgctttattacgccgtagtggtagaaaattacaataataaagaattttctattgcaaaatcctgcatttttcgttacaataaaaaaggttgttgtagaaacaggcaacagattatgaacagaacatgacgattcgggattttactggttccggacgttaaaaattaatattaaggagatagagaaatgggttatgttgatgaagtactcgaagtagtaaagaagaaaaacgcagatcagcctgagttcttacaggcagtaacagaggttcttgattctttaagacctgtgatcgatgcaaatgaggaattatacagaaagaatgcgattcttgagagaatcacagagccggatcgtcagatcatgttccgtgttccttgggtagatgacaacggacaggttcaggtaaacagaggtttccgtgtacagttcaataattccattggaccatacaagggaggtttaagacttcatccttctgtaaacctgggtattatcaagttcttaggtttcgagcaggtatttaagaattctcttacaacacttccaatcggtggtggtaaaggtggttctgatttcgatcctaagggtaaatctgacagagagatcatggcattctgccagagcttcatgacagaactttgcaaatatatcggagcagacgttgacgtaccggccggagatatcggaacaggtgcaagagagattggcttcttatttggacagtataagagaatttgtggatcatacgaaggtgtgctgactggtaagggtcttacctatggtggatctcttgcacgtacacaggctaccggatatggtctgttatatcttactaacgcattatggaaagatcatggtatgagccttgagggaaagacagcagcagtttccggatctggtaacgttgctatctacgcaatcgagaaggcacaggagttaggtgttaaggttgtaacatgttctgattctaccggatggatttatgatccaaacggaattgatgttgctcttcttaaggaagttaaggaagttaagcgtgcccgtcttactgagtatgcagctgctaagtcaactgctgagtatcatgcaaagcagaacggtgagcacggtgtatggcagtacaaggtagatcttgctcttccatgtgcgactcagaatgagttagacattgaggatgccaagatgctcgttgctaacggtgttacatctgtaacagagggtgctaacatgcctacaactcttgaggctacaaagtatcttcaggagaacggtgttctcttcgtaggtggtaaggctgccaatgccggtggtgttgctacatctgcacttgagatgagccagaactctgagagactttcctggacattcgaagaagttgacggaaagcttaagggaatcatggagactatttatgctaacatcagcgatgctgctaagagatacaatgcaactgttggtggaaagacagattatgtagcaggtgctaatattgccggatttgagaaggtagtagatgctatgcttgctcagggtgtttgctaattaagaatttctaagataaaagactatattgagaagtcctgtaaacaaatcaaatcttcgatttgactggtgtttatgggacttttctttatatattgataagacatgcaaattgtcagaatattcataaatagaagataatttacgttattttgaggtcgtgatatacacgcggtacacaagtgatttacaggtggtatacactcgtttttactgattttgaatgcttttggaagcatttcatcctttgcttttcaagatgatttaggctgaacataagtgtgacgttaaataaaagaaatatcataagtgtatccagcaatcagtcttgatttattgttttatatcttgttcacttctgtaagaagttcttctaaagtcttatgggtgtatgttcctttggtggtgtcgttcttcatactgtgtcccataatcaatttgatacatacatcatttgctccggcattgtccatgagtgaagcaaaggtgtgtgtctgccatttgtgattgtaggcatttaagcattgctgcagatcatttgtcctgatggaaataaatttgcggtcatgcagttcactgaaatgatgaaaagcaatctcataatttcgccatgggaatcgctaatcttgtttttaagcgattttcggtatttcttctatttctcgtacatctctgcaaaagtaggcgagtccgagtatttcatatgctccggaacaaccgcaccgctattgtattcagcaagataggtgtaagccatttccggtttggcgaagtaagccaggtaggtgtattttcgcttgaccttcccagtatcgtcttccacaagtttcgagatacggacagcgtaataaggctgttcatatttgttaatgtagtatttgcgtatttcaaaggaattgaaatagtcatcaatgattgcattcacaaaatcattggtgcattcgcaatattgcattaaatctccattctcattaggaataaatgggaagtatcggttaaagcgaagtaaacggttttaatggaattgtgtgtacgcgtgtggtaaaatggtgttgttgaagaaaacggcatttatcaaatataatacctctcccaacctatggttgagtttgataattccacttacagtttgtgtacaaaaactgataaaaattgtaaagtgtagcgtgaaaggaggcatattgtaatgaatcaaattgatacaggaaagtttattgctagttgcagaaaagaaaaaggtctgacacaagcacaattagcagaaaagttaaacatcactgacagagctgtttccaaatgggagacaggaaaatgtatgcccgattcatctatcatgttggaactttgcaatatcttagatgttacggtcaatgaactattaagtggggagaggatagaaatgaataattacgaagaaaaagtcagcgaaaatctcattgaattaaaacgaaaagatgagaataatatgaacaagaatactataatatcaataatatatacaattaccatggctattggtattctagtatgttgtatatgtgatgttgctatttcgggcacccttacatggtcacttattacacttagttctattttgattacatggatagcatcttttcctgttatattgttagggaaaaaaggtgttttggtagcgatggttgccattagtattctcattttaccatttatgtacatattaagtattttgataaaagtcaatgaagtattcaacattggtgcgattatgtccatttatacactagtttttttgtggataatttatattctgtattatcgactcaaggaacgaaaactgttggcaacaggaattacatttttgtttgcaattccgttcacacttttgataaatattacattatcaaaattaattggagaacctgtgattgatgtttgggatatattatccgtatttatcctgttgatagtatcagttgcttttataattggagattatgcacgaaaaaaaggttttgtaagataggctattttctgagtcgcttgaaaattcaaggttcagaagttaaacgttatttgaaaaatgttagtgtgaggtacatatatgggaaaatgttaatactgacatttgaagacagcgaggaagaaatactaaaccatatagtttcttatatcagtacaggaacgaaggcatttcaggtggtagaaaatgcaagaacagaattaagattcgatggattggaaatagatgttgcaaaacgtttggtaagaaggctgtaaaatttcacgttgaattttacagctttcctgcgtataatatataagtgaagaagctatattttagtaggaaaggaagttgattttatgccaaatatattaccggtatcagatttaagaaattataatgaagtgttgaaaaattgccagattggagaacccgtgtttttgaccaaaaacggtagaggtaagtttgtggttatggatattgaggactacgagcgtgaaaaagcagaaaagaagctactcatgaaactgcaggaagcagaagaagctgttagggatgaaagtgcctggatgagtttggatgaactaaagaaatctgtcggggtatagcctatgatgaaattgcggattaaccctattgtggcagaggacttgaagaacattaaagagtatattgcggaagacaatgaagaaatggcagtaaagaccattcaggagatatatgctcgaattgagaatatacagcaatttccgtacatgggagctgatcttgctaaaagggtcagcttccgaacggattataaatatgtgatttgcgggaattatgtcgtgctatataagattggggaagaatatgtggagatttaccgagtggtaaatcgatatcaggatattacgaagatatttctttgatgtgaagagggggattttatgaacaaaaatctttatagtggaaaattgatagctgttgatggtcctaatggggcaggaaagactacaattatacaagaattaaaaaaagagttggagaaacggagaattaaagcttgttttacgaaagaacctacagataatgaattaggatgttttgtgagggaatgaataaaatagatgatatgtttgctcagggtgtttgctaattgtatattt

SEQ ID NO: 1004 - DNA, 23800 bp, Unknown
  gut microbiota DNA sequence
tgtaaaaacccccccaatacattatatagtttttgctataccccatagtaaaaataccttctcctaaaaaggcagcgttcgaagctgtcttttttattttataaagtgcatcgtgtacgaccacattcgggaaaggatgcaaattgggtatgaaaataacccacaggaaacacatgtgcaaaaaacaggaataaacggttgcgcgtttgtgcaatttttcgtattttttcttaaaactgggaatatagtaccgtagaactgaccagaaaaacgcaggaacttttttcgactttgtgcacacttatccggccgtccatggtattataataaccgtaaaaaccccccaatacattatatagtttttgctataccccatagtaaaaataccttctcctaaaaagacagcgttcgaggctgtcttttttattttgttttcacttatacaaaataaccaaaaacgagtcatactttttgtgaggtttgtgcacactttcgcaggggttcatgctattataataaccgtaaaaacccccccaatacattatatatagtttttgctataccccatagtaaaaataccttctcctaaaaggcagcgttcgaagctgtcttttttattatctgaaattattcaaaaattttattctgaaagatatttccccatgatgaatcgtgtatataatagttggaaacaggagggcaggcatgaaaaaaacaaatgacactccaatggaagattttcaggcattatataaccggcaggtgaatcgtgtttatagactggcactggttatgctgggcagccaaagtgatgcggaagacatggtacagatggtatttctgaaagtctgggagaaaaaaataagtttccgggacacagatcatgaaacggcatggattctgaccgcaacgaaaaatcagtgcaaagatgtactgaaaagttatgagcggaaacattgcagcacactggaagaaatgccggaaccgggtattgcatcggaaaaccatatggaaaatgttgtgtggctggcactggagtcgctggaacccaaataccggattctgctgtatctgtattattatgaaggctattccatacgggaactgattgggattctgaaacgaaaagaaagtacattgcagacgcagcttgctgcaggacgcaggaaattgaaagaagagctcaaaaaagcaggggagattccgcaaaattgggaaagggagggaaaataaaatgatgagtgatcctgaaaaatgggaagaaattttcaaatatacgattgatcagacgtcaccggatcaggaacggaaagagcagatgtggaaccggcttcagagtacaatttcaggaagaggacagaagtggaagcaggccatacgatccgggtggcagccgcatggccggaaaacatttgcagcggcattggccggaacctgtgtgattgcagtctgcctgttgaccggcgtaggtgtcaatgccgcaacggatggcgcattgtttgattctatccgggaattttgcggacttccggtacagcagaagaaagcggcagacgaaggattgaagctgaaaaatgaagtgtatgcaccggaactggcaggatgttctgaaaaatatgtggtatttgccaatgaacgcgcactgatggtatatggacggcaggaaaaaaggcttctggcggcactggatctgcaggcaatggactgcaattattttaataccgacagtatccatacccgtgtgctgctgcagaaagacaccatatatatttttaatgagaaaaaggaacagcagccaacgcagatgtatgtgtatgatcttaaaaagactgatgtatcatccgcgctttccgtgacggaggatgttcgaaaactggaactggtttaccgggagtggaaaacgttttccgcagaaaattccctggacacattttctggtatggcagacggggactattggaacagtctgataaatttcggtaaagatggcaaagaaacgggcgtttacagtcagcagtgtattgtatggacggatagggctggcagacagtatcgcagtgctttagttattatcggtggagatgattatgaattgtattcctgcccggcggatgacacggagaaaatttcgaaggaaaagcttttggtacagacgtattctgatgagatacagacggaaactgcgacggaagagaatacgcagcatacaggactgccggaatttgcttatcagggagacgatgaaattatgaaacttgtctgtgattacatgattaaaaacagaaacgagtatgaatatctggaaaacggtggaatttatatttatgtgccggagccggtcattgtgaaaacagtcagaaccggaaatgatctgtttatttttggaaatttctggtgggaaacatactaccggaacggaaatacgctgatgagtgacagtggaagtgaaatgcctgcacggttacattttgtttcgtatggaaatggcagttatatttttaaggataaagaagtagcaggggacggatcttactatggcacaagtattcgtgaattctgcgaaggatatcaggtagatccgcagaaactgatggataccgcggaggcacataaaaaaattcgtataaaaatgcttcgtgattatgtaaagcagaatcatctagacatccaatattacaaagattacggctgggatccggtggcactggataaataataaaagaaaaaggacttgtcacagaataaaaattatgctataattccaaattgtcagagtgctttgcattctgatggaaatgggcagattcccgagtggccaaaggggacagactgtaaatctgctgcaaattgcttcggtggttcgaatccacctctgcccattcttttaagaccgacattgtgtcggtctttttttgtgcagattattaaaaaatgaaataaggtattgttggaaaatcttaaaaagaatgcgcataaagcataagcgattatgcggataaaataaaaaatattgtcagtcgcggtgcgcacagcgcgcagtagattcacgctcgatcagcttaggacgcagcagcgttttgctgatcgggatgtgatggatcagggaatttaaaatatcgtaagcacaacggccaagctcgttgcgttcctgacggattgtggtaagcggcgggtcaaaagtggcagcaatggatatgtcgtcaaaaccaacaacactgacgtcttccggcacgcggaatccgcgcttcgtacattcgtcaatgacacctttggcaatcaggtcattgccgcagaccacggcagtggcaccggcggaaagaaatccgggaacatgatatttggcactgtcggatacatagtagccgtaagctgtcagatccttctgcacaggaagtgaagcagcagccatagcactttcgaatgcctcctgccgctggtcagaaaccagtgagtataaggaaccgtttaagaatgcaatgtttttatgcccgagattaaccagatgatttactgccatggtgatgccttcgtagctgtcggttccaagatagcagacatttggatttccggagatgaaattgtcaaaaagcacagttggcatggtagtgttttccagctgcttgatccaggaatcatgcaatgcaagacccatcagaaaggctccgcaatagccgtttttcaacagaaaggtatcgtatttttcctcttcctgaaatgccggggtgatggggagaatatcaacatcccatttgcggcggaacgcattctgtttgaaaccgagaactatgtcatatccgaattcatcaattgtttcgtaattcatgttttctatgaaaatgcaaagcttgcggttttccactttcttggaacgcttggtgctgtatcccatctccacagcggtatcgagaaccatctgccgcagctcatcacttatgtcacttgcgccgtttaaacctttggagactgtgcttacagaaactccaagacgattggcaatatctttgattgtagccatatattttctcctgtgatttcttatgtttaaatgattataaatcagtttgggaaactgtgcaattctttctcaaaaaaagtttcgaaaaaacagagcaataatgttgtgaatatatacaaaaacacgatataaaatacgtgaaaagtggggaaaatggtgtccgaaaacgcaaaatcattgacaaaatgacgtagagaaactaaaattaagacagatacgaaaaaacacgaaacaatccgaaaagatttttagatggtttttccaataatccgaaggagaattcgtgatttaaaagacggggtgaagaatcttggaaggacaggaagtagcaagaggttccggaatccttcttgcagtatcaagcctaccgtcagagtatggtattggcactctgggtgatgcagcattccattttgtggatctgctggtggatctgaaacaaaagtactggcaggtgcttcctgtcggacctacaagttttggggatagcccatatcagagcttgtcggcatttgccggaaatccttatctgattgatctggatcagcttgccagagaaaagcttctgacgccggaggaaatccggagccattactggggaacacagaaatctgccattgattatgcagcactctttgaaaacaggacgctggttctgcagaaagcatttggtcggtttgacgaacacgaaccggaatttcagcagtttgtagaagaaaacagggactgggtcgaagattatggactgtatatggcactgaaagtatccaatggaaaccagaactggcagagctggccggaaaatattcaaaaaaaacaaccggttgcgcttgcaaagtgccgaaaagagatgtataataacatcatgttttgggtgttttgccaatacaagttcttccaacagtggggaaaacttagggaatatgccaacagcaaaggagtccagctgatcggagatgtaccattttatgtgggaaaggacagcgtggatacctggatgcatccggaacagtttttactggatgagaatggcgaagctgcttatgtggcagctgcaattccggataagttttccgaaacaggtcaggtatggggaaatccactgtataactggcctctcatgcaggaggatgggttttcctggtggaaacgaagaatgcagatcagtacaaagctctttgatgtaatccggatggatcatttcatcgggttcgtcaaaaattatatggttccgaaagatgccacggatgcttccggcggacggtggatgaagggaccggggcgcaaactgactgacgctttgaattccgttttgaatggaacaacagtgatcgccgatgattacggcggcaaggcattgataccgggagtgaaaaaactccttgcaaagacagggtggctggacacaaaagttctgatgtttgcatttgacggagatccgtccaatgaacatctgccacataattatccgggaagccacacagtggtatacgcgggaacgcatgacaatgatacgattgtaggatatttcagggacaagacagaatatgaactggcttatctgtatgaatatctcaacatcagcagtcaggaagaaatcccggatgcactgatccggtgtgcatacgcaagtattgcagatatcgcgatcatacagatgcaggatttgctgaaactcgggaacgaggcaagaatgaatgcaccgtctaccgtggggtataactggcggtggagattgaacaaagaacagctcgcggaaagccgccgggcgtggatacggaatcttgcggcggtataccgcagatgacgcagaaattacgatatagagcgcagaggcgctttatatagatacttttgaactatcatttttgaaaaaaggagaggaaaacgatgaaaaagaaagtattagcagcaatgcttgttgcagcaatgacagctacaatgttcgctggatgcggcagcaaggacaacggagcatctaatgatggaacacaggcagcaaacaatggaagcacttccgagtcagcagaaccagttgatgtaaaacttactgttatgggaccttccgaggatcaggatgatgcacagggggcatggttaaagacagagtgtgaggcatttaacgaggaacatccggagtggaacattacatttgattatgtaacatgtgcagagtctgatgcaaaagacaccgtattacaggatcctgcaagtgcagcggatgtattcatgtttgcaaatgaccagattgctgagctggttgatgccggagcattaacaaagctcggtggagatgcagcagaatatgttaagagctctaacccagaagctatggcagcaactgttacatacaacggagatatttatggtgttccttatacaccaaatacatggtttatgtattatgataagagagtcttctcagaagatgatgtaaagagccttgatacaatgcttgagaaaggaaaagtttctttcccatttgacaacggctggtatcttgcttccttctatgcagcaaacggatgtacaatcttcggagatggtacagatgcatctaagggatatgacttcggcggagacaacgctgtagcagtaacaaagtacattgttgacttattcaataacaagaatttcgtaatggacaataacgaaggatcccttggtcttgccggattaaaggatggatctgtaaatgcttacttcaatggtaactggaattatgatgcagtagttaagaaccttggtgaggagaacgttggtgttgcagcccttcctacaatcaacgttgacggaaaagactgccagctgaaggcattccttggttctaaggctattggtgttaacccgaactgcaagaatcaggaagttgctgttaagcttgctgcatacttaggaagcgaagacgcacagttaaagcattttgagttaagaaagcaggctcctgttaatacaaaccttgtttctaacgaagaagttgctaaggatgcagttgcatcaactttggcaaacgtagcagcaaattgctctatcgctcagccaatcatcccaatgcaggcttactgggatgcagctacaccattcggtgatgcattcgtacacggtgctgaaggacagatcacagcagacaatgctaaggaaaagacagaagcattaaacgagcagttaaacagctcacttacagagtaatctttttccaaaaggaaaagacagagaaacaattccaaggttctggggattccccggaatcttggaatgcatgagtctataaatatggcatagagtaacatgtgccgggaggataagtatgataggtgcaaacaaaaagaagtcggacttcgctacaccgtacactgtatccaatgcgcttacgaagggcggggctgcagttaagttatcagcgcttataatgggattgggaaacatcgcccacaagcagattatcaaaggtttaatttttttggcaattgagattggctatattatgtttatggtcaatgcaggtgcatattatctttccatgcttccttcattaggatggagaaaacaggaagaggtatttaatgaacagaaacagatttatgagtatgtacagggtgacaattccgtattgttgttgttatacggtgttgctacgattgcgatcactcttttatttatttatatgtgggctgaaaatttaagaagcgcatatatggcagagtgcctcgcaaaagaggggaaagaaatcaattcttttggcaaggatgtcaaaagtttatttgataaaaatttatacaagacattaatgtttctcccattgatgggaattcttatttttacagttttaccattgttattcatgattccaatggcatttaccaattattctacgatcaacaagcatctgaccttgtttgactgggttggattggcgaactttaagacggtacttggacttggcggaaagataggcaagacattctggagagttttaggatggaccattgtctgggcagtatgtgctacattcttatgtaacttcctgggactgattcttgcgattgtcatcaaccgcaaagagacaaagtgcaaagcattctggcgtacctgttttgttatttccattgcagtaccacagtttgtatccttactggttatgagacagatgcttcaggaacatggggcggtcaacaacctgctgatggagtgcggacttatccagaatccgcttccattctggacgaatacgatgtgggcgcgtgtatcggttattttaattaactgctgggttggtattccgtacaccatgcttcaggttaccggtgtattgcagaatgtaccggcagagttgtatgaggcagccaagattgatggtgccaatgccgcacagattttccgcaaaattacattgccatatattatgtttattatgggaccttatatcattacacagttcacaggtaacatcaataactttaacgttatctatctgttatctgcaggtaagccgactccggttggtgaaacggcgggcaagaccgaccttctggtaacatggctgtacaagttaaccgttgattatcagtattacaacatcggtgccgtgattggtatcttaacattcgtagttctttctattgtggcattagtcacctatagaaatacgaaagcatacaaagatgaggagggattcatgtaatgagcagtgcaaaagtaagcaaacgccctatgaccgctggccgggcaaagaaaattgcaaaaaattcattggtacatataatccttgccatcctggtagtgatctggttattcccgattttctggattatcatgacaagtttgcgaggggaaagtggtgcatataccgcatacttcttcccaaaagaactgacatttaataactataagagactctttacggagacaacattgttgaacttcccgagagcttttatgaatacgctgatcatttccattttttcatgcttgatttcaacgacattcgtactgagtgtatcttactgtatgtcaagactgcgctttagaatgcgtaaaacatttatgaatctggcaatgatccttggattgttcccggcattcatgtccatggttgcagtatactttattttaaaagcagttggactgaccgagggaagtgggcttcgtatcgctctgattctgatttattctgcaggatctggtgttggattttatatcgcaaagggattctttgatacggtaccaaagtctctctcagaggcagcgattctggatggatgtaatcagttccaggtattttacaagatcattcttccactcagtaaaccaatcgttgtctatacgatccttacggcattccttgctccatggcttgacttcgtatttgtacgtgtcattgttggaccaaaggataagtattggacggtatcacttctcctgtacaatatgctggagaaagagtttgtaaacggatggtttacaagatgggctgcagccgcagttattgtgtctattccgatctctattctcttcttatttatgcagaaattctatgtagatggtctgacaggcgctgtaaagggttaatgatgaaagatagaaagccggtggtcgtttgaccaccggcttttttcatccgatgaagaaaggaaaggttatgaaaaaaagaattttgtcggcagttgttgtgctggtgctttttgccggggtgcttgcaggctgtatttcggggaacggtacacaggatgcaaaattaaatataattgatgataattaccgtaattactatgaaatttttgtcggctccttttatgacagtgatggggacggcatgggtgatttaaagggtgtggaagaaaagctggattacatctcagatctgggatgcaacggaatctggctcatgccgatcatgccttccccaacctatcataaatatgatacaacggattacgaagcggtggacgaggcatatggtacggcggatgattttaaagagctggcaagtgcgtgtcatgaaaaaggtatccggctgatcattgatgtggcaatgaatcacagttcttcccagcatccatggtttacacaggcatgtgagtatcttgcaggtctgaaggcaggagaaaaaccggacgatacggtgtgtccgtatgtggattactatcatttttctgacaagcaggagggaacaacctactatgcagtgccgggaagcagcagctggtggtatgagggatccttctggtcggaaatgccggatctgaacctgaaaagcccggcagtacagaaggaatttgaagaagttgcggattactggatagatcttggtgtggatggtttccggatggatgcggccatgcattatgaagaaaatgcaaccaatgcgaattgtgatattttaaataaactgtacacatactgtaaagaaaaaaatccacagttttatatggtatccgaagtgtgggcgagtgagaatgtcattgcggattattatgagagtggaacaccaagcatgtttaattttgatgcgggaacggcaaaaggggcactggtcaatgcggtaagaaagggcgatccggtaagccttgtgaattccatgctgaaatatcagaatgatttctcccaaaaaaatccggattatattgatgcaccttttttgtccaatcacgatatggcaaggattgccaatacgctggtgaatgatccggataagattaagacagcagcaggtcttctgatgacaatgaacggcagtccgtttgtttattatggggaagaaattggcatgaacagttccggaacaaaggatgaaaataagcgtattccgatggtgtggtcaaaaactgacaccacaggaatgacaaagggaccggcagatatggatgccggcattgaatctccgtttccggcagaagatgaacaggaaaaggataaggattctatcttaagttactataaaaatgcgcttcgtctgcggaatcagaatccggaaattgcaaggggaaccatagaaaaagtagaaagtctgtgtaaagattcacaggcggcaatcacgaaaacgtatcaggacagtaccatcggaattgtgtataatcttggggaaggaaacggtacggttgacctgaagaaaacagcacttgaaaatatgaacctggagggaagcctgacactgaaggaagagacggtacagctgaaagatgggaaactggagatgccggcatgcagtattgctgtgttaaaatagtaaagtataacaaattatagtagtttcaagttgagttttttgtcagattgtagtatattatctatattataggcggggaggaatcgtctgaattaacggaggcgtatgcaatatgagaaaaaacgatgagcagaaagtaaataaactaaagaaagaaaaggtcaaaaaagaaaaaacaaagaaaataccgaaacgtgacaatgcttcccggcaggaaaaaaagacaaaaattcctaaaataaaaaaggtggccggcgaacagaaaagagaaaaagcggaaattccgttctatcgcagtattgcgatgcggctggtggttgctttcctgattccggttattggtgtgctggctcttggtattacctcttacaataacgcttccaatgccattgtggatacatacaaagaatctgtacagcagactgctgatacgatgcagcagtatatcaatctggttatcacgagtgagaaggacgaatttaagacctatctgaccgagtcggatctgcgtaagtattttgcggggttgatggatatgtatgatgagagctccgtgcgcaaagactatcagagcagactgcgcaataagatggcactcgacagcaagattcagggagcctatattatcgcggacaacaagcgtacgattgactgtcagggaattgttcgtgaccgaaatgtttatacggactatgtcggatgcgatcagggaaaactggtcagcaaaagtgcaacaaactggtttttcttcgggccagatgaaagttcagataaagcactggatctgggaattgattcctactgtctgcgaattgtaaaaaaaatgaacaatcagccggccatgatgatcataaacatcagtgattcctttatccgttccgccatgcagtcactggaccctggaaagggaggctatgtagcattaattacggatacggatggaaaagagttttattccgatgaatccgtcaagacggaaaaagcactgatttacggtacaagtttttataagaaagcattgaacgggaaaaaagattccggaaaccagatgattacatttaatggaaagtcatacatgtttgtatacagtaaactttcagccggagatcttatggttacggcactgattccttctgaccgtctgcttgagcagtcatccggaatcaaacagctgacaaccgtacttgtgattgtctgtatgatcatcgcacttgcacttgggttattcctttcgagtcagatgacaggaaccatcaaatatattctgcgtcagctgcgcaaagtttccaatggaaaccttacggttcatctttctgcaaagcacaaagatgaatttggtttactgtgtgatggtgtcaatgataccgtagagcatatgaaatcgctgattctggatgtcaatgatgtgagtcagcaggttggagaagcggcaattcatgtggcagaggcatccggaacattccttgaaacttctaagaatattcagagtgcagttgaagagattgagagtggtgtgaacaaactggataccggttccgataactgtatgagtcagatggattccttatcgggaaagattaataatgtaagctccaatgcagatgaattgggaaaacttacttctgcaaccggagaaaccattaccaccggtatatcttctgtacagacacttacgcagacatccgagaccactgcaaacattacaagaaatgtcattcagtcaatacaggaactggaagaaaaatcaaaatccatcagcaacattgtttctgcgatcaatgatattgcggaacagacgaatttactttccctgaatgcgtccattgaggcagcgcgtgcgggagatgccggcagaggattttctgtggtcgcagaagaaatccgaaagcttgccgatcagtgtcttgcttcttcttcccagatttcttccattgtagatgaaatcgtttccaagacgggagaagtggtaaatatcgcaagacaggcggaagatgcagtttcttcccagtcttccgttgtagaggataccacaaattcctttaaacagattgaccagcttgtagcgcagctgattcaggcactgcagacgatttcgaataatgtgcaggaaatgaatggtgcacgaaacgagacactcagtgcaatcgagagtatttccgatgcgtccacccagacggcagaatgttcttcatcggtacattcggcagcaggtacgcagctggatgcaatcaagaatctggatgaagcatcccagagtcttacgaccaaggcccagagcctgctggatgcactgtcaacgttccaggtttaagcaaaaagtgaaaaagcctgaagatgaaatgcttcaggctttttttatggaggaagaaaatgcggacaattatcgtagtcatttatgtttttttatttttgattcttggactgccgattctcggaatcgaatggattatcgcaaaatttgataaacatgcagccgatatcagccagcttcggattgtgcagtggggactgcgctgtgtatcttttttggcgggggttcatctgactgttgagggaaaagaacatgtaccaacggatcaggctgtactttatattggaaatcaccgcagcatttttgatattgtcattacttatgcacagtgtccgaatctgaccgggtatatttctaaagatggtgtcaataaggttccgctgctgggaatatggatgcgccgtctgtattgtctgtttcttgaccgcaaggatttaaagcagggacttaagaccattctgaccgctatcgatcaggtgaagtccggcatttctatttgtattttcccggagggaacgagaaatcgtgaccgggaggatgcaacgatgcttttgccgtttaaagatggttcttttaaaatagcacagaagacgggatgtccgatcattccgatggcacttaccgggacggcggatatttttgaaaatcattttccgtggctgcaccgtgcagaggtaaaactgacctatggggagcccattatttttgccgaactttccaaggaagatcagaaacatatcggcgcatactgccagaatgtgattcatgaaatgctgcaggaacacaaaaatacaaaagaatagatcgcacgaccgctgcataggatagcataagaacgaaaatagagtggtcaaccatgaaagataaaaaaagaaagtatatcctgatgatcattttgctgggggtgcttatgctgctgagcgggtgtgtgcgaaaagaatgtgaggagaaggtaaaggatctggagtttaccgtgacaaaggaggaagaacttccggaagccttaagacaacagattgaagaaaaaaaggagggggatttccgttttacatacagcgataatgaatatttatacgttgccagaggttatggaatacaggagaccggaggatacagcatctccgtggaagactgttatctgagtgataccgccatctgtgtaaagacgagactgcagggacccaaaaacggagaagaggtgacaaaagcacctagttatccgtttattgtactgaagctggaactgcgggaggaagaggtactgtttcaatagggtacttaagaactattgtaaaaagtttaacactctgctatactaaagctactagatatagtattttctagaatattcaactcaaatggaggaggcaacaatggaacaggcacagattagcaaggttcgggcatccgttcatcggcagcgcggtaacagagtgaaaattcagttagaccgtggacgtaacaaggtagatattcaggaaggcgttatccagggcgcatatccaagcgtttttacaatacttgtagatgacgagcgagaggaaaatcctccacagttattatcattcagttacactgatattattacaaaggacattcgaatgaaactttgttaggaatgaataaaattccctttctttgaataagtattagtatacttacttcaaagagaggggatttttttgttttggaattgaagagacagctgttcagacagaatttactaaggagcagggcgtttacccagattacgctggatgatgactgtattgtaaaagacaacaaaccggatctgttgaacattatacataccaggggttctgttatttttgaggatgtcaaggtgagcagccagacggtgtgggttaccggacagttgcgttttgtcgtgttataccgcagtgaagataaccggctggaatcttttacggacagtataaatttcggagaaaaaatttttatggatgaggtggaagaacgcgataccgtcaatctgagcggagatctggaggatctgaatatcagtgccatcaattccagaaagcttgccgtgcgtgctctgcttggcattcatgccgtgtgtgaggtgccggtggaagaagaaattgtaagtggtgttgaaaatgatccggatattcagcagaaaagccggacgatgcagcttttggcactgacatccgcgaaaaaggatatcctgcgtgtgcacagtgatattgcactgccacagtccagtccgaatatcggacatctgctttatgattatgttgaagtgcgtaaccagcaggtgatctgcaccggggagcagatgcagattcagggagaagcgtatgtgaatgtattgtacagcagcccggaaggaaaaatggagtggtatgaaacgatggttccgttttccgaatcaatagaagggggaatgaccggaacacagccgatctgctgggtacattgccagacgaaagaatatgaggtggaaccagccgaagattatgatggcgaaatgagggcgctgagcctgaatctttccatggatgtggaaatgaagctgtgggaagaaaggaatgtggaacttctggcagatgtctattcgctggaaacaaatcttgtgccacagaaagaaatggtctgtgcaaaaaaactgctgattaaaaatgaagcaaaactgcggatctctgaacagatgaagctggcggaagaacaggaacggatcttacagctgtgttcttttgaggggcatgcagagatggatcatgtggaaccggtggaaaacgggttagaggtagaaggaatcctgacggttgatattttgtatgcaacgacggatgacagttttccgattgcacatacgcaggaacagattccgtttacacagattgttgatgttcccggcatgaaagggcacacggaagatatttcttatgaaatcgagccggcgattgatcagcttgcggtgaatctgctggataacgaacgatttgaggtcaaggcggttatttccctgcagacaattgtacagcaggaagtgtgcatggaaaaaattgtggatatccataaggaaccgctagacgcggtggaactgatgaagcagccgggaattgttggctatattgttaaaaaagaagaacaattatgggacattgcaagacattttcatactaccgaggcagaaattatggagacaaacggactcaaatcggcagatgtgcagcagggcgacaagttactcattgtaaagaaagtgagtgaatgttagaattgatgatagaaagcgtcaaaaggagaaagttatggaaaacgaaagaaaaaagaaatttcaggactatgcaccaccggagcagaaaccatcggggggatacaacttaaacggggtgtattattcgcgtgacggacagcggctggatgatcagcccaagaagagctggagccagcgggaatacgagcgcgcggagcgcgaaaaaatacactgccgggcgaaacgggagcagagggaaagtgaggttgatgcgcagggaaatccggtcaaggacaattcgggagtcaaaaaggccatcgcaattgttgtgattgttctgggcgtgatcgcttccatcgcactgccgggatctgcaacatgggcggtgatatttgcaattgttacacttatcagcgccagaaaacaaaagcagagttacgatgctggggactgggaacgtttccgcacaagtgccaaaaaagcaacgaggtggctttgggtaacactggggttgtgctgtgtgggtgtggttgcaatcttcggaatcgtgggaatatatttaaagtccgacaacggggctatgggtctgattcgtgaggcaattcagacaatccgggacgatgacagttcccatactcctgaaaattcccaccaagatgctgtagcagattcaaaaagtaaggcgccggatggaaaatttaagaatctgaatggggagaatgtgtcttatgtgcatggatttaatacattcgcccttgctggaaacgaattttcgattccgtgtaaattttcggagtttgaaaaagccggatttaccatcagtaacgatgaagagaaaaagattaagccgggagaatccaatggttatgcatactatgaggaggatggaacttaccgcgggacgatctttatttttaatacatcagataaggatattgtgccggaaaagggaatcgttggaggacttacattaaatccgggttcaccggtgaaaaaaaacgatctgaaactggcaggggatctggggtttgagagtcagccggatgattttggacaggttttgggatatcagctcacaaattatgtgagcatgagcaattatacttcctatgagtggtattttgaagaccagggatattataccagcctgcaggcacaatatggggaagatggaaaactgagtacggtctggttaatgaataatgctgatttgcggaattaatggctgtttttgaaaaaatttatgaatttttccttaattagtaagaaaaaccagtagaaaaaatatgtattttgtgccacaataaaggaaggtatgggagcactcccatggaagataagtctggaggcataatatgcataagaaaatacatgtaaaaacaaagaataagatttgtgcagcagtattggtgtttgttctggccgggtcacttaccgcaggtgcgtgtgcggtaccgaatgtgtatgcaaagaccgaggcagaaaagaagcgtgatgcgtacaagaaaaagctgaaagcaaaaaacagcgatattgcaaatatcaaagacagtcagtcggatgtaaaagacagcatcactgctgccgcagccagaatgaaaacacttctttccaagcaggaacagctgaagtcggatattaaggacaagcagaatgaagtggagcaggcaaacaaaaagctggaagaagcaaaggaagaagaacagaaccagtatgatgccatgaagctcaggattcagtatctgtatgagaacagtacggataattccatctggtctgccattctggagtccaatgggctgtccgatatgttaaaccgtattgaatatgcgaccgatctgtacaaatctgacagggaacttatgacttcttatcagaatgcggtaaagaaggttgaggactggactatgcagctggcagatgagatggacagtctgcttgctttgcaggataagtatcagacccagcagggggaactgaaaaccctcatggcaaagctcgaacaacaaaaagatgcctatgcgcagcagctggcagaagcacagaagcaggcgcaggactataaaaagacaatttccaaacaggaggcaattatccgtgcgcaggaggctgcggcagcgcgtgccaatgccaacacctatgacggtggaggtaccggtgccagcggtggaattgcaagcgattcctatttgaaagatccggattgtaatccttcacagacaacagatgtgagcggcgcagatattgtggcttttgcgcagcagtttgttggaaatccttatgtatggggaggaaacagtctgaccaatggggttgactgttccggatttgtacatcaggtctatgcacattttggaatcagtaccccacggtattcccaggcatttaagagtgtgggacagccggtgtcttatcagaatatccaggcgggagatgtcgtggtatatccgggacatgtggcaatttacattggaaacggaaatatcgtggaggcgcagtcaacaagagccggcattacaaacagccgtccggtgaactgtcacacgatcaccgcaatacgcagactggtataggagtttttgatgagaccaaaacatctggtatccattgttctgattgcagttgtgcttgtgatgctcatgagaaataataatagcatgacgaatgcaaggccgcttgtgtaccgggagtctctggatgaagtggcagcgcagatcaatggtgaaaaactgaccctcagagacatggcattttatgtcggatatgaggaatatcagattcagcaggaggcactggtatacgatccggatgatccgaaccgttactggagtatgcgtgtagaagggggatttatgaatgccgttgcacgcaaaaatgcgatgcagatggcacttcatgatgaacttttttatcagatggccatggaggaaggcattacactggatgacaatgaccaaaaacatatggacaataaactggaggatttctgggaggatctaacggagcgtcagggggaaacggcactggggatttccaggaaagatgccaaaaagacgatccaaaggattgcatacgcccagaaatatcaggaagtgtatgcacagctgcataaccgtacctatgacgattatgcgtatatggaggattcctatcagaagcttttgaaaaagcaaaaatacaaagtgaatgctaaagtatggaatcgtgtgagttttggaaatgtcacatacaataataaaaagaaagaagattaaaaaatgtcagtaaaattaggaagaaatgatccatgttggtgcggaagcggcaagaaatataaggcgtgtcatgcggctttcgatgataaacttgcacgtttggcacaggagggtcacgttgttccgacacatgacctgatcaagacgccggatcagattgcagggataaaggagagtgccaaaatcaatgtagcagtacttgattacatagaaaaaaacattcacgcaggaatgaatacagcggaaattgataagattgtctatgatatgaccacttccatgggaggtattccggcaccgctcaactatgaaggatatccatacagtgtatgtacttcagtgaatgagcaggtatgtcacggatttccttccgagaaggtgatcttaaaagagggggatattatcaatgtagactgttctaccattctgaacggatatttttccgattcttcccggatgttctgcattggggaagtaagcccggagaaaaagaaactggttcaggtaacgaaagaatgtgtagaacttggacttaaggaagtaaagccctggggttttttgggtgatatgggtcaggcagttcacgatcatgcttatgctaacgggtataccgttgtacgtgaaattggcggccacggtgttggcctggaatttcatgaggagccgtgggttggttacaattccaggcgcggaacccagatggtacttgcaccgggtatgatctttaccatcgagccgatggttaacatgggcggtgtggagattttcattgacgaagagaacgactgggaagtatacaccgaggatggaatgccatctgcacagtgggagatcatggtgctcgtcactgaggatggtcatgaagtacttagctggtaaaggttcacgtatgccatacatctttgatgtatgcgtgtaatatgggggagtacagatgaaaaaggattgtctgacaacattttcaaaggtcgactttaatacctttgagccggaagaggataaaatacgaattgaggatattgcacatgccctgtcgatgatgacgcgggcaaacgggcatttcccgcagtttttttctgtaggtcagcactgcatccagtgctgccgtgaggcaactgcgagaaactatctgccacagacggcacttgcctgtctgcttcacgatggaagtgaagcttatctggcggacattacccgcccggtcaagaaaaacatgacgatgtatctgcagatcgaagaacagctgcagcatatgatctacactaaatttctgggatatgtgccggagggggaagaggcagaactgattacaaacattgatgacagctgcctgtattatgagttccttcattttatggatgaaaaaatgtattcggtggagccggttatggtgagcacaccgagctatgaatttcagccgatggctgatgtggagaaagagtttctttcattgtttgaggaactgaaagagaaaatcagggaagaggaatccaagaaatgaataaaaaggaagtcctggagttaaagagaagattcaagaaagaggcggcaacgtttacgcgcgtgtgtggctgttacgttgacggaaatcacaataaagtctgtaagtttggaaatacatttctgaatctggaagaagatgaattttacaaatatctggaaattgcaaataaggcattgtccggaaccatcggaaataaccttctggaattgaagtttccgattgaggaagaggaagtgggcggtcgtcagcatattctgatggcactgcgcgcatcgaagctggaagatgaaaatctgctggataccttttatgatctggtaatcgacacgtatgaccatgccggaaattatctgatcgtgctgtttcacgatgcatacgatgtgatgagccggacgagtgacaataacaatctcgatgagtccgaggaagtgtacgaatatctgatctgtgcgatctgtccggtcgatctgtcaaagccggggcttggctttctcgaggaggagcaccggatcgggccgcgtgtgcgcgactgggtggtaggagccgtggacactgcatttttattcccggcattcaatgaccgcagtacggatatccattcgacattgttttacacgaaaaataccaaggagccacattctgaatttatggcaaacggattgggttgcggcattgagcgcactgcaaccgagcagaagatggcattccattccatcgtccgcaacgtgcttggcgcagaggatgagcacacggatgatgtgcttttggatctgcagcagaatttaagtgatatgatcgatgaatatgccgagacacacgacgatgacgaagatgttttcctgctcgataaggaagtggtcacaaagcttctcgcagacagtgagatcagtgaggaaaaagccgcaaagatcgaaaagtctgtggatgaggcatttggcgagaaaccgcctgcagccgagaatgtgatcgactccaaggcgcttgtgcagaatgaactgcgtgtggaaaaaatggcactcgaggatcaggtcggcacactgaccgtgcagcttaatgaaaaggatgaggcgcttgcggagcgtacctcccagctcattgaaaagcaggaagagatcgacaattatatcgctgagacaaagacgtatgatgtggtactgcgcgtgaagccggagaaggcatcgcagatcaagtcgcaggtgattaatgggcagaagtgccttgtgattccgatggatgaggacgagcacgccacgatcaacggggtgaatacgacggtatagttgaaaagaaaaatttgcaaaaaagggttgttaaaattcctggagttgcttataataaagtaaagaaagaagttaattcttaaaagctggtgagtccccaccaaaaagagggaacccaaaaaagcggtgagtctccaccaaaaagagagaactgaaaaaagctggtgagtccccaccaaaaagagggaaccgaaaacgggagggcgagaaatcgtcctcctttttttaccaaaggagaaatatgaaattttataatatagctgatgaatacataaattttttgcggacatttgattcgaaagtgtccgaaaataaacaggagagtcgtccttatattggagtagttattgaaattgaggaaatgaaatattatgctccattcacgttccccaaagcgaaacaccgcaaaatgaagaatgggaaagattttagaaagattcagggaggggagtatggggcgattaatttcaataacatgattccggttcctgactgcgcattaaagctgattgatattgataatgagtcagatcagaagtatagacgtctgttacaaaatcaatatcgcgctataagggctgacagtgaggagattataaagacggcagcaagattaagaaaacttgttatgaccggagatgagaacttgacaacgtttgataagcggataaaagaacgttgctgtaatttgaaaattatagaacaggtgtatacacaatttaatatgaagcaaaccaataggtaaatacataagccgtatgattatcctttatgttgactgtgaatattatctgctggaaaaagtttaaataaagtaggcatttggaatgaaatctccccctttctgtgctatcataaatctattggattatgatacatggaaaggggcttttttatgagcagaaaaaatcccgcaaaaaatataaatatcggtctgctggcgcatgtatgagccgacagacggtaacaacccatcaaaacc

SEQ ID NO: 1005 - DNA, 32180 bp, Unknown
  gut microbiota DNA sequence
atgaaatctccccaaagttaatggtaaatcctatatctgtctgcaaagtgcatccactttcgcaatttcttccatcatacacatttctttcagatcctgtgcatttccttcggaatgttccacttcctttgagaaaatacgcgctacgtcaatacggtcagacattgtgaatttgccaccgtttctgtaaaaacgtgccgcatccatatctcttaccacaagggttgccatcacaatcattttggcataggataaaatatcataatcatatatcgaattcatcagataacgatacacaaaataaaccagaagatgttcatagccaagttccgaataatccgatgatcgcatatattctgtcagaaatgcctcataggtatcttcgtgatacagcttttcgaattcttccttggtgtgaacccattcatcatccagctcttccatatcggcaaaaaccgcaaaacgttcctcgaaatcttcataagaaagtgcacgaaccggcttctcttttccctcaatatttttctgctcccactcccgaagttcatgaccggcatcttcgtatctccagtctgccagtaccgacatatcctcttttgcctgtgcataattgatcacggtctgtacacggtcacaccacgccagaaactctctcatgcgctccggaatattatgggtacgattctgcagaatattcaccgactcctgctgcacccattccatgaatgcaacatatgccgggtcgtcctcaccgtcatcgcaatttccgggcagctctatatccaccagcttttccggttctgtccgctcaaacagaatccgtccaacttcctcgcaggaaagactcagtgctttctgctccacatctccgtaaatcagggaaaaacgcggatattctgtacacacttcacacagagcctcttccccaagtgctgtataaagatcacagagattatggtcattgagcatggcacagcgtttcttccctttcagcttaaaacggtatccaccgccatcatcatccggatcggcctcatacatactttctttgagtcttttgccaaatttaccttccacactgttgtaatatgcataggaatcctcatcaatgtcaatttcccagcctgcacagcaactgtccttgcagcgggatgcaatgcaggaaaatttctcataatattccggaacccgtaaaatcacgatgcctgcctctctttctcttctttttctgccatgtactctttctccatagtttcccagtccggatcctgtgtgcctttaaagtgattataggctatatagccaatgcaccagatcaatcctgccatcgttgttgaaaaaagtattttgacaacacataccgcaagcagtgtgacattcaggtcccctgccagaaaagaaactgccagagtatgaagcggaagcacaagcatcttccacaacccgtaatatgctgctgcaatcacaccgattgtataacagacaaatcccaacaatgcattaatatgctttttcatatgtatccatcctcgttttcctaactattccatcaacttaactattttgccactttccatggtttttttcaagtcaagaatgcgctgattgaccgatccccggaacttgagcgtaatatccttctgttcctcaataaatggaccgtccaccagtacatcgatcagggaaagcaggtcatccgtgtctttcgtatgttttctgcctcccaaaatcaggtctttatcatatatatatccggtaaatgcccagacattcttatccggatacaaactttttacttttttcataaaaggaagaagagcctcctgattttcttcctcaaacggctctcctcccaacagggtcattccctctatatactccggtttcagtgaatcaagcaccttttgctgtacctgctcatcgaaacattctccataggtaaaatcccatgtctgtggctgaaaacagcccttacatgcattgcggcatccggatacaaacagtaccgtccgacagccgagaccgtttgcgatgtcacaatacttaattccagcataattcataatttactctttctttttattcaggaaacggatgcagcctgctgctgccagtaaaaaaacaattactgctgctccaaataccatccgcagatcaaccgcacctgtctttggtgttgcatctgtccggtttccgttttttgatgtatttccactgttattctttttgttcgatgaagttttatgtgtattcccactgctgctcttggaatcctgcatatcgtctgtatcatcgtacgaatcggtatcgtccgtatcgtccgtatcgtctgtatcatctgtatcatctgtatactctgtgtcatcctgactgtccgactgactctgggaagtgctctgggactgtgactggctctgtgtctgtcctgcagaagcatccacaaccgttgtaaccgtaaccggattgtaacttgcatccgtcacttcacgcactgtcagggtaaccggcatcgttgtatatgcatttttcgccttaaaggtaaccgtggcaatggtttcattctgggaataagtcttatttaaaattgccgaaagattaagtgcctgctgattattttccgtaaccggggaaaccagctcaatatttcccgaatccgaagaaatcgtatttgcccatgtggttcctacatattccagatcagaatcgtcatatgccagtcttgctgcaaatgtcgaaagtcccggattattgcttccgaccagacgcaccgttaccgtatccccggcttttgcatcattggttgttccaaccgtcagattcatctggctgttcgccgccataaccggctgcggaacggctgcaaaaagcaacgccagcgcacatcccatcatcagtatcgttttcatcatccctaattttttcatcttctgccctatatcctttttgctatgactacgagtctcccattgtttaccgtgtattcacaggtagagagcatgattgtggtatctccatagataagatgctcccctgtatcatacacacggttctcttccacaaaatccagcagattctgaaactctttccggtttttataattccgaaaccagtaataacggaatccggattcgtctttttcctttacatgtgtctttaccaccgcaacaatctgatattgtccagtttcataaatcgtatcaaaagtaatcaccggatgctttttgtaaaatttcttatccagataggcatccagatctccaaactggcttccatcacttacgttgtgcccaaagatcacaatattctgatccatcggatcaatgctggcatctgcggaaacaaacgggtttcccttattatcatcttttccttcaaaattgtgtttcagataatattccccgcctgtatgatcctgcatcaccggataatcgattggtgtcccgtcaactttgatccatccaaccagatccggatacatactatataatatatcatattggtctaagattgcaagctggtccgtcttttctgtctcacgatttttcatttgctgcttttctttgcggatatattccaaaaccgcttccttttttgcctctttgatctgaaaataattcaatgcaagtaacagaacaaccgccatggccaggaaagaaaaggcgatgcgtctgcataccttttccaccatcggccgatggcggtttctgccactcggcccgatgcgtttttctttctcttcccggggttgtggatcttctacctcatggtgttcatacaaatgggcatattgtttccgtttgttttcttccatgttttataaatgtaatactctttctttgatttcctgtgtacgtccctgattccagaactgtgttccgatatacccgcacgtacgacgtgcaacactcatcttatcctgatcacggtttccgcagttcggacactcccagacgagttttccgctgtccttttcctcaacaattttgatctcaccgtcatagccacattccatacagtaatcactcttcgtgttgagctccgcgtacataatattatcgtaaatgtatttcatgacggcaatcacggcatcaatattatcctgcatatttggtacttccacatagctgattgcaccacccggagacagcttctggaactgtgactcaaacttcagtttatcaaaagcattgatattttccgtcacatgcacatggtaactgttcgtaatataatttttatctgttacgccctctatgataccgaaacgcttctgcagacactttgcaaatttataggtggtggattccagcggcgtaccgtacagactgaaatccatattttccttttctttccactctgcacaggcatcattcagacgctgcatgacacgcagtgcaaatggtgttccattctccggctccgtatgggaaacacctgtcatataacgggtacactcgcacaatcccgcatatcccaaagagatggtggaataaccgccaaataaaagtttgtcgatcgtctctccctttttcagacgggcaagcgctccgttctgccacagaatcggagccacatcactcggtgtgccaagaagtctcttatgtctgcacatcagtgcccggtagcacagttttagacgctcatcgagaatcttccagaattttttctcatcttttccggaagaacatgccacatccaccagattgatcgtcacaactccctggttaaaacgtccgtaatatttcggttttccggtttccgggtcaatatacggagtaagaaaactgcggcatcccatacatggatagcagtgtccttccccgttcttgtccactttcagttctttcatcttcttttcggaaatataatccggaaccatgcgctttgccgtgcactgtgcagccaggcgtgtcagataaaaatacttggaagtctcatggatattatcttcttcgagtacataaatcagtttcgggaaagccggggtaataaatactcctttttcgttctttactcccttgattctctgatgcagcatctcctcaatgatcgctgccaggtcatctctggtctgtccctccggcacttcgtcgagatacataaacaccgtgataaacggagcctgaccgtttgtggtcataagcgtgatcacctgatactggatcatctgcacaccacggttgatctcttctcttacacgcatctctgctactttattgattttctcctcatccagatccagcccgatcttttcaaactctgtccggacctgtatccggaatttttcacggctcacctgtacgaacggtgccagatgggacagtgaaatactctgtcctccatactgcgaacttgcaatctgcgcaatcgcctgtgttgctatattgcaggccgtggaaaaacttctcggacggtcaattccggtctcgctgattacagtaccattctgcagcatgtcctctaagttcaccagacagcagttatgcatgtgctgcgcaaaataatctgcatcatggaaatgaatcagtcctttttcatgtgcttccacaatatcttccggcaacaggaatctcttcgtgatatccttgctgacttctcccgccatataatctctctgtacactgtttacagtaggatttttattggaattttcctgttttacttcctcattgttacactctaagagagacagaatctgttcatccgtagaattggatttacgcacaagcgctctcttataacggtatgtaatataattacgggcaaccgtaaatgcatgctggttcatcagctggttctctaccatatcctggatttcctccacgctggcagatcgtttcatgttttcacatgccacttccacattatcggcaatctcctgaatctgctcatcgctgagtttttcataatcgattaccgatgcattcgctttctgtacagccgcaacgatcttattcgaatcaaaaaatacctcgactccgcttctcttaataattttcatgttccatcttcctctcaaagtctatctttataaacgattgtttacacaaaatataagatatagagattactccctatatcttgtatattttcattaacaaatacaagactacactacatcttgtgttattgtcaacccacatttctacatcatgtggaggcttactccatggaaatgtagacgtatctaggcgtttatgcaatatgtgaaaaaattccgcgccatttttgtaataatttttacagtctgctgtccgtgcgcagcacatcaatgaatttgccggcttctgcccatgccttctttgattctggaatattcagatatgccatctggaacacatgaaacatcccttcataaacagataggcgcacttttaccccctgctcccttgcctttgccgctaccgaaaccgaatcactcagaagcatctcaatcgatccaacctgtatgagcattggcggaaatccccggaaatccccaaacagcggagaaatatacgggtccatccggtcatgttcccccggataatcattctggtaaatcagactctccttcgtatttccaaacagtggatctttctcataattggtctcataagactccccgctggccgtcagatccgtccacggagacatggctatgattcctcccggtaccggcatattatgatcccgcagatacatacagagtgccatcgccagtccaccgcctgccgaatctccggcaaggataatctgttctccataatatcccttggaaagcagccagcggtatgatgccaatgcatcttcaagtgccgccggatatggattctccggggccacacgataatccggagtaagcacattgcatccatggctcagctcgttatataatcctgcaaacacataatacgcattgcgcacagctcccgtataaccgccgccgtgtaactgcagaatcacgtaatccgtgtttggattttcctttaacgacaaaagtttcatcgtaaaatgatccatattgattcctgtcaggttaaacattgccggtggaatccatggcggctctatcatccgcttgcgcagctctccgctctttattttttttccgattttcaaatcattggtaaaatgtgacagcatttctgccaccacacgtccttttacactcgcttcgctttctatcatatatgaaatctccgtttcagttcggttcgtgcacgctgatcaccaagaatcagtgttccaaggaataaaaataccgataccccgagggacccccatgccagatatggaaaatgaatgattctcatctgcagcaataccaccggtacaatgctcagcaatatcgtcagcagttccgacatcatataactctgccagtttctccggtttatcagaatcaggataaacaacgccagatcaatggcaatgattccccccggaagcacatagtctaacgaccagcgccggtatccggtcagataatcaattccaagaagcattacaatggcaagaagtaccagacagacggttttggccagatatccggattttcccagaattgccatgcgaagcaccacatttccatataaaagaatgataccaattacaaggctccatgccacttccctgtccacctggaaattgatggcaatcagcagacactccgccacaatggagataaacagtaccagattctccacaaaccggaatttacgcgccgttgcaatggcatccggataccggctctctcccggtatcccgtccgactccagcacatgtttacagagcggacagcggtccgtatcgtccaatatgacaacattacattttttgcatttattcataatatactccgttcgtctcaatctccacatccacaccatccgccgcaatcttgcggaaaaatgccttctgtaccagagcctcggaaaagatggaactgaatgtaaataccagcgtatcctggtaagaacagatcgttcctttcagatactgcccttttgacatggctataaaagccgaaaaaccttctatatagggctggtaaatatctttgatcttgatattaccgatgtttgtgatcgttgtcgtatttgccactgcggatttttcatatacgatacgcatggcaatatttttcaaaaataacggcaccggacgcataagcaggttcctctgattggatacactgtaagaaaacagatcctctaaatgttccttattgatctgggagtgcaggctgctttgtatgcatgcaagtacttcctcaaacgtgtaggactctttctgtggacggaattctgcagataccataacaaaaaagttttttgtcgtatccgaatcaaaatacggccgcagattgaccggcactgcgattcggatcggttttcctcccggcatcccgtgtaacagttctttatacacactccatacaaagactgcaataaaatattcattcaaagatgcatgatagccatgtgctacctttttcagctgtgagaccggcatccgcccatgcatgacaccaaattctccggccggaagtttatcttctttgatcagatatgctttttctttattaaatccgcttggcttgctgctgcggtaattgcggacaaagctgtcctccctgctgagagaggtatctccgctcagtttgtttccttctttttccgccagttccggatgcaccagacgcagatactgatacgtcagctcccggaggaaattaatgcctcccatgccatcggtcagtacatgaaacacttccagattgattcttgacttataataggtcacacggaacagataattgcggtttttgttctgccggataaaccggcatggaaacatcgcctcttccgtgactttcggcgccttttttccgttctcttcaaaataataccagaatacgcctgtgcgcatccgaagattaaacccatcgaatttcggcagaatcatgtccagcgcctgctgcagaaattccacctgaacctcttcttttaaggtcacactgatccggtacacgtttgtcatactctcccccgcaatggacgggaaaagatgtgctgtattatcaagcttatcccagcgcacctgacgcggaatcgtcttggtttttttcttgtctttcattgattaattacttccttggttatttcaaaaacatgccgaatcctgccacactgagcaccatcataataattcctgccagcagaaccccgagcatgacggcgataattgttgatttaaaatccatgtccagaatactggccgccagtgttcctgtccatgcaccggttcccggaagcggaattcctacaaacaggagcagtgcgataaacagcccccggcctgctttttcctgtaatttctttccgcccttttctcccttctccagacaccaggaaaaaaactttccaatcaccggtttatccgctccccataccagaactttccgtgcaaacagataaatcaccggcaccggcagcatatttccgataattgccacaatataagaagaaagtaccggcagctgcagtccctgcgaaataataatggaaccgcgcagttccaccagtggtaccatggaaacaaaaaatacccacaagtattttgtcaacataaaaaatcctcgctttatttatttaaatattttttcagaaaatcgatcagtttatgcatctgctcatccgtaccgattgtgatacgcagatattcgttgatccgtgccggcttgccaaaatgccgcacataaatatcgtttttcttcagtgcttcaaacagttccacaccggaaacatccggatgcatggcaaaaataaagttgcttttggaatcaccaaatacgaacccgagtgcccgaagctgctctttggtccactctcttgtctttatgattttctctgtcgtctgctcaaaatatgcccggtcacggatagatgccgttcccaacgcaatggtgatacgatccatcgtgtatgaattgaaggaatacttcacatcatttaaatatttaatcagtgtcggattactgatggcaaagccaatcctcgaccccgccagagaacgtgacttggaaaatgtctgtaccacaattacattatcgtatttatcaatcagaggcagggcactctctcctccaaagtcaatatatgcctcatccacgatcacaatcacatccggatttgcctgaacgatctcctcaatggcagataccggaagaagttccccggtcggtgcattcggatttgggaatacaattccaccattttcacatttataatctgccggattcaggcggaatgcatcatccagcggaatctgtgtatacggaatgcgaagcatttctgcccacacgtcataaaaggaataggtaatatccggaaacagaatcggcttctttgaattaaagaaggtcataaacagcattgcaagcacatcatccgatccgacaccgacaaagacctgtgaaggatctacctgatagaattgtgcaatcccatccaccagatttgtcacaaccggatccggatacagccgcagatcatccgtatgaaaatgttccagtgcttcctttacccccggtgccggcggatatggattttcattggtatttaacttgatgatctgtgatttcttcggctgctctcccggtgtatagggaacaaccttacgtatatttttttcccagtttttcaactttaatctcctttatatgtacaatattacagtcacttaccactctaccgcattcttcctcaaatgtaaagaattgacgcggaaaaaaaacgcaaaaaaaatgaaatttcagcattttttcctcttgcagttttacacaatcgtgataaaatatcctagcatttgcagttttgtttaaaatataaaaggagtaaatcattatggcaagaagtacaacaaaagaattgaccagcggttcccctatgaaactgattctcggtttcgccgtaccgcttctgttcggcatgctgtttcaacaattttacagtctcatggacaccatcatcgtcggccgctatctcggcgtgacggcacttgctgcagttggggcaaccggaagtatcaattttctgatcataggattctgtcagggaatctgcaacggtttcggtctgccggttgcccagcggttcggtgcgcgcgactatgacggtgtgcgcaaatatgtcggtaattccgccattctgtcggttctcatcggcggtgttctcacggcactgaccgtcattttctgtcggcagattctggtgctgatgcagacaccttccgatattatcgacctgtcctataattatattgttgttatttttgccggcataccagccatcatcctttataatatactctcctcctacctgcgttctctgggggactccatcacgccggtcatttttctgatcgttgcggctgtcttaaatatcggactggatctgttctttatcatctgtctgcactggggagtttttggtgccgcatttgctaccgttttatcgcaggcggtttccggtgtgctgtgtcttttcgtgatcatccggaaatttgacattctgcacctgaagcgctccgactgggtactggatgcttcctatgtaagaaatcttctgattatgggacttcctatgggtctgcagtattccattaccgccatcggaagcgtcattctgcagactgctgtcaacaccttaggttcaggcgccgtggcagctatgacggccggtagccgtatctcgatgtttatgatgtgcccgtttgacgcactcggttctaccatggcaacttacggcggacaaaacgttggcgccggaaaatacgatcgtctggcaagcggtatgaaatctgccatcattcttgccgcagtttactccgcagcgatccttgttgtcatcattttccttgcacgtccactgatctatctgtttatagatccttcggacagtgccaatatcacacaggttgtcgcacaggccagacaatttctgatcaccaacacctgcttttatatgcttctgtcactggtcaatatcgtccggtttcttatccagggaatgggcttttccggctttgctgtatttgccggtgtatttgagatgattgcccgcgcattgatcggtctgatctttgtaccgatcttcggatttacggctgcatgttttgccagtccgctggcatggctgtttgcggattgtttcctgcttccggcgttctttcattgctggaagaaacttatgcgggggcttgccaataaataacaggtataaatataagttttcttgatgcgacgggatctattgataaaaaaatagtgattaaggtgacacatttccttattttcaatgcctaaaataaaggaatgtcacctgcaagagaaaaattgcttcttcagataccgattttttgaaaaaatggtacctgaagaagcaatttttgttccatagagactttgtggtatctaaatgttacattttaagtgtatagataccataacggtatcttttatgcaaattttctttgtatagataccagcacattttccaaattatcttttctccaaccaacaggaagaaggcgtatatttctttcggaagaacaaatttgcaacttgctctggcactcactgaataaagataattgcataaaatgaaacccttacacaaagaacctgaaatcaatgccagagctgctttgcaaatttttctgtagaaagagaatatacgctttcttccgtcacattgagaaaacttatatctgccagagaacgcaattaaacagctgcaataaaacgttcgaatgccttacgtccttccggtgtacacttgtacacacctgcatcctgcaatacttcattaaagaccagaccgatttcctcatgcagaatatccatcacattgtcttttgtgatcttatcatacttcggaaggaaaccttctgcccattctgcatgggaagcaagtgtttctgtcgcacgtaagtctgtaccatttaccagtgcatcggcaagctctgccatctcatctttcaggcgggcaggcagtaccgcaagtcccataacctcgatgagaccgatgttctcttttttgatatgatgcagttttgcatgtggatgatagacacccagaggatgctccccggtcgtaatgttgttacgcagcaccagatccagttcaaaatcatccccacgtctgcgggcaatcggagtgattgtattgtgtggctctccgtctgtctcagcatagataaatgcctcctcatccgtatagcctctccacttcaaaagaatcttgtctgccagttcgatcaggcgctccttatccggtccgctgatacggatgacagacatcggccatttcacgattcctgctttcacatcggaaaatccctcaaactgaagttctttttcaatcggtgcttttgccatggcaaatgtataatgtccaccctggaaatgatcatgacttaagatggaacctccaacgatcggcaggtctgcattggaacctacaaaataatgtggaaactgtgtcacaaaatccagaagttttccaaacgttgcacgctcgattttcattggcgtatgcctggaattgaacacgatgcagtgctcattgtaatatacatatggagaatactggaaaaaccagtcactgttgttaatcgtcagtggaatgatgcggtggttctggcgtgccggatggttgacacgtcctgcatatccctcattttccttacagagctggcacttcggatacgcgctctgctttgcattttttgctgccgcaatggcttttggatctttctccggtttggacagattgatggtgatatccagtgttccaaactcggtgtcggttgtccacttgcggtcttttttgatacgctgtcttctgatataattgctgtcacagcttaatttgtaaaaataatccgttgcggcaagcggtgaggtatgctcatacagatcacggaacgtcttgcggacactgcttggttccggtaccagacatcccataatttttgtatcaaacaaatctttgtatacaatactgttttctgccatgagaccattctcatatgcataatccatcatttctgcaaggattccctcaagttttccttctgcctcttcctgtgtccatgccggaagattttccaccttttcaaataccgcatcctcgatttcgtctacctgaaaaagctccagcaggcggttaatggtatatactttgtcctccggatctaccagtccggtgctcagaccatattttactaactctaaaatgttctcctgaatcatctcgtactcctttttataaagcctgtcggcaaatgcggttccaatcagctccgcacacatttaccctatgtaatacgttcttaaatcagacggcttgggccatctccgatggaaaccacataaaattccggtgtctttccgactttttcctcatatgcctttgtcagcttctccttgaattcatccacggatgcatcctttacgatactgaccgtgcatccaccgaatccgcctccggtgatacgggaaccgatcacaccaggaatcttccatgcttcatccacaagtacatccacttccggacaggaggtctcataatcgtcacgcagggaaacatgggaagcattcataagttttccgaatgtttcaatatcgttttccttcagagccctgactgctgcgattgtacgctgattctcgtaaaccgcatgtttgcctctctttctggcaacttcatccttaatggctcccttgtactgctcaaactgctcatccgtcagatctccaagcgttttgatatccacaacggtctgcagatccttcagtgcctgtgcactctcatttctgcggtcattgtatgcggaagtaaccaggctgtgttttaccatactgttggtgacgacaatttttgccccgtcaagtacgattggtgcatattcaaaagaaagatccgaagtatcaaggaaaattgcattgtcctttttacccatggcagatgcaaactgatccataattccacagttgcagccattgtaattgttctcggaatactgtccgatcagagccagatcctgattggtcacatcaaaaccatacagatcctttaacatatatccggtaaccacttctaaggatgcggaagaagaaagtccggaaccgtttggaatatttccgaataatgcaatatccagaccggtttccagtttcatgccgcgtccttcaaatgcccacataacccccatcggatagttggtccacaatccatccgggtccggagtaaatgcatccagagaactttcgatcacacccagctcatcgaagttcatggaataaaaacacagtttccggtcggttctctttcttgctgccatgtatgttccaatagtaagtgcacatggaaatacgtgtccgccattgtaatcggtatgctcaccgatcagattcacacgtcctggtgcaaaatatactctgatgtccccctcatcgccaaagatttctttaaactttgctaatacatcattctgaatcattgttctctccctttctgcatgtttatccgctgcttggtgcagcggttcgttttcttgataattccattatacatgaagggaaattctttgcaatatgctttgcgcaacttgcaacattccccttccttcatgcaacatttttacatatcttattttctaaaatcacgaatcacttccagtgccggaaggacatttccatcgtagtcaaacaatgcctgatttgcccactcattgccacatggtcccggatcattcatatactttaaggatgccggcgttgcccagccgcttccgtgtaccggaatccatgcaggctcccaccagaaaaatcccagacctttgttgtcacgcacatgtgccacgcggtttaagaagtccttcgtaaaatctgactgtccctgtaccgtcatcggatactcgatctttgccacaagttccggctttgtcgcatatccctttcgctcactgtcctttagtttctcatactgcttgtaatcttccatggtatatcccatagaaacctctgccacgatcagttccttcccgtaacgggctgccatatcgttcatgttgtcttcaagcatctgcagggtgccatgccagaacgggtaataggaaagtccgatataatcaaaatcttccccacgctccatataatgatcgaaccagtcgcggtacatctcattgtttccaccgttgtcgagatgaatcatcagcgggatctccggcttaacggcacggcatgcccggataccggaactgataaatcttgcaatattgtcataattcggctttaatccctccggccagagcagtccgttggtcacttcgttgcccacctggatcattgtcacattgacaccggcttccagtactttgcgcagagaatcctcggtaaactcataaactgcctgttccagctggtccgcgtcaaaatctttccatgcctttggcttaatctgttttcccggatctgcccagaaatcactgtaatgaaaatttaataatacgccgaatcccgcatcggatactttctttccgatggcaattgtctctgccagatcattgcatccggcaccgtacggttcaccggtttcggaatacgggtcattccacagacgcagacggattgtgtccacatcataatctctcatgatgtctaaaatatcccgctcttttccatggtcataatattttgccccacagcgctctaactcaagcaatgtggaaaggtccattcctttaataaatctgctcatcttttctccttttcttcgaaaacgtttaccatccctttaatgcgttaatatgaaagttctgtaatttccgctcataccgctgtggattgatcttccactggtatggcgacgtattaaaaaattttttaaaattccggttaaaggtggaagttgtggaaaatcctgcctttctggcaacctcatccatcgaatcattgccatgcttcatctgttcacacgcgtattgtacacgcaccagattcacataatccatcggcagcatatgcacatattcttcaaacactttccggaaagatgtctcactcatcccacagacctgcgcaagggtgcacacttttacctcttcctgataatggtcattgacaaacgtgagtgcatctgcgatctgccgcattgttccgcttcctgccgcctcaagtctcgtctgtgtctgtacttcattcagacgaaacatctcatacaccagcgcatgcagataacttgtgatcacctgacgataatacggactctgctttttttcttcccggataatggcattgacgatctctgcaatctccggatactcgcttccatgcagcaaatgtgccgatctgcgtaccagttcaatggcctcatttttttgtgcgatccggtcgccatacagttcctccatgacatggttgacatccacatataaaaattcccaggaattccgaaccattccattactgatcgttgtatgtggaatattcggaggaatcagagtgacagaatttgtccggtaggtatacgtgtgttcatttataataagctccccttcgccttttctgcaaattccaatctccataaggttatggaaatgcagataaaaattgtcatgtccgtatacccggttccactcctctcccaacaaagcaagtaccggttctccctgtggaatttcataaaaacgcagttccacggtttctttttgttttcgtcccataggcatattatactccctgaaaagttataccctgatattaaaaacgtgcggcagctgccgcacgttctttttagtcgaaatcaaacttgtcgaatctcttatgcattgccccataacggaatcgaaccatctcatttttcgctaaaacgtcttcctccgtacctctgtactggcagcggatacaactgtaaatctttgtatctttattgtagaacatatcgatgtcgaggtctctcataaagcaggacggacatctgtaatttaatttgccttttccaagttgagccatgttgcaaatacctccttgtctgtaatagtcttcttatatccaagtttaaacattggtgagaatgcatatccttcctcaatgtatccttctgcgtctgtagaagaagcagtcagggaaactttggtgtcgattggaggcactacagcgctgactgcggttgctcctgccaggacttcactgcggcacttgtatgcatagtgaatggtcttttcatctgcaccttcgcattttaatacgacagatgtcatatcttccggatactctgtggttccgtagcatgctaccatgtactcatcaatggtaacctctgcatcaggatcactcatctcgagaatatttctttcgatcttgatcttagaagaaccttcctcaaaatattcctttgtctgtaattttactgtcagtccattaaactcgatggttaccgggtccagtgtcaggattctggtattgccttcctgtgagaaatgtgcatgtgtcgggcagaggcacagatctacttcctcacccttgtagcagagctttgcacttctgactgttccttctcctgcgtaatgtgtaaagtatccggcacggtacttctcctgaatcaggaatggataagaagcatcctgtacatgaggtgttccgataccaaccggccagtttaattttgcaacatatggacgaagatcaacaatcgcaccaccctgatccatattaacacaggctctcataaacggatcgcagtaccagaacagctgcttgtcagatccgtataaaatatctctccaaagggcacattccggctctgtataacgtttctcgtcggtaatgcctttcttctttctgtagtgatctgcgaactcggacatggtcatatctaccagcttgccctctttcttcaaatctccgtaatacttacatccgtcactgtatgactttaacagcagatcatatggagcctcccagcggcccatcttgttcatccagcctggtccgacgaacatcatgttgtaagcatatccattgttgtatttttccagatcacgatactgatcgatcaggttatacagatacggatactcccaggtctttgtatcataaatcataccgcgaagcacgttctgtggatgtgtaccgaagtttgatccgtttccgtcataacatgcaatcaggtcacgggaaaggtgtgggatagctacgattccactgtcctctgcctgatttgcagccggcgcatgtgtattctgcttggatggaatccatggtgcccatgggccgccatcgaaaagtgtataccaggagttgttacaggtatgatatgctttcgggccttcctcccagcaggtagctaccgcacacttcacagacgggtaagcctccttcacataattgatcagttctgcgtccatatagtaggaaccggttgactccgggtaaaagccgaaacgatcatggaatttctcgaacacatcattaacgattgccttcttgtcttccatggaaaacatccagatacagaaatcttttgtcttatatttctcacggaactcttcgcaaggcagtcccaaaagggaaagtgcgatttcgtctccatagacttcatgatcatgttttgcgatctcaaccgcttcatcgttaaacaaagaagcatatgtcatctgaatggtaactttcaggccattctcatgtgccagtctctgctgtgtcttgaaaatatcgagagactctgtaagtaaagccttatctccgatatcctcttcctttccctgtccggtcacggttgcagaatactctggaaccatctccgggcgatggatgatgtttacaataaatttgtccatctcgttctccctccgctagatgtattttatttctggactgcgcttttgcgcaatcggttgttctatggttctagtataacaagagagtcccacagtgtcaatgtataattttgatatatttcgctttcttttttgcacacttttcacaattccaagcatattcttttttatttgcgcaatcggttgtttcgtgtaattttcaatatttttcgtatcttttagtatatttttcatgcatatagaacccacaatttgcgcaaattcatttatttttcatcatccaaacacaaaaacagccatttggatatttccaaatggctgttttgtgtttggattttagagtttatgatcctacgaacagattccgcatgtccgtatcccgtccctttgaaattagtgatggaataaacgaattccagtaaagctcataaccataccgtatttattacatgtctcgatcacattgtcatcacgtaccgatccgcccggctctgccacatactttacgccgcttttgtgtgcgcgctcaatattgtcgccaaatgggaagaatgcatccgatcccagtgccacatcggtatttttatccagccatgcacgcttctcttctgcggtaaataccgccggttttaccttaaaaatcttctcccatgcaccatctgcaaggacatccatataatcctcacccatgtacagatcaatggcattgtcacggtccgcacgcttgataccgtcaacaaactgcagtcctaaaacctgtggagactggcgcagccaccagttatctgccttcgaaccagccagacgggtacaatggatacgggactgctgtcctgctccgataccgattgcctgtccgcccttgacataacatacagagttagactgtgtatactttaaagtgatcatggaaattgccagatcaatctttgcctgctccggcagttctttgttttctgtcacgatgttgtcaaagaaatcatctccgatatgaagttcatttcttccctgctcgaatgtgataccaaatacatccttatgctcgatcggagccggctcgtatgccggatcaatctcgattacacagtaattgcccttctttttctgctttaaaatttccaaagcttcctccgtatatcccggagcaatcacaccatcggaaacctcgcgcttgatgacctttgctgttgctgcatcacagatgtctgacagggaaataaaatctccgaatgaagacatacggtctgcacccctggcacggatataagcatttgcaagcggtgtaaactcaatatccatatcatcgacccagtaaattttcttttccacgtcagacagcggaagtcctaccgctgcaccagccggggaaacatgtttgaaagaagttgctgccggaagtccggttgccttctttaattcctttaccagctgccatccattaaaagcatccagaaaattgatatatccggctcttccacagagcaccttaatcggcagatctttgccatctgccatatagattctggccggtttctgatttgggttacatccgtattttaattcatattcctgcatgattttctcctttttcaacaatccgctcttatttatttttatttattcttgtttacaattcttgactcatagtttccggtctcaatgtcaataaaacgtacaaacagggaaactttattatcctcatttaaattctcccataccattttcgtaaacgtatcgatatctccatcaatatcaacccaggttggttcaccctcgaaacttggcagtggatttccgtctcccatataagtatggataaaatgtccctctccggcaaccgggttgctgtatgcaaacgtgtaacggttgcatgcatccggatttccgttgttgctctttaagatagacatcgcataattgaactcacccttatcaatgtgcatgataccggaaatacgtggagtataatttggtgcgtccggctcaaattctctggtgcgcagcgcctgctcaaatgtctgctgcttatccatcagctcataaatcgtatcggtctgatctccgtttgtcacaatcgtcttgttgccaagtactcgaaccggtgcgtaaatgatcaggctcggatcttccagctttgacggatcaaatgcctgtgtacggataccttcgccatcctctacaaatacacgattacggctgtttgcgcttcttcccataataaaataagcagttaccgccttctttccatccttagaacgtccgatcacaataccacgtcccggatatgttgttgcgcctaattctttactgagtgctaccttctgcatttgtttctcctttcgcaaatacgcctaaaataaataaaaaccgacacatccgggaacccacatttcaatcaaatacatatttcatgtatttccctgcaatgtgcggtgcccagacggtcggctcctgcggtgcttctctgaagcatcgccttatctgcggtacatctgtgatgtatcgccctatctgcggtgcaatctttggatctgtcacctttatatctcttgttatactccacgtggttcttccacttatccgtcagtcatataactaaatttatttaagcatggaaagttcctcttgtcaagggatcttctgttatttcatcgttactattcactcacatgttactgttcacaggttaccctgcgaacagtaacctcacattcagctgcatgcccgtgcatattcctgtaatttttcttttgcagtctgcgacaaatgtgtcggaacctctatctgcacctgggcatattcatctccgtgaactgccggattattcatggctgctacgccctttcctttcaatcggatttttgccccagactgtgtacccggtttaatcttacagacaacatctccatacaacgtatggatctttatctctcctccgagcacagctgttgtatacggaattttcaccgtcgtataaacatcctggccttttcgctcgtaaccagatttttctccgactttgactttgatcagcagatctccatcctttccattgtaccctttctgtcctttccctttcagacgcacagactgcccgtttgcaatgcctgccggaatatgcacttcaaagttctggctctttccgtcactggaagaaagcgtaaaccttttatcacagccaaataccgcttcttcaaagctgatcggtacttccgtctcgatattttgccctctttcctcatgtactccgccaaaaccactgccaaattctccagtacttccaaatccgcttcttccgccaaaacctccggttccgtggaatccacctttttttccaaacaatttgtcaagaatatcatccatatcggaagaaccatcaaaatggaactcctgatatccgctgcccggttctccggaagaatacgactgataaaatcctccatttccaaatggattcccgtactgtgcctgtttcatcttctccggatcaaaacctgcctccagcgaaatcggaccgtactcatcatacaatttccgcttcttcggatctcccaacacttcgtaagcttccgttacttcctgaaaaattttttccgcatttggatttcctttattcatatccggatgatattttttggcaagttttcgatatgcctttttaatcgttgcttcgtctgcatttttatctattcccaaaacttcgtaaaaatctctttttgctgccataattatcacctcaccaatcacaaaaacaggaactgctttctaaaatgcacttcctgtcattccatctcagtcagagcattttccactaagacgtacttatatctttgcttcagttttgttatagcattgtttttagcactcgtcaagcatgtctgctaacaattttcttaattttttctaaattggtgattcacggcatggtctgaggcttttgatttttgcaagaggaacggaacacgcagcaaaacaacgacttatataccatagatttttaaatcaacacgtccatcgacaactgcaattccatccgcctgcaatagccttgcctgcgcaccttctccaccaaacgcaaattctccagctaattctccctttgcgttcaccacacgataacagggaatcttctccggatccggatttttatgcaatgcatttcccacggcgcgtgccatctttttatttccggccatctccgcaacctgtccatatgttgccacttttccgcgcggaatttttttaaccgcttcataaatccgtctggtcggactgtccgtaaccagatcatagctttccgcaatcatacgctggatttcctgctccggaacggtaccatccagaataatggtattccaatgatctttattctgatgccatcccggaatgacagatgcataggtacttctccagaaatcacgccactgcggatccgctttcacatttaaattaatgtatccttccctctcataggtccataaaaacgcctttttgcttccctctacccgcacaagctgccagttattatcatgaaacggtgcctcctgataggttttcggaaaagacaatgcatatgccagcgcctcttcccttgttttcatacactcctccttacggtttttccgtcatatatcatatattttctgtatatctgcatgtcggaaatcccgtacatccccaaaactctccgaaccttccgttcctttttttcagtggctgcccacacaccggacaattttttatttccatcctgcgccgcccggtagtcccatccagctcctttgccagcttttcaaaaacctgctggttcatgcggcagtcgtttaatgcacggtgtgccccggccgtggaaatcccgtaatattgtgccagatcccccagacgatgatgcgaaagttccggcagacagagccgtgccagtttcagtgtgtcaatgtaatcgttggttagtgtctgaccgaaataccgttcacaatcacgatacaaaaatttcatatcaaaacgattgatattatgtcctgccagcacatcatctccgataaaagcaagaaattgctgcaatacggaatcaaacattggtgcaaacgccaccatatcatccgtgatatgatttactgcacttgccgcgctgggaatcggtctgcccggattcacaagctgactgaactcttctgtaaccacgccgttttttactttgacagccgaaatttcaataacctcgtcatatttactcgaagtaccggttgtctcaagatcatagagtacataatccggcacatactgattaatcattttaccttttgtatttcctaacatcttttgttcctttgcctttttaggattgtttcaggaaaaaacgcaggcttccaattcgaagtaccgctccctgggaagccgcactgttttcaaagtttcttgcaattgtttccttttccacgcttaatgtctttacaatgtaaaattccttctttgccgccgtcggtgcattgtgcataaactgcatcacttcctgcaggtttccagatccggcataatccccaccgagcaccgtatgggcatccttttcctgaaacacatgcggaatgaccgaatcaatcgctttatcgtaatccgcatttcccacatcgatccggatgcgcgccagacaacttccgtcccccggctgttccacctgataatccaaaagctgcaactgcccccacttctgattcaatgcctcctgccattttggaaggaactgacctttctgcgcatttaaaacactgacaatcatggaaattttttgtttatttggaagcttcatcagcatacccagtcccggaatcttcggaagctttacctgatcaatatttaattctgtaatatctgccaccagtcgaaacatttcttctccttcatctttggttattttctatgctatcatgctatcacttttttcgtaatttttccactaaaataacactcacgatattatgctataatttcatttggcaccgccaaaccggattcaccagaaaagtcagatcaataccgttttgatgatgatatacaggtatgtatttatgataatcttgtaatcaatatcacggaattgttaaaataaaaaggtgcttatttaagcacctttttagtggactagacgggagtcgaacccgtgtccaaaaaccaattccctgtccttctacgagtgtagtttattctttgacattccctccgccacacgaaaacaaacatccttgtggttttagtagcttcatgatacgcccacaggtgcaaagcttagcctgcgtcgtttctcacagagtcgaagcctggatcctaaagtgtgagtgccctaggtcagactgctgccattaggcagcgtatgctaaattatcttcagcgtttaattttaattgtggaatttaacgtatcccgtacgactcgcttctccagctgcatgatccctgtcgaaaccattactagcccctgttatgtttttgcggagcaaaaatataactcttgcctcccgcctgttttttgcgaaacacctatccaagattccgcactttgaaatcccgttcggcttcccgccgctggtcttttttggcaatgtcctgacgcttatcgtaaagcttctttccttttgccagagcaacctgcacttttacaagacttcctttgaagtatacttccactggaacaatcgtgtatcctttctgcgcgatcttaccgaccatcttctgaatctctttcttgtgcatcagaagcttgcgcggccggagcggatctttgttgaaaatatttcccttctcatatgggctgatatgcataccatagaggatcacctccccattttcaatatggataaaggattccttgatgctgcacttgcccatgcgcatggactttacttcggttccagcaagagcgataccggcttcaaaagtctcttcgagaaaataatcgtgatagacttttttattgttggctattaacttcttcggttgtttcgccatcccggctccctcctttttgttctgtaaactcagtgtatatgattttcctgcaaaatgcaataaactgctgcttttattttgaaaattttaagaattccatcaattttcgtcagaatctgcaagtgtaaaatcaatcgtccgcatgatccggtcacagttatccaccgtcacacgcacctgctgccccagtttaaacctgcggttcgttgcttctcccaccagttcataagtttcttcataatactgataaaaatcatcggtgagggaagtcacacgtaccagaccctccacagtattttccagctccacgaaaaatccgtactctgcgactccggaaataacaccggcaaaggtttctccgatatggttttccatatactgcacttttttcagcttaattgtctcccgctcggcctcatctgcacgccgttccatctcactggcatgctttgcaacctccggcagtatctgcgtatagtggccaatgcgcttttcgcccagacgcccccgcagactgtccttgataatccggtggatctgcagatccggataccggcggatcggtgaagtaaaatggcagtaacaatccgctgccagaccaaaatgcccggtattttccaccgtatagcgtgcctgcttcatcgagcgaagggtcagacggctgatcagcggttcctccgaagttccgtcgattttttccagcagcttctgcagttctttcggatgcacctcatcacttcctatgtggagagagtacccgaaattattgataaacgtggatagtttctgtattttttccgaatctggctgctcatgcgtacgatagacaaacggaagttctctccagtaatattcggctgccaccgtctcgtttgcagcaagcataaaatcctcgatcagtttcgttgccacattgcggtcatacggacggatatctaccggatttccattcttatccagtattacctttgtttccggaaaatcaaagtcgatggaaccacgtttcatacgctttttgcgaagaattgccgccagttctgccatcttttcaaacatcggaaccagtggctcatattccgccatcacctccggatcatggtctgccagaatttttttcacattggtatacgtcatacgccgatccacgcagataacggactctgtgattgtgtgatcgataatttcgcccttaggattgaccgtcatgatgcagctgagtgccagcctctcttccccctggttgagggaacagattccgtttgacagggcatgcggcagcatcggaatcacccggtccaccagatatacagaagttcctctcttcaacgcttccgtgtcaagagcactgtgctcctgcacataattggacacatccgcaatatgcacacccagaatataattttcatgatccatggtaagtgacaccgcatcatccagatccttggcatcttcgccatcgatggtcaccatctgccagtcgcgcagatccatgcgtcctgccatatccgcttccgataccggctttgccacatgctctacctgcatcatgaccttcggatcaaattccaccggaagcccgtaagcgcgcacaatagaaaggatatccacccccggatcattgatatgcccgagaatctccaccacttttccttccggattctttccctttttcccgtactgtgtgatttcaacaacgactttatgaccgtttacagctcctttcgaacgctccagcggaataaaaatatccgaaccaaactttggattatccggcactgcaaagccaaaatttttattcagctgatacgtgcacaccacctgcttcatgcccctctcaagcacatgcagcacctttccctccctgcggcgtccggtcactgccggtgatacggaaatctctaccgtatccatatgcatcgcaccgttagtttcggattccggaataaagatatcttccttttccccctccacgctgacaaatccaaatcctttcggatgtgcctgaaacgtgcctacgatctttttctcttccgatttgctgaactttcctctcttggagcagacgatgcacccctccatcatcaaatcattcagaatctgttccaactgtgggcgctgatcttttttcacaccgaggacgatcgccagttccttgattttcatcgggacatacatatcatcgcacataaagtcatatatcatttttttccgctgttcatactttgcgtccatacccagatcttctccttatataatgaaaaaagctgccgatgtaatcgacagcttctggtttctaccagattcccaaattcagaaccattgcaatgacaaggaacagaatcacaaaaattcttgtaagctttacaagcattccttccatggaacgtcccttatttttgccccagtaagtatctgctgctccggcgatcgcgccaagacctgcagatttcccctcctgcattaagataatcactgtaattacaatactcagtataataaatacaatagttaaaatcgtatttaaaacggtcacgatttccacctcctaattctaaactcacgactaactaattatatcataaaagaaaagtcttttcaacatttttttatatttcataattttccttttcatttccactttataatataacacagataatatagaacttactgtatcattaggagtataccatgaaatcctgtcaaatgtacagatttattccgattatattactgtgtgtcagtctgttcactggtggatgttcccaaaacaaggatcagccctctgccacgcacaaccagaccccggccacagaagctgcctcccatacggatcaccccccacaggtgcttaccccgcaggcagacggtctcaaaacttttacagcagatactgcagctattgatatctcccacacgcaagaaggatatattatggcaaaatacaccggtttcaatgccaaacccatactgcagctgaccgggacagacggcatcacatatacatacagtctttacaaagattatagtacctttccccttacttccggagatggaacctatcaggtcggtgtctacgaaaatgtttccgatgaccgttacacaacgctgctctccgagacattttctgtcacacttacagatccgctgaagccttatctgtatccgaaccagtacgtgaacttcaccgccgattccctccctgtggccaaggccgaagaacttgcagacggtgcttccagcgatctggacatcatcagcagtgtatataaatatatcattacacattttacctatgattattccaaagcttccagtgtaacaagcggatatcttcccgatatcgatgaggttttcacctctgagaaaggaatctgttttgattacgctgcagtcatgacctttctggtattgcttatcatctgtatgattttatatcacaccgatctcgggcgcgtattgttcctcggacagaaacttgccatgacggttgcctcaggacgcgttgcaaactgcctgtatctggttctctccagcggactcgacagtaatatcggtcttaccctggcacgcgaacttgtcaataatccgcatatgcaggcacttatcgacaaatgtcacgagaatatccgccacggggaatcattcgacaaagcactgctgctgtccggcatcttttcccagatgtacgccagctggattgcaatcggttcccggaccggcgaaatggaaagcattgtttcccagcgggagatcaataccgataccgcaagctatctgacggcacttcgtgctgcattgcgccagatcaacggtattatctacacttctgccgcagaaaatatgatcgccatggacagcagcatcttacagctttataaagacggacggatcgacaaacacaccaccatctcggaagcggtcaatccggagatcatgtccaaacgtctgaatctcttataatgtttcactgatccgcagaagctggttatacttggcagtgcgctctcctctgcacggagcgcctgtcttgatccagccggcatttaccgccaccgcgagatctgcaataaaagaatcttccgtttctccggaacgatgtgaaataattgccttatagccgttcttctgtgccagttcaatcgcatccatggcttccgtaagcgttccgatctgattgaccttaatcagcacaccatttgccaccttaagatccattccgcaccggattcgtttcacattcgtgacaaacagatcatctcccaccagcatcacctgttctttcatgcgctttgtcaattcctgccagccttcccagtcgtcttcatccagaccgtcctcaatagaaatcagcggatattccgtggtaagttcttcatacagcgaaatcatttcctgtgcactgcgcaggacttcttttttttcggtgatctcctgcgttttcacttgtgcgtcagatgtataggcaccgccctgcgtgtccggacgccgcagattgacatccacctctgcatgtgtctgcgcttctcccggaaaatgatacattccgtcttcctcactgtacagctcggatgctgccgcatccatggcaaatgcaacatcgctgcccaccttatatccggcttcctccacggcacgctgcagacatgcaaacacttctcccgcactggaaaaatccggtgcaaatccgccttcatcccccactgccgtcagtttgccttctttctgcaaaatttttttcagaaaatgataaatttccgcacccatccggagtgcatccggaaacgactcggctccgaccggtacaatcataaattcctgaaaatccaggtaattcttagcgtgagctcccccttgtgtcaagctaatgacacaaaatttttgtaatttgtccaacagcattttaactgcagattttctgtgcctgctctacatactttaccagttcatcagcaaaattccattcaatttctattcgcttatcattatataccttgataccacgaataaaagttactgctatctctctggttaattgctcatttccttcaatcaaatctgtcagacactgcctgccatctggtggtagttcaaataaccgttcagccgcttcactctgttctatctctatttgtgctatcgctaaggtctctttctcaatttgtttatccagcctgtcattttttctggtgaactcttcttctgagatttcttccattgcatatcgcatatatagttccgttttctggtgcttgtatctgctaatactgtctttggagtttcgaatattctttg

SEQ ID NO: 1006 - DNA, 256 bp, Unknown
  gut microbiota DNA sequence
agctgactgttactaataggtcgagggcttgattaaaaaagcggttaaatctgtatgaagttttgaaagtatattatttatggcctagtggctcagttggttagagcgccgccctgtcacggcggaggtcacgggttcgagtcccgtctgggtcgtttcagtaattgtttttacgattacgatatgggatcttagctcagctgggagagcatctgccttacaagcagagggtcacaggttcgagccctgtaggtcc

SEQ ID NO: 1007 - DNA, 19102 bp, Unknown
  gut microbiota DNA sequence
tattcatatgccgatgtggctcaattggcagagcagctgatttgtaatcagcaggttatcggttcgagtccgatcatcggcttttatacaatttcatattgtatatatgggcagattcccgagtggccaaaggggacagactgtaaatctgctgcaaattgcttcggtggttcgaatccacctctgcccattggaattactttttcagtaattgcatataattaaatatattatcgcgggatggagcagtctggaagctcgccgggctcataacccggaggtcataggttcaaatcctattcccgcaactatgtgcctagttagctcagttggtagagcagaggactgaaaatcctcgtgtctctggttcgattccggaactaggcacttttaattgtatagagaacatattggtataattggaaacgacacatgtgtgcattgctcactgattaacgaacaacacgcgtgtgtttttctatgctcaaatttatttatattaaaggagggcaaaattatgccaaagaagagtagactcgaaaatattttatttacacttgttatggcgtttgtcatggtgtatgccatggtatgctataacatcgcaatcgacaaaggcggaatgacaaacgaagtttttctgctggcgtttcatgaaataccgattatgtggccgatcgcatgtatcctggagtattttgtagtggagaaactggcaacgatgctggcatttcgtctggtaaatccgaaagaagacaagccggtctttgtgacacttgcaatctgttctatgattgtatgcctgatgtgtccggtaatgagtctgattgccacggttttgtttgcacatccgggaaatcaggtgatcgcagtgtggctgcaaaaatttgcattaaacttcccaatggcattatgctggcagatcttttttggaggggtatttgtaagaaacttatttacatgggtgaaaaaagcgattcatcataaataaaatcatcatgaataaaaagagggtgcgcataatgcgcaccctctttttgggggtaggaaaataatgaaaaatggtaaaactgcttccggcacaaaaccggaaacaagaattactgtgattaagtattagcccataaccacttcgacagagacttctgtcttgccggttggtaatggaatcgtatttccgtctacggcaatgccatcaacggtcatggaagcaacacccttttctacgtgttttgggttacggacgctgatgtgataggtcacaccacggaagtcacgttttgcttcgaaaccatccagagtggatggaatacatggatcgacggtcaatccgtcgtaatccggacgaattccgagaatatactgggaaacgtccaggaatgtccacgctgcagtaccggtcagccagctgttcttggcttctccaaagtttggagcatcttttccggcaatcatctgcgaatatacataaggttcggtacggtgaatttcgctgatatcttcgatatatgcaggacaggttcttgtatatacctgccatgcacggtttccacgtccgacaacggtttctgcaatggaaatccaaggattgttgtggcagaagataccggcattttctttatatcctggtggataagaggaaatttcaccaagttcaacatggtatctgtgataaggtggctgaagaagtacaataccgtatttagtatccagatatttttctacggattccatggctttcagacagtttccttctttcaggccgatctctgccataacgcagaagccttgtggctcgataaaaattttaccgtcttcacattctttagaaccaatcttgtttttgtaatgatcgtatgcccgcaggaaccattctccatcccagccagcatcaagaaccgtcttttccatttctgcgatagcattttctgccagttttgcttcatcctcaagccctctgtgacggcagatctctacataatctttaccgtaacggacaaacataccggcaatgaaaacagactctgcatttggtccttcggatgggccgaatgtctggaaggattctcccggttctgtggagaagcagtttaagttcaggcagtcattccagtctgcacggccgatcagtggaagtttatgcggtccgagatgatcgatggtgtagtggaaggaacggcgtaaatgctccataaaatcagttgccttggaaggatcactgtcatacggcgttttttcatccaggatggtgtaatccccggtttctttgatgtatgctgcggtacctgcaatcagccagagcggatcatcgttgaaaccgcttccaatatcagaattacctttcttggtcagaggctgatactgatgatatgcacttccgtcttcaaactgtgttgctgcaatatccagaatacgctctcttgcgcggtccggaatcagatgtacgaaaccaagcagatcctgacaggaatcacggaatcccatgcctcgtccgataccggattcgaagtaggaagcagaacggctcatattaaatgtgaccatacactgatactgatgccagatgtttaccatacgatccagtttttcctcggaagaggataccgtaaagtgagaaagcagttcatcccagtattttttcagttcagccagtgctgcttctgatttttctttggtatcaaattctttcatcagagcttccgcacgtgtgcggttaatctttccatcttcggcgcgtccgatccatttttcttcaaccggattctctatgtatgccagaataaatacgaaagttttagactcgccgggagcaagagaaactttcagatgatgggagcctaccggagcccatccgctggcaatggagtttttggactgatcggacacgacaacttcaggagcagagttttctccgtatgctccaaggaaggaatcgcggtcagtatcaaatccgtctaccggggcattcactgcatacagtgcatagtgattacgacgctcacggtattcggtcttatgataaattgcagatccatgaacttctacttcaccggtagagaaattacgctggaagttggtcatgtcgtccattgcattccataaacagaattctacataagaaaaaacagaaaaatctttcgtctctttactgttattggtaagagtcagctgattgatctcacagttctttccaaccggaacaaatgcggtcagctctgcctgcagatcatttttactgctccggaaggtggagtagcccataccatgatgacactcataagcgtccagatcggtcttggctggcatccatccgggattccagatggtatcgccctctttaatatagtagtagtgtccattgctgtcgaaaggaacattgttataacggtatctcgtcagacgaagaagctttgcatctttatagaagctatagccaccgcaggtattggagatcagagaaaagaaattctcagaacccagatagttgatccatgggagtggtgtcttaggagaggtaataacatattctttgttcgcatcatcgaaatatccaaatttcatgtgtgtatcctccatataaaattatttacttgtgacatagtagatgaaagtggaaagaagcatttggtggagtaatcaatccatcgtgcttgttttaaatgccacttatctatgagagcgaaaacgtttaagtgctctcttttataaatagagtatagtctctgaaatttaaaaaatcaacacaaaatggcttaaaacaggcaaatacagcaacttgaacaaaaacgaaaacaaaaaatataagaaagcaacaaatgcgtgcgcaacattaaaaaaccaaaaaaattgcgtaaacgtataagaataaaatagcgtgcgcatgcacggacacaaaatacacatacaatatgcataaaaccgtcaagaataaaatgtttaaattgacgaaatgacaaaaagctattgcatttctgaccatacgggggtatattaaagctacgaaaacgattaagaaagttttccgaaacattggaggaacgatatggtatctttaaaaacaattgctgaacgatgtggtgtctctactgcgactgtaagcaaagcactgaatgatcataaagatatcagtgaagagacaaaaaaccgggtaaagcaaacggcagaagcacttggatattttccgaatgcagcggccagagcacttaagacaaaccgctcatataatatcggggtactcttcgaggaggaagccggaaggggcctgactcatgaatatttctccggtgtgctgaacggacttaagattcaggcagaaaagttaggatatgatattacatttatcaacacctgctttgaaaatcggaaaatgtcctattatgaacattgccggtaccggaattttgagggggtcgtaattgtatgtgccaattttgatgacccggatgtgatcgagctgatgaacagtgaaatacctgtagttacgattgattatgtacatcataactgcaccgcagttacttccaacaatatacagggtatggaagatttagtaaagtacatatacagtcagggacacagaaaaattgcatatattcatggacaggaaggatcaagtgttacgcgggaccggctcgcaagtttttatcggacaattgatgaactggggcttgaaattcccgatacatatgtccgctcagctgattatcttgagacaaaaggatctgcaaaacagacaaaggaactgttgaatctggaagatccgccaacctgtatcatttatccggatgatacttctttaataggaggtagaaatgtcattattgaaatgggacttcgaattccgagagacatttcggtagccggatatgacggtacgatgatctcgcagcttttatatccaaaacttacaacaattcgccagaacacagaaataattggaagcgaagctgcaataaggctcgtcggaaccattgagaaaccgagaacaactctcgtcgagagagtcgttatagaaggaagtttagtaccgggacagtccgtaggtgcaattcagccgaaagaataaagccggcagatttcttcaaaacaaactgaccaacaggtcaacaaatattaaggagggttttatatgaaaaagaaagtcgtaagtgcactgctgtgcgcaacaatggtagcaacaatgtttgctggctgcggaagtaaagagagcagcgacaatgcaacaacaccggatacttcaaaggcagataccagttctgaagtaactgctccggcagaagataccggaaaggttttaaacatttattgctggaacgaggagttcaagagccgtatcacagctcactatccggattatcaggaagttgatgcaacacatggaaagatcggtgatgttgatgttgtctggaacattacaccaaacgatgacaatgcgtaccagaacaatctggatgctaccttattaaatcaggcagatgctccagcagatgataagattgacttattcctggtagaagcagattacgcattgaagtatgtagataccgattatacgatgccaattaaggatctgggaattgcagacagcgatctgtcaaaacagtatcagtacacaaaggatatcgttaccgattccaagggcgttttaaaaggcctttcatggcagggctgcccaggtgttcttttctataacagagatgcagccaaagaagttctcggaacagacgatccagataaggttcaggaatatgtaaaggattgggatacatataacgataccgcaaagaagatgaaggatgcaggttacaagatgactgcttctgcaaacgatacataccgtgtatactccaacaatgtaacatctaagtgggtagacggaaataagatcaatatcgatgacaacattatgaaatgggtagacgattctaaggctcaggtagatgctggcgagacaggtacttgtgatctctggtcagatgactggtcaaaaggattctatccacagggtaaagtattctgctactttggacctgcatggttagtaaacttctctatggcagctgatacagaaggatctatcggatacaacggcggatggggcgcagctcagggaccgcagggcttcttctggggtggtacatggatctgtgcagctcagggaacagataacgcaaatcttgtaaaagatattatgttaaagatgacaacagatgacgacattatgaaagatatcgttgtagatgatgacgatttcgtaaacaacagcaccgttatgaacggattggcagatggatctattaaggttaaagatgataaagaatataccagcaagattcttggtggacagaatccactcccaatgtactgcgcaggtgttgagacacttgacttaagcaacctgtcttcttacgatcagggatgtaacgaagaattccagaacgctatgaagaactacttcgaaggaaaagcaagcaaggaagaagcacttgacctcttctacaaggctgtaactgagaagtacccagagttaacttactaatactataaggcgttcgccttaccccacaggtgcctgccagacgatatgacggaaggcaggcaccatctttttagcaaaaatatgtgtaacaaaaactatattcatcataacataccagttgggaggtaggtcttatgaaaagtaatagtggaggaaaagcggtcagatataataaatggggctacatatttctgattccatttatcgttgtatttgtaatatttcagctggtaccgttagtaaacaccatttataacagtttcttcgaaaattatatgtccggtttaacacaggttggaccgacatttgttggattagataattacaaggcattattcagtggtggagatatctggacatattttaagaacacgatggttctttggatcatgtgcttcataccacagattttcctctcccttttattaggtgcatggttttccgatgtccgtctgaaattaaaagggtccagattcttcaaaactgtaatttatctgccgaacctgattatggcatctgcattttctatgttgttcttcacactcttttcagatggtggaccaatcaactccctgctgatgcagatcggatttatctcagaaccttataaatttttatcacatgcaggaagtgccagaggtctgatcgccatgatgaactgcctgatgtggtttggtaacacgaccatccttctgatggccggaatgatgggaattgatacttccctctttgaagcagctgaggtggatggagcaacttccacacaggtatttttcaagattacacttccactgcttcgcccgattctggtgtatgtaatcatcacatcactgatcggtggtctgcagctgttcgatgtaccgcagattttgacaaacggaaccggtgatccgatgagatctaccatgacattgatcatgtatctgaataagcatttgttcagtaagaactatggtatggcgggtgcattgtctgttgtactgttcattcttaccacgatcttaagcctgatcgtatttaaggttaccggcaatgacaagagaaaggggtaattgatatggcaaagacaaatacaaacgacacccagaagggtgtaggacttcatgcacggcgcgtcatcgcctatgtagtattgattattatctcatttttctgtctgttctggttttacattatgtttatcaacgcaaccagatcaaacggagagttacaatccggatttaccgcaattccaagtacccatttgctgacaaactggaacaatctggtacatggaacgcttccaatctggtatggaatgtttaacagtctgatcatcgccgcttgctcggcagtgctttgtacgtatttctcaaccatgacagcatatgccattcatgcatatgatttcaaaatgaaacggtttatttatccgttcatcctgatgatcatgatgattccgacacaggttactgcacttggatttatcaagttagtgacaaagatgggaatgatggattccttcattccactgattgttccgacaatcgcttctccggttgtattcttctacatgaagcagtacatggagagtgcacttccgttatctttgattgaggcagcacgaattgatggttccggtgagttccgtaccttcaacagtatcgtacttccgcttatgaaaccggcgattgccgtacaggcaatttttacattcgtcagcagctggaacaattacttcacaccggcactgattctgcatgatgataaaaagaaaacacttccaattctgattgcacagcttcgtgcagcagactggttgaagtttgatatgggccaggtatatgtgatgattacattctcgatcctgccggttattgttgtatatctgattctttccaagcatatcgttcagggtattgcactgggaagtgtcaagggataatgtgaaatataacgttaaaaactgcagttgatgctgtactacaaaaaggagttgccttttgcggggcaactccttttttagtgaagaatgattgatatccggtgtcgggacgtcagatggacaaatgatagatctgcatccaggtgttgatctggataaagtaagcaatgagctgcggacctgccatcaactggccgaaccatggtttgccgagttcctttggtgcggcaaggaaagcttctgttttggaacggtccagaagcggcagtaccggagaattcggatcgttcagaatttcccgcatgcgcctgatcagcatctgttcgtaggccggatggtatgtctttggatacgggctttttttgcgccagagcagttcccgtggcagcagatcggcacaggcatcccgcaacagggatttttcgactccattccgatatttcatctgccacggcacattgaaaacatattccatgatccggtgatcggcaaatgggacacgggcttccagagaagagtacatgctggtgcggtccatgcggtcgagcagggtctgcatgaaccatttgatattcagatagccaatgtcacgacggcgggcttcctcaggggattcgccatccagatgcggaacgtgggagagtgtttcctcatagcgtgcatgagaatattctgccagatccagcgtgcgaagcacgtcatcggaaagaatggaggtacgtgcagcaggatcggcagaccacggaaaaccatcccggttcataagttccggtcggtaaaaccatggatagccgccgaaaatttcatcggcacattctccggtgagtgttactttattatgtttggcgacttcggaacaaaaatacaaaagagaggcgtccacatcggtcattccgggaaggtctttggcggtgaccgcatcggacagggcggcaaagagagcctcctggctgcactctaaataggtgtgggatgttttacaatattgcagcatccggttgacgtaaggaagatcccgttccggctgaaaggcattggacttaaaatatttctcgttttcagagaagtcaaaagaaaacgtgtttaaaatttttccttctttttgcatatggcgggcggctaatgcagtgacaatcgaagaatcaatgccgccggagagaaaggtgcataccggaacatcggacaccatctgtcgttctacagtgtcacgcacgagaaaagaaacggtctgtacggtttggacataggaatctttatgttcccggcagggcagatcccagtagagaatgtcgtgctgtccgtccggacagaatatatgataatgtcccggcataacttcctttacgcctgtgaatacgccgtttccggaggtgcgtgccggaccgaccgccagaatttcctgcagactgttttggtcaatggatggagtgacatccggatgacaaaataatgccttgggttccgaaccgaaaacaaaggagcttccggtctgggtataaaacaaaggttttgtgccggcacggtcacggtagagaagcagttctctggtggtatcgtcccagatcgcaaatgcgaaaatcccatttaacttttcgacaaagtcttttccgaaatgcatataagcgcacagaatgatttccgtgtctgacgttgtggtaaagcgatatccggctgcctgcagttcgggcagcagttcccggtgattataaatttctccattgtaaacaatggaacaggttttcccgtggaaagtacgtgtcataggctggataccgcttttaagatcgcggatggaaaggcgtgcatgtgacagccccacatgtggctgtagatcaatcatcgcctgatccggaccgcggtgctttaaagtttcgtgcatttgtacaaggatcgtttcccagaagggttttttgtcatagtagtttaatgaaaaatcgcaaaagcctgaaattccacacataatttgtctccttaccgttgggctgcggctctaaaagcagccatcttagttttagtctatgaagaaatttctatacaaatacaaaaaagaggggtatgatgagtacaaaatacaagaaaaagaggaagaattatgttgaaactggaacagggaagacccgcggatacgtcaggaagacaggaaaaggagatccgtgtgtatgattttttagataaacttggcgttatatatgacagggtggatcatgaagctctgatgacgatggaagcatgtgaggaggcagaccgcgtgctggaagctaccatatgcaagaatctgtttttgtgtacggcaaataaaaaagaattttatcttctgatgattgtgggagataaacgtctcgtaacaaaggatgtgtcaaaaaagcttggtacaagccggctttcttttgccaatgaatcgtatatggaagagtatctcgatattacaccgggatcggtcagcgtgctggggcttatgaatgatactgaaaatcatgtgcagctggtcattgatgaagatgttttaaagggagaatatgtgggatgccatccgtgtattaatacgtccagcctgcgtgtgcgcactgcagatctgatggaaaaaatcattcctgcaatgcatcacgaggcgaagatcattcggatttagccggcttctttttgcgctggcgcagttcccggaaaaaagcagaaagcatggaagaacaggtctcttcaagaacacctctggtaatttccacctgatggttaaattgctgcatttgcagaaggttcaggacagatcccgcacatccggctttgggattcatggaaccgatgattacccgccgcatacgggattgtacaattgcaccggcacacatctggcatggctccagcgtaacgtagaggtcacagtcctcaagccgccagtcacctgtttttttacttgctttgcggatggcagacagttctgcatgggcaagcgtatttttatcgatgttgcgccggttatatcctcttgcgatgattttaccgttttggacaatcacacatccaatcgggacttcatcgatcgcataggcttttttcgcctgttttaaggcttctttcataaatttttcatcatcagtcatagacattcttccttgaaatcgttatgataattatggggataagtaaccttttaattacagtataatactataccatagaaatcatatggaaggaagaagtatgttatttgcatatgagacagaacgtcttcttttaaaaataataaagccggatcaggcagatgcggtactggatttttatatgcgggataaagaactgtttgaaaaatttgagccggatcggatgccgaatttttatacccgccagttccagagacagatgctcctgtttgagtataacatggcagtacagggaacactgttccggttttatgtatatgagaaagagcatccggagcgtatcatagggacgatatgtgtacatcatattacacgtggattttctgaacagtgtgaggttggatataagttttccagcgcatatcatcatcgcggatacgcaacggaatcactgcgttttattatggatctggtgttccgggatttaaaacttcaccgtgccatggcatgggcacttccggataatacggcaagtatccggctgcttgaacgggtggggttcgtgtacgaaggcatctgccatgattatatgatgctcaatcaaaagtggcgggatcatgcgcagttttgcatgattaatcctgattaagcggacacatccagtatccgaaaactccggtcatgtctttggagtctgaggatactgcggctgctgcctcaaattccgggaaaccaaagagcattgccatcatacgttccggttgctcatagattcccggaattccaagaaactgtcgtttttctccattcatttccagcgttttcaacatgagatagtgataattgaaaaaaccgtgcagaagaaaacggttgttgcacagattccaattgctttttggaagctttcggatatcctgaatttctactttctgataagaggtttgtggctgccgggctgcttctggttgagggattgttttcggctgttggatcgtttccggttgaggagtagtttcgggctgccggatggattccggttctggtatgtcttgcggctgtcggacgggttccggttctggcatggcttgcggctgacggaatcgctctggttcggttgtagattgcgtctgtatgaccggctctgtctgtgcctgagcggcaggcggtaccgcttctttttcctgaaagattaaaaattctccccggagtgcctccggaaccggagcggaagaaaggcatccggtcagaaaccttccgttgccacaggcaatggtcagggtctgtgcctgatgcacgtcaaaaccactgtttccgatccgattattttcacaggtaaagctgcaggttcccataccctgcgtgagcaataattcggtaacaggtatagcctgcagaccattttcatatactgtcagatagaccggacattttcccttgaaacggtcaaacccccggatctgaagttccatacggcagctgttttcgcgcagatcggtgcggatgaacccggtatttcgtccgcggtttccctgttcatattcataaatataagtaataaatcgtctcaattgaagaattctcctgttttgtatttgatgtcttgtatagtttatgagccggggaaaaaaatatgtcgtttattttgaaaaaaaggattgacattttggtactaaagtattattataatgtcagtaacagttcctgttattgttttgaactaatggagaaatgagggagagtattatgataaaacgaagtcgtcagcgggaggcgatccggcagtgcctgacaggccgctatgatcatccgactgcggaaacggtttatatgagtatcaaagacgaatttccaaatatcagtctcggaactgtttaccggaatctttctcttttgtctgatctgggggagattcaaaaaattactgtcagtggaggcccggacagatttgacggaaacccggcaccgcattaccacttttcttgcagagagtgtggatgtgtgatggatctggacatgccttcccaggaacagttaaatcagattgcagcggagcagtttgatggaacaattgaaaaccattccattttgttttccggattatgcccggactgcaaaaagaaaaacacccattaattaaatttttaataaggaggacatttaaaatggcaaagtttgtatgtaccgtatgtggttatgtttatgaaggtgaggctgcaccggcagagtgcccgatctgccatgcaccggcagagaagttcgtaaagcaggagggtgaaatgacctgggcttccgaacatgtagttggtgttgcaaaaggcgtgagtgaagacattcttgcagatcttcgcgcaaatttcgagggagagtgctctgaagttggtatgtatctggctatggcaagagttgcccaccgtgagggatatccggagatcggaatgtattatgaaaaagctgcttatgaagaggcagagcacgctgcaaaatttgcagagcttcttggtgaagtggtgacagattctacaaagaagaacctggaaatgagagtagaagctgagaatggagcgactgcaggaaagacagatcttgcaaagagagcaaaggcagcaaaccttgatgcaatccatgataccgttcatgagatggctcgtgacgaggctagacacggaaaagcatttgccggtctgttaaagagatattttggttaatctttaaaacgcataaaataagcatttcagaggatagatggttgtttaactgtctatccttttttgctgcagcaaatcatttgttttccatgcccgttcggagggaaaactattgacagcaaaagtcgcatgattatagaatatagaaaagtgttactgaaaacagtgacaaaaaagagcaaggtgggaggttgcagttgtgaagagatatataaagagatggatcagttttatactttttatgtgcgtttttgtccagtatccctcagagggagtggttatggcggcagacagcgatcagaaaaacatacaaatcgttggtaccgcatcgatgaatacatatgatgtggcactccgtgttggaaaaacaaagcagcttgtgtgtaatggaacgaccggaaagatggtgtggaagtcatccaatccgaaggtcgcaacagtagataaaaaaggtctggtaaaagcaatcaaaccgggaaaagcaatgatttcggtttccggtggaaatctgatcggttctatgacctgcaaggtcggtgtgagtaaaaaaattaccacaaaacaggccagacgtaagattatggctatgaaaaagacttacaaagagggtctgtcctggacaaacgaaaaccggcagtatttctgggaagccacgaactgtcagtgttatggatgtattgccctgtgtggagaaatcagtgataaagtgtttggcaaatatgcaccggtgacaaaacacagcaatttcagcaggatcaaggcaggcgatcatatccgcatcggaaacgaacattccgttatggttctccagaagaacggaaatacgcttacggtcgtggaaggaaactataatgccaccgttcactggggaagaaaaataacaaaaaaggagttacaggaaagtggattctatgtggaaacaagatattgacagaatgcttttctgtatttggaaggggatactccaaactgttttttaaatgccttgctcagatgaaattatacatgctgctttccggtttgacaatggattttttgacataaaatatatactataagtatataacaaagaagataaattggatagtgatttcttgattatacattaggaggaatgcatatggaaaaagaaaaattttcatatcctgtttcattgcgcaggatgcagattacagataaattctggaaaaatgagatggaactggtgcgtacggaggtgatcccttatcagtggaatgcgttgaatgataaagtagaaggcgcagcaccaagttattgtatgcataattttaaagtggcggcagaaatgaaccggcaaaagagaaaacagggagctgcgtataaagaaccttcgtatacataccgtggatttgagatgttaccggaagatccagaaaatctcaaggatgagttttatggatatgtatttcaggatacggatttttccaagtgggtggaagcggtcggatattcgctgacacagcatcccgatccggatctggaaaaggttgcagatgctgcaattgatattgtctgtgcggcacagcaggaagacggatatctggacacgtattatattatcaatggaaaagatggtatttttaccaacttacgcgaccatcatgaattgtactgtatggggcatctgatcgaaggcgctgtggcatattatgaggcaacgggaaaagataaactgcttcatgcggcggaacgattcgcggattacgctgcagattatttcggaccggaggaaggaaaatgcaagggatatccgggacatgaaattgcagaaatggcactcgtccgtctttacgaagttacaggaaaacaaaagtatctggatttaagccgctttttcattgatgaaagaggcacaaaaccatattactttgataaagaacatccggaaatcgtaaagaaagggcatgagaatgaattgcggcatagctatcatcaggcacatctgccggtacggcagcaggatgaggcgtttggtcacgcagtccgtgccgtgtacctgtattccggtatggcagatattgcacgtattacaaaggacgaagaactgtatcaggcatgtgtacgtctgtggaataatgtgacgaaaaagaaaatgtatattacagggggcatcggtgcaacacatttgggagaagccttttcttttccgtatgatcttccgaatgatacggcatacgcagagacctgtgcatcgatcggactgatgttctgggcgcggcgtatgctggaaattgttccggatgtaaaatatacagatattatggagcgtgcattgtataatggcgtattaagcggaatggctttggacggaaaaagctttttctatgtgaatccgctggaggtgttgccggaggcatgccacaaagatgaacggaaatttcatgtcaagccggtacgacagaaatggttcggatgcgcatgctgtccgccaaatcttgcgcgtctgatcagttccattggatcttatgcatttacagaaaatgaggatacgctgtttgtgcatctgtatatgggaagcaatgtggaaaaaacggtgaatgggaaaacggtaaatgtgcagatggaatcagatatgccatgggaaggaaacataaagatccgtgtgcaggctgaaaatgcaaaaatgacgctggcactccggataccgggatggtgtaaaaattataaaatttccggaatagaggatgccgcacaggaagaaaaagatggatacctgtatttgaaaaaagtgtggaacagggaagaaaccttctgtattgattttccaatggaggtacagatgtttgcagcatcggagcgtgtccgcgaggatattggcaaggcagcgattatgcgcggccctgtggtttactgccttgaagagaaagacaatggaaagaacctgcatgaactgctggtcgatacagatatgcatgcatcggtgtcggagggaaaaatctgcgataccgcagtaaaaatggtagaaacagacgggtggcggctgacagagagtggggatgcagaggagactctttatcacatgtatcaaaagccgcagaagcaaaaggtacgtttgcattatattccgtattacacatgggcaaaccgcggagaaaacgaaatgcaggtatggacacgcgtgcagaacccttaagggttctgcagctgattgcggtattgcgttggcgtgacatggtaataggtccggaatgctttgctgaaatagtggttatcggcatagcctaaacgttccgcaatatccatgatttttatatcaggctgccctaagagctctttggcacgttccatgcgaagttttaaaacatattcgtagatggtataaccgtatttgtttttgaatagtttgttgagatattcctgcgaaaagaaatatttatcggcaaacatggaaattttaatattggtgcaatagttgctttccacaaattccttgatgatggaaatcacttcttccggggaagtatttgtggtttttgcggcattctgcccaaacaccagatccggatcaatgcggtgtaacgccttttctatggcagaatttaaggcattttcctcaatgggtttgagcagataatcgcatgcaccaaaacgaagtgcctgctgggcataatggaattcgtcatatccgctgataacgatatactggctgtccggaaattcgtgatgggctttttccagaaaggtacatccgtccatgactggcatattcatatcaacgaaaacgacatcaggatgcagttcacgcatgcaggagagcccatcttttccattgactgccgtagccggtggctcgatgccgtaatagctccagcgcctcagtttggatacggcaatctgtacaggtttttcatcatctataatcaatgctttcaacataagtcttattcctttcttttgaaaatatcttttgaatggtcaggtgcggcaggaagtacaagggtaatccgggtatatgcaccttctttggatgcaatcttaaagtttgttggcttttcatataaaatctgcagacgattatacagattggcaagtccgattccgtcctgtccggtagttttctggatttcgaaggagtgctggatagcttctaactgatcctccggaataccacatccgtcatcttcctccgtgatcacaatggtatctgcctgtttttttactgtcagggtaatgtgaatacgaaaatcattctggtttcttccgtgaataatggaattttcaatcagcgtctgtatgctgatctttggaatcatacagtttttggcagcttcatcgatatccgcatggaattcgaagagatcttcatttcgcattttctgaagaaaaatataatttttaacatattccatctcggcacttaaagggacaagtacgcttcccttgatcgtgtatcgcagattggatgccagagaagtaatcatgcgatgaattttcatctgatcattgagcagtgcctcagtagatatggcctgcagggtattgtataaaaaatggggattgatctgtgcctctaaggcggcaagccgtgcatcttttgcattcagttccgcgacatatgttttacggatcaatttataaatatgcttcaccatggaattaaaactgttggacagttcacagatttcccggctgcccccttcgtgtatccgcgtggtaaaatctccttccccggtttttgccatttgcagggaaaggcgtttgagcggagaggtgatcagcagaaggaacggatagatcaaaaggagagaaagtagccagatcatagaagcattgaactgtacttttttttgtaattgctggatttccatattgataagct

SEQ ID NO: 1008 - DNA, 533 bp, Unknown
  gut microbiota DNA sequence
caaaagaaaaaaagccgtcgtacagcagacatattttcacgcgccttatgaaacggcggttttgattttcagagccgccgtttctttgcgtctacacaaaccaatgacgacttgcagggacacggtagccgatgggaggttattttgccgtgtctcgtttgctttttcaaagctcacatgatctacatcagttaaaaaaaagcattgctccttctccgggcaagtataacattgcatcggcattatcgttccatgtaattcagtataataatggctgttcttggcgcgctagttttccctcacggaaatctggcgttttttgttgccattttttcggagatggttctggaggaaaaacagtttcaggagcaggtctatgccgctgtggtgaagctgccggagaaacaggcaaagcgaatttatgcccgatactatctggaaatgacggtaaatgaaattgccgaagtagaaggtgtagacccaagccgtgtccgagacagtatccgccgtggattaaagcagcttgtaaaata

SEQ ID NO: 1009 - DNA, 378 bp, Unknown
  gut microbiota DNA sequence
agaaaggcagggtatattaccgattttgcccgaaaagtaaaggacggaacttttgatattgacggaatctggaaaaaatcggacgaagaagccataaaagaattatcttctttacagggaattggtgtctggaccgcggaaatgattctgttgttttgtatgcagcgtccaaatgtattgagttttggtgatctggcaatccagcgcggcatgcggatggtttatcaccacagaaaaatcgaccgcaaactgttcgaaaaataccggcggagattaagtccgtattgcagtgtggcaagcctgtatttctgtgctgtagccggaggttctattcctggcatgaaggattttgcaccaaaaaagcaaaagtaaacgaaa

SEQ ID NO: 1010 - DNA, 3037 bp, Unknown
  gut microbiota DNA sequence
aaaaatcagaatgtgtacagaaaaaaacacaggcagaaggagtataatcaaatgactattcgaagagcaaacgaaaacgacatcccaagactgctggaactgttagagcaggtgcttcagatccatgcagatatccggccggatatttttatcccgggaaccacaaaatacacaaacgaagaactttcccagatgataaaggatgataccagaccgatttatgttgcagcagatgagaatgacaactgtctcggctatgcattctgtcagttgcgggagcagccattttccaacaatatggtgccgtttacctcgctttttatcgatgatctgtgtgttgatgcaagtaccagaggacagcacatcggagagaagttgtttgtgcatgtaaaagaggaggcaaagcgtttaggctgctacgaagtgacgctcaatgtctgggcgggaaatacctcggcggagaaattttatgaaaagatggggctgaaaaccaaggagcagcagatggagtatattttatgataaatatccgaagtgcaaaacaaatggatcttgcccggattgaaacgttatacaaccacattcatgatgaggaagttggcattgtaccgtgcgtgtttaacgggattccggatgtacagcttgtgtgtcttgaaaaataccggctaatctaaaatacaactttagattagccggtatatttttattgattttgtatatattaacgactataataaaatcagagtttagattagccggaggtttgttatgccatatatacaaagagcgataacgccaatattgaaacaaagagtgtctaccagcaagtgcatgttactggtaggagccagacaggtcgggaaatcaacacttataaagcacgaattcaaggattttaaccgggcaaattttgatgatagactgacaagaatgcaagcgaaggaagaacctaaattgttttttttaaacaatccacagccgctttttatcgatgaggttcaaaaagaaagcagtattctggaagatatcaagcagattgtcgatgaatcggatgagcgagggatgtttattctttccggttctcagaaacttgaacttatgaaaggcatgagtgaatcgttggcaggaagagtgtcaatctcagagcttaccggattatccatgcgggagatttatggtgtaaaatttaaccggcattttatcccaaccgatgcatatatcaaagaacgtgaaaaagagattgtaaaatatgacaatatatgggaaattatccataaaggatcttatcccgagctttatgatatagacagggactggcaagaatattattcttcttacgttgcaacttatctggagagggatatgaatgaactggtggcggcagatggtattacatttaccaaatttctgacggcagttgctgcaagaacaggtgaacttctcaattattccaacatagcaggagacgtcggggtaagtgagccgacaattaagaactggatatctattttggaaagaaccggaattgtatatctgctccagccgtatagtgcgagcgcacttaaaagggcaataaagacaccaaaactttatttccgggataccggactggcatgttatcttaccagatggcttactgccgatacattgaaatgttcagcggttgcagggaatatgtttgagacatttgtagtgtctgaaattctaaaatcctattccaacgagggcaaagattacagatttaacattttttattacagagggaaagacagaaatgcttccggtgaaaacgaaattgatcttgtgatagaggaggatggagtcttatatccggtcgagattaaaatgtccggcaatcccaaggcaagtatgggagcaacgaatcaggtattggataaggtaagtgataaaaaaagaggtctcggagttattttatgtctgattgataaaaagacatatttaagagaaaatcttgtagcattaccgatcgaatttatataaaaggggtgatcccatgatgctaatgtgtaaaaacacacctgtttacgacatagagaaagaaaaaacattaaattataatcttcttccggggctgatgcagcaaaaaggtgcagacaatcacaccttcacaaaatggatgaaataccgctattcctcaggtaccaacacgatagcacggaaattaaagggcatcacattcggacagggagcgcgtatgcgcattaaccgtgagaccagagcgttgagtttcatcggctgttactggacaaaagctgaggatgattcgatatgttttgaggagatcagtccgtattacaaaccattctgggacggaaacgaagaatttacgggacaggcggcaccgacactctacgtgggtggtgcactgtcaaaggaatggaaacaggacggaaaactctacaaatatggcgatatttccgtggaactgcaatgtattaagctttgcagggaatgcggaatttctgtagaaagagcagatgagacagacggaggaatcgcaatttctaatataacctccccaaaggtgatgcttgagcaggcagatcagtcgggaagaattgatccggatgattttgatgagcagacgattatagatctgtttggaaaagccggagcgcaaatgcttattatagatgcgataatcggaaatggagaccggcatgcaggtaattttggctggattagaaatacggataccggagagtatgtgtgcatggcaccgttgtatgactttgatcatgcattagacagcacattagagtctgaccggcttttaacagatgcggttaaattttgtatgccgtatgaggatgagatagtgcgcattgcgggtatagcccagggatcggaaaacgaagtatttaagaaacgggcgcagagcattatgaagttgcttgatgccggaaaatgaggtagtgatgtacctgaattcggaaatattttctatgaagcaaaaatcagaaaacaattggtgcctgacacaataaacaacaatgccatttagcttctctagctt

SEQ ID NO: 1011 - DNA, 29230 bp, Unknown
  gut microbiota DNA sequence
gacttagaagaaaaatgaaataactattatggagaacagacaatatgaaagtaatcatcttagcaggaggtcttccaagtaccctcatcgaagaggacgaaaagatgccaaaaccgatggcagagatcggcggccggccgatgctctggcacattatgaagcagtatgcgcattatggatacaatgattttatcatttgcactggatataaaggagaagtgatcaaggattacttcatgaacttttatatctaccagtccgatatcacagtggatttgcagaccaatgaagtggaaatacatagaaaacagacagaggattggaaggtttcgattgtggataccggattacagtcctcggtgatggagcgtctgatcatggtgcgtgagctggcaggagatgagccggttctggtggcttacggagattgtctgtcagacattgacatacaggaaatggtagaaagtcatcgcaggcagcagtcccttgctacagtggcaattgcacatccgaccggtcgaaatgagattcttgcgctcaatgagcaggggtgttatatcggcacaaagcagggaaaaaagcagaaacattcctgggtaaatgcctgcagtatggtattggaagcgcgagcatttgattaccttaaggaaaatcaggagaatcattttgcattgtcgcttatggattgtctggcagcacatgagccggttcagacttatcgccacgaaggcttctggtcaccggttgagacgatccgtgacaagacattgatggaaaacttatgggcacagcataaagcaccgtggaaggtgtgggaagattaggcttcatcatggaagatggagaaagagagaaccatggagggtaaacaaatgaagtggttggaatattataaaggaaaaacggtactggtgacaggacacaccggttttaagggaagctggctgtgtgtgatgctggagatggcaggcgcaaaagtggttggctatgcgctgccaccggaaaaagatgccgtattatttgactgttccggtgcggcagcaaggatggtttctgtagagggagacattcgtgatcgggcacacttgcaggaagtttttcatacgtatcagccgcaggttgtgtttcatctggcggcacagccgattgtgcggacaagctacgagcagccggtatatacatatgagaccaatgtcatgggtacagtaaatctgttggaatgtgtgcgaaacaccccggtggtgcagtccgttttaaatgtcactacagataaagtatacgaaaataaggaatgggagtggggctaccgtgaaaacgatccgctggatggttttgacccatattccaatagcaaatcgtgttccgaactggtgacgcacagctataaaaagtcttttctggatgaaaaaggaattgcggtttcgacagcaagagcaggaaatgtgatcggcggcggagatttttcgcgggaccgcattattccggactgtgtgagatcggcattgcagggggaagaaattatcatccggaatccatactcgatccggccatttcaatatgtgctggagccgttggcagcatatatgcagattgcggcggcacaggcgatggagcacgaaaaagcaggatattacaatgtgggaccggaagaagccgactgtgtcactgtaggcgcgcttgctgatttattctgcagggcatggggcgatgatctgaaatggaaaaaaatctgtgaagacggaccacatgaggcaaaatttctgaaactggactgctcacatatcaagtatgcactgggctggaaaccgtgctgggatatccgcatggcaatcgaaaaaaccgtggaatggacgcgggtatatgcagcgcatggggatatccgcgcatgcatggagacacagatcaacgagtttttagagatgaccagtgaaaaagggcagatgtgatatgaaagtagtgattttagcagggggcaggggcactcgcatcagcgaggaatcccggctgcgtccaaagccgatggtggagattggcgggaaaccgattttgtggcatattatgcggcagtatgcctcttatggatttaacgaatttatcatatgctgtgggtacaaagggcatatgatcaaggaatactttgtcaattattatcagaataacagccagttggaaattcgcctgaaggatcagcaggtacaggttttaaaaaagaacagtgagccatggaaagtgaccatggtggataccggactggaaacacttaccgcggggcgtattttaaaggtgcgcgattatatcggtggggaaccgtttcttctgacttatggcgatggggtgtcagatgtaaacatccgggagcttatcgcatttcacaaaaagcagggaaagacggtgacgatttccacaacacagccggaagggcgtttcggagcattgcgtctggacgataccggcagtcaggtgctcggttttaaagaaaaggcacgcgcggatcaggcgtgggtgaatatcggatttatggtgatggagccatcggtgtatccgtatctgggtgatggaagtaccatgttagagacgttgccgtttgaacggcttgccgcagatgggcagatggcggcatataagcatatgggcttctggtctccgatggataacattcatgatcgggaatatttacagaagctttgggacagtggaaacgcaccatggaaggtgtaactgccacgaacggaaaggaaaaagtgatgtttgaacataaaacagaggaagaagcacggaaagagattctttccatggtagaaggatattatcgggcgtttcatgcgaaaaaagaagactttaaggaaggaaaccgcatttcgtatgctgcccgggtatacgatcaggatgagatgtgtaatcttgtggacagtgcgttggaattctggttgacttccggcagatatacagaacagtttgaaaaggaacttgcggattatattggtgtgcgtttttgttcgcttgttaattccggttcttcggcaaatctgctggcgtttatggcactgacttctccacttctgggagagcggcgtgtgaagcgtggggatgaaatcatcacggttgcggcagggtttccgaccacggttactccatatctgcaatatggtgcagttccggtttttttggatctgacgattccacagtataatctcgatgtgagccagttagaagaggcactgagtgagaagacaaaggcagttatgattgcacatacgcttggaaatccgtttgacctgaaaacaatccgttcgttctgcgatgcacatggactctggctgattgaggacaactgcgatgccctcggaagtgagtattgcatggatggagtgtggaggaagacgggaagcatcggtgatatcggtacgtcgagtttttatccgccacatcacatgacgatgggcgaaggcggtgcagtttataccgacaaccctttgttgcataagattatccgttccctgcgcgactgggggagggactgtatgtgtccgtccggaaaggacaatctgtgtggtcatcgtttcgataagcagtatggagagcttccgttgggatatgatcacaagtatgtatactctcattttggctataatttaaaggcaacggacttgcaggcggcgattgggtgtgcacagcttaagaaactgccacagtttgtagaacgtcggcgggaaaattttgagcggctgaaagcgcagttatcaaccgtagaggaccgactgattctgccggaagcttgtccaaactcaaaaccgtcgtggtttggcttcctcattacctgccgtaagggcgtggataaaaatcatgtggtacagtatctggaatcccatggtgtacagacacgcatgttgttttccggtaatctgatcaaacagccttgttttgatgagatgcgtaaaagtcatgaaggctatcgtgtggtcggggatttgcatgtgacggatcatattatggagaacagtttctggattggtgtgtatccggggatgacggatgcgaagctggattatatggcgaaggtgctgtgttctgctgtgcaggagtaagaaagaagtatcagaaacatattgcatatttagtttgatatgctataattggggttacaaattattgagtacgaaggggataataatggaatgggaaagctactgggataatttgatagagaagaagaagctgagaccacgacttgatgaacttgatgaacttgataaagcaaggtgcaacccttatacaacggaacagatttgtcacaagatctatgatgattattacaggatatggaggccgaagtggaagcaggtgcgcgaccattttttggaattagttgaacagtttcaaggagtacatcttcagacgagcagaataaagacgttggatagtctgcttgttaaagtaatctgtaaaagacatgaacatcttggagatccggacagtttatatttcaagattgatggagaaaattatcgggaaatcattacagatttgataggaatgcgtctgattattaattatcgtggcaaatgggaaatgattcataatgagattgttcagcattttccatatgtggaggagaaattgtatgatgagtacgatttgattccaatggataaactggataagaatgctttagtacagattccaacgatatattatgcacagggagataacatagagccttatcgtaaataccatattgttcccaaattgcataatatgggatatcggagcattcattataccgtctgctttgagtctgtgtacattgaaattcaggtgcgaacgatctatgatgaagcatggagtgattgtgaccataattatgtatacaagcaggatgaaaataaaagccattccgcattagagcaggtctctcaaatattgtgtcagatgacaaatatatccaatgatcttggggagcatatgagacagatttttgagggtgaaacgataatagatcagcacgacgggacatggaagacatcgcaggaagggcttgatatatttgataatgctctggatagaataggaaagacttatgagcaactggagagtttcagaaaaaaattgaaggcatagccaaaggagcgtgtgatggtaaagaaaaattcaaatggatacagatatgcacagatctttttaaaacgaatcaggaacctcgaactaaaaaaggattatcggacgaaccatggggaagaatttaccggaggaatggaagacaaatatggagataagtttaagacatatatgggatgctgtactacggtattgatggatgagagattaaaaagttcggtaaagagaggatattatggctaaggagaatgaattacctgatagttacgaatatatattggataaatttggagaagaaaagcttttatcaagatacacatggctttatgatctaatggaaaatttcctgcgtataaaaaattatgaagataatgtgattatatccagtgatattttaaatcatgttgtgattgattattttgtcgatattgatcgactgaaattatttcagaatattgagaagacacatgagtcaaaaatttatgcatattcagcatattggcttttgcggcataaacctatgcaggtggttgtgacagatcaaggtgaaaaatatgcttttgtaaatgaagaatttgtgagtgatttgatacggagttatctattttcagatccggataatattcctgttttaaataataagaaggatgtcgtagataattttgtaggtacacttttgtattattttaagtatcgtgaatattcagccaaaaatattgagattatgttattggcatttgaggcgggcaggggatatcagtattccgtggatcatcaataatagttcaaataagctgtggatagtgtgctattcatggcttattattttatgatttgcaagatgagcgtaattttagtgagaggggaaatcagatgaaaccacaaatcattctcgccggctccggtggctgcatgcgtgaactcgcatggcagatgccggactggcagatttcaggatatgtagacgtaacaccaccggagcatcccgtcacagtgggagaccgaaccattccttatctcggaaatgatgactttctgttgcaacagaccgaagatattaacgttgcaattgcagtaggagacccagcgcttcgccaaaagattgcgcagaaattacggaagaatctccacattcattttccgaacatcattctccacggagcagaggtctgttcagacgtaaaactgggccagggctgtatcatcagcatggatgcaagagtatccaccaatgtccggatgggagattttgtatttttaaatattggagcaatggtttgccacgatggcagattgggagattttgtcacgctggcaccggatgtgaagttggcaggtgcggtacacatcggaagacactgtgacattggccttggcacaaaggtgattcaggggatcacgattgcggatcatgtgcgtaccggtgcaggagccgttgttgtgcgggatgtggaggaagcaggtacggttgttggtgttccggcgcgaaagataaaacagcattagaaaagaggtacaaaacatgcacacaacaatcatcgcagaagcaggcgtcaaccacaacggcagcatgacacttgcgaagcaaatggtagaaaaagcaaaacaggcaggagccgattatgtaaaattccagacgtttgttccggaaaagctggtctcccgttttgcccagaaagcagaatatcagaagaaaacgaccggagcggaagagtcgcagcttcagatgttacagaagctggcattgacgcaggaggattttataaaactgcaggcgtactgtaaaacggtcgggatcggttttttgtccacaccgtttgatctggaaagtatcgcatttttggaaaagctggatatggatttctggaagcttccttcgggtgaaatcacaaatctgccatatctggaagcgatcggccgcaccggaagagatattgttatgtctaccggtatgtgtaatatgcaggaaattcaggatgcaatttccgttttggagaaaagtggagcagggaggattaccgtgctgcattgcaatacggaatatccgacagcttacacggatgtaaacctgcttgccatgcagcagatgcgtgagatattacagaaaccggtcggatactcagatcatacgattggcattgaagtaccaatcgctgcagttgctttgggggcaacggtcatcgagaaacattttacgctggacaagcagatggaggggccggatcaccgggcaagtcttgagccgcaggaactggcacagatggtaaccgcaatccggaacattgagcagagtcttggagatggaaagaaaaagcgcacagcatcggaagaaaaaaactgcgcagttgcaagaaaaagcattgttgcaaaatgtgcgatcacaaaaggggactattttacagaggaaaacttaaccgtgaaacgaccgggcacagggatcagtccgatgaaatggtacgaagttctcggaacacaggccacgcgggattatgaggcagatgaactgatatgaaaaagatagcgattgcaacagccacacgggcggaatatggaattttgcatccgctgatcgtccggctgatggaagaaaaagagtttgatgtacagcttcttgtaactgggacacatctggaagaacggtttgggtatacggtcaaagaaattgaaaaagacggaattccaattgcgcgaaaaattccgattcttaccgaggacaattcaccatatggaatttccgtaactatagcgcaagccattaccggatttgcagattattttaaaagtgagcagctggatctgtttctggtgctgggagaccgcacagaaattctcggtatgtgtgcggctgcgttaaacgaacacattccgattgcacatctgcatggtggtgaattgacggaaggcgccgtggatgactgtatccggcatgcggtgacaaagatgagttatctgcatttcccggcaacggaagtgtaccgcaggcggatcatccagatgggagaggcaccggagcgtgtatacaatgtaggtgcgcttggcgtagaaaatattttaagtgttccgatgttgtcggaagatgaaattcgaaaggatgtggacattccggcaggcatgccctatgcggttgtgacgtttcatccggtgacgatgcagccgggcgaagcagaaaaacaggtgcgggaactgatctctgcaatgcgtgaagaaaaacagtatttttatctggtgaccaaagcaaatgctgacgcaggcggggcacaggtaaatgcatggcttgcagaggcacagagggaacttgccaatatgaaactggtcagttcactcgggatgaagcgttatctgagtgccgtaaagtatgcggcgtttgtgcttggcaattcctccagtggaatcatcgaagcacctgcgcttggcacaccgaccgtaaatatcggagaccggcagaaggggcgtctgatggcagaaacggtaatcggatgtatgccggaggccggggcaattcaggcggcaatccggcaggcggaacaaatgccacaccggccttcgtttttatacggggatggaaagacatcggaaaaaattgtaaagatactgaaagaatttttccagacggattaccggcactggaaaaaaacattttatgatatggagtgcaaatgaaacatctggcagtaatcaccgcacgcagcggttcaaaaggattaaaagacaaaaatattaaattactcgaaggtaaaccgcttctggtctactccatcgaagcagccagacagtctggaaaatttgactgcattcatgtctcgaccgacagcgaaaaatatgcgcagattgcgcggaaatatggagcggatgtgccgtttttgcgtgacgcggcacttgccacggacacggcaggaacctgggatgtgctaagagcagttgtacagcagtatgccgcaatcgggcagcagtttgacaccatcaccctgttgcagccgacttccccgcttcgcgatgcggcagatatcaaaaaggcatttgagatttttgaagagaaaaatgcacagtctgtggtcagtgtctgtgaagcagaacattctcctctgctttgcaatacattaaaagaagatcagtccatgtgtggatttgttgatttacagaaagttggacggcggcaggatatgggaacatattaccggctgaacggcgcgatttatctgcagaccacggagcttctgatgagtcagggggatctgtacggagaacattcctatgcctgtgtgatgagtcaggaacattccatcgacatcgacaccgcactggatttccagatcgcggagacaattatggagacattctcttaacattttttcacactggtcgatatatataacaggtctatcatggaagatagaaaaagagaacgttttcttggagaaaacgaaagaagaaacatggaggttcccatatgaagacagagcagttagcgttatttttaatatccccggacagtacggttgtggaagcgatgcagcgcatcgaccgtaatgccaggggtattttatttgtgaccaatgagcagcagaaactgcttggtgttgtcacggatggagatatccgccgctggctgatccgcacgggagaactgaaagctccggtatccggtctgatgaataccgaacctaagagaatttccaggaaagagcatgcaaaagcacatgaggttatggtgcagcattccatcacggcgcttccggttgtcaccacaaaaggcgtggtatctgacattttgttccgggatgagcaggtggcaaaaaagaaaaagccgcaggggattttaaaagaggttccggtcgtgattatggcgggcggaaaagggacacgtttatatccgtataccaaaattctaccgaaaccgctgatcccgattggagatatcccgatcatggagcggatcatcggaaaattctgtgagtttggaaccacacagttttatgcgacggtcaattaccgcaaaaatatgattcgttcctatttctccgagatttcaaaaaactattctcttgaatatgtcgaggaggataaaccgcttggcacggcgggaagtttacagttgatcaaagaggagttttctcagccatttattgtgaccaactgtgacattttgattcatgcggattatgaagatatttaccgctatcataaagaggcgggaaatgagcttacgattgtcacggcactcaaaaatatcgaagttccgtatggggtcattcattccagcgagaacggagccgtccagtccatggaagaaaagccgaagctttcgtattttgtcaataccggcatgtacatattaaatccggaactgaaaaaagagattccagagaatacgtttttccatatgacggatctggcagacaagcttctggcagaaaaccgccgggtgggaatgtatccgatcagcgaggattccttcctggatatgggtgagtttgaggaaatgcaccgcatggaagaaaagctgaatttgaaatccgagtaatgatttgaaacagaaaggacatatagaacaatgaaaaaagtattagtaaccggagcagacggttttatcggaagccacctgaccgagagtcttctggaaaagggctatgatgtaaaagcatttgtatattacaattctttcaacaactggggctggctggatacgctgccgaaggaaaaacttgaccagattgaaatttttgccggggatgtgagggacccgaacggtgtgcgcacggccatgaagggtgtggatcaggtctttcatctggcggcgctgattgcgattccgttcagttaccattcgccggattcctatgtagatacaaacatcaagggaacgttaaatgtgctgcaggcggcacgcgatcttggcacggaaaaaatcatggtgacatcgacttcggaagtatacggcaccgcacagtatgtcccgattgacgaaaagcatccatttcagggacagtctccgtattctgcgacaaaaatcggagccgaccgtctggcagaaagcttttaccgcagctttaatcttccggttgcgattgtccgtccattcaacacttatggtccgcgtcagtctgcacgtgcagtgattccgacaattatttcacagcttctggcaggaaaagaggaaattaaacttggttccctgacaccgacgcgcgattttaactatgtaaaagataccgcggcaggctttattgcaattgcagagtcggacaagacaattggacaggagatcaatattgctacccagcaggagatttcgatcggagatctggcacaggagattatttcccagatcaatccgaatgcacacattgtctgtgacgagcagcgccttcgtccggaaaagagtgaggtcaaccgtctactcggctgtaacgcaaaaattaaggagctgaccgactggaagcagcagtatacattcgagcagggaattgcagagacgattgcatggattcgtcagcacatggatgcctataagacggacatttataatgtgtaagttgtagttttaagaaaagagggagcaaaatgggacgatttgtacctttatcgattccgaattttgagggaaatgagagaaaatatgtagatgatgcactggatcagggatgggtttccaccggtggtgcatacattacagagctggaagaaaaactggcagagtttttacatgtggagaaaacagcggcagtgcagagtggaacttcagcgcttcatctgtctttgattgcctgtggggtacagccggtggatatggtgattgttcctacgcttacttttatcgcggcggtcaatccggtgcgttatcagttcgcggagcccgtgtttatggactgtgatgacagtttgtgcatggatccgcagaagctgcaccgtttctgcgaaaacgagtgtgtgacagaggatggacagttaaagcataaagctaccggaaaaaccgtaaaagccatcgtagtcgtgcatgtgtttggaaatatggcagatatggaagccatcatggatatcgcacaggagtttcacctgaaagtgatcgaggatgcaacggaagcgctcggcacacagtacacgaaggggcgttatgccggaaaatttgccgggacgatcggtgatttcggggcatactcctttaacggaaacaagattattacaaccggtggcggcggtgccgtgacagcgaaagatccggcggaagtggagcatttgaaatatctttccacacaggcaaaggatgatccgcatttttatattcacaatgaagtgggatacaattaccgcatgacgaatttacaggcagcgcttggtgtggcacagatggaggaacttccggaatttatccaccgcaagcagaaaaattatcgattgtatcaacaattgctgcaggagttttcgggtggaacactgctttcatttcgtgagggaacttcctcaaaccagtggttttattccctgaagctggatatggaaaaactgcagggaaaaaatatgagagatgtgattacgacacttcaggagcgcggtgtgcagacccgggcgatctggggactgattcatgagcagcttccgtatcagaatgcaattgcttatgagatggaaaaagcaccgtactatagcagttgtattttaaatattccaagcagcacacagatcacagatgatgatattggctttgtggtggaacaaataaaagtggtatttaaatctggaatttgaacagataaggtgacactcacaagtatttgttcgggtcaataagctgtgtatagggtattttataaaacaataaatgttatttacaaaaattctcctttagaagtataatagaaatacgcctacaggaggattttttattgaaaaagcaatttgttaaggcaatgcttctggttggaattagttacaggaaagccgaaaaaacttatacctgcaggatagaaacggagacaataaacaaatgaaccagtatatatttaccccaaccggattttacccggacacacaggaaaaagaaactttggagaagcgctacgaaactttatatcacatgggattttccaagcggtcaaaagaaatgtcttcatcggagttgtttttatatgaactgtcagagacatttttccagtgtcttacagaaatgccggaactggaactgacaagagaagcgacacatgtggcgccggatgaggaacatctcgagcatctgctttcgtcagttccttatgcgattggggcagaatatattgaccgtaagtgggttgtcggcgtgttttcgcagctggagcagatttttcagcgggaaatttcaggctataaaggcagtgtggaattgtatctcacagagcagaatcagaagctgcacgtaccggagcgtatctttctgcatctggtagaaaataaagatggcgaagatccgtttgtttttatggcaacctatgcttcgctcggagaggatcatgccgtgcatcatatgccgctgaaatacgcgctgaccgaataccaggatgacagagataagctgctggcattgttgtcctgcctgaaccgtgcggcagaggtatcggatctgattgcagaactggtagaaagtggggagatgtttcatgttctgcgttttacagggaaagaggcatatcagtttctgcgtgatgtggaaaaaatcgaacagaccgggattctctgccggattccgaactggtggagaaagcgtgcaatggagtgttcggtagaaatacggctgggcgaaaagaaacctgccatggtaggatttgattcgttgatttcgatgcagccacagctgtgtgtggacggagaggcacttacgaaaaaagatgtggaacttctgctggcgcagacggaggggctggcatttttaaaaggcaagtgggtagaggtaaatcataaaaaactgcgggaacttctgaaacgtatggatggcatggacaccagcattacactgcgggaagctttgcagatggaaatcggaaatggaaaaaagatttctgcagatgtaggtgcgcttgtgaccaacggggcatggctttccaaaatgttgcgcaatttgcgaaaaccatccggtatccgttcggcagcagtgccgaaaaccgttcatgcaacgcttcgtccatatcagaaggatgggtatacgtggctgaattatatgcagaaactgggatttggtgcatgcctggcagacgatatgggacttggaaaaacgcttcaggttctctgctatctcgaaaagatgagaaaatcagacaaaggcgcaaaaacgcttttggtcgttccggcatccctgatcggaaactggcagaaggaggcagcaaagtttgtcccggatatgacgcttcaggttattcacggaaagacatctgcgcagcttgcacaggaatttgatgcagggtctgcattccttacgataacgacatatggcatggtttcccgcatcaaggcatttcaggaaacgatgtgggactgtgtgattctcgatgaggcacaggcaatcaaaaatccgggcacgaaacagacacgcgaaatcaaaaaactgcaggcacagatgcggattgccatgaccggtacgccgattgaaaatgacctgaccaatttatggtcgttgtttgattttatagatcatggtctgcttggtacatccaaagagttccatgagtttacgaaaggactggaagaaaatccacaggaatatgcaaaattaaagtccatgattaccccgtttatgctccgtcgtgtcaagacggacaagaccgttattgcagatcttccggaaaaggtggaaatgacagattttgcgcagctgaccagaaaacagaccattttgtaccgcaaggtggtttcggatatggagcagaaagtccggcagatggaggcagaacacagcatttcccagtttgccaaaaaggggattgtgcttacagcaatcatgaagttaaaacagatctgcaaccatccggaccagtatctgggacaggatgtttatacaccatcagagagtggaaaatttcagcttttgaaagaaatctgtgagacaatctatgaaaagcgtgagcgcgtgctggtttttacgcagtttaaggagattgcggacgatctggcagcgtatctggagaccgtttttcatgctaagggctatgtgctgcacggaggaacaccggtggcgaagcggacggaaattgtggatgcctttcagggagaagcctatgtaccgtttattgtgctgtcggtaaaggcagccggaaccggactgaacctgacgaaagcaaaccatgtcattcattttgaccgctggtggaatccggcagtagaaaatcaggcaacggaccgggcattccggatcgggcagaaaaaagatgtgatcgtacataaatttgtctctcagggaacgattgaggaaaaaatagatgcgatgctggaatcgaaaaaggaactggcggaaaatgtaatcggaagcggctccgaaaagtggattacggagttaagtaacgaagaattgttctcattattgcgattggagtaaacggtatgcgaagatattgggaaattgatcagacatttgcccagccgagtgaatctctgttaaagaaaaatttaaaagagagcgtaaaaaagcaaaaagaaaagggaaataagctggagccggttgttatttccggcagggcaattgcaaaaagctggtggggaaaagcctggtgtgacaatctggagcactatgcggattttgcaagccggctggagcgtgggaagcgttatgtgcggaccggaacagtaatcgacctgaaaatccagaaaggaaaaatcattgcaagagtgcagggaaccagaaaaactccttaccgtgtggaaatccgtatcagtccgctcacagagcagaagtgtgaggcaattcttgaccggtgcggtaagattgagactctggaacgattactgtccggtgatttcccggatgagatgaaagaactgtttcagggagaggatggtcttttcccacagccaagtgagatcagttttcagtgcagctgcccggactgggcactgatgtgcaaacatgtggcagcagcactttacggtgtgggggcacggctagacatgaatccggcattgttttttgaattgcgtggaatcgagatcggacggtttgtggatgtggcacttgccaatcgtgtggaacggatgcttgagaatgcacagaaaccaagtgcaagaattatggatgatgaagaggcggcacaaaaactgtttggcgtatttgggagggcatagcaatgggaatctatgtaaatccgggaaatgaagaattcaaaagagcagcaaattcaaaaatatatgtggacaagaccatgctcctcgcgtttacaaaccagaatttaaaatcggagcatcaaaacatctgcgtcagccgtccccgccgtttcgggaaatccatggcggcaaatatgctggtggcatattatggaaaaggggatgattcctatgaattgtttgaaccctttaaatttgcaaaagatcctgattttaaaaagcatctgaatcaatacaatgcgattcatctgaatatgcagcagtttctggggcgtacagaatccgtggaggatatgatggaactgatttccagaaaagtggtgcgggaactgaaaagggagtttccacaggtcacatattatgaggaggatctggtatcggttctggaagaaatctattcccagacgcggagttattttgttttcgtgattgatgaatgggattgtattttccgggtgaacccgatggatgcgcaggcgcagaaaaagtatctcaactttctcagggatttgctgaaaaatcagccttactgtgtgcttgcctacatgaccggcatccttcccatcaaaaaatacggcgaacattccgccctgaacatgtttgatgaatattccatgaccaaccaacgcgaactggcagagtttaccggttttacagaagctgaggtgcaggaactctgccgccagtacgacatgccatacgacaagacgaaacaatggtatgatggctatgatttaaaaggtgtgcagatttacaatccacgttctgttgtcatgtcaatgcttggtcatgactatgacagctactggacaaaaacagagacgtatgaggcattaaagaaatacatccagatgaaccagtatgggttaaaagaactgaccacccggctgattgcgggggaacacatcccggtaaatccggataaattccaaaatgacatgacaacgtttgccagtgcagacgatgtgctcacgctgttgattcatctgggatatctgacctatgatttttacgcacagaccgtctgcattcccaatcaggaagtgcagaaagagtttattaactgtatcgaggacggaggctgggaaccagtgatggcggccatccggcagtcagaggatttgatggaagctacacttcgtggggatgaagaatatgttgcacaacaaattcagcgggtgcatgaagataatatttccattctgaaatataatgatgaaaattccctggcgtgtgtactgtcactggcatactatgcggcaaagaaaacgcatgagatttaccgggaattagcaggcggaaaagggtttgcagatctggtgtttgttccgagaaagcatgtcgaaagtcctgctatgattgttgaattaaagtgggatcagtctgcacagacagcacttgatcagatccgggagaaaaagtatgacaagacattaaaaggataccatggaagcatgcttctggtcggaattaattacaggaaagccgaaaaaacttatacctgcaggatagaaacagagacgataaacgaatgatctggtaaatattgtctggttggtgcgcctgaagggcatagcaagggatactacaccagcatcccaagcgttcccgccacaatcaacaccagtcctccggcttctttttttccaagtttctcatgaaatacaagataagaaaacagaatggtaaccagaatactcagcttatcgatcggcacaacgacacttgccagaccatcctgcagcgcacggtaatagcacagccaggaagcaccggtggcaagtccggacaggcagataaagccaagttccctgtgatcgattgtgcgcacactgtcctgctttttcgtgacaaacacgacaatccatgccatgatcagcacaacgatggtacggatggctgttcccagattggaatcaatgttttcaatgccgacttttcccagaatagaagtcaggctggcaaagacggcagagccaagcgcgtagaagaaccagctccagccttttttcccggaattctcagaagaggtttcctttttcgtgatcatcaggaaggttcccgcgccgatcagcaccacgcacagaagtttcagtgggctgatgctctcatgcaggaagagaaaagcgagaagaatggagaggatggcacttgatttatcgaccgggaccaccttatccacatctccgatctgcagtgcacggaagtagcacagccaggaagcaccggtggcaagtccggacaggatcagaaatgtccaggttttggcagaaacacttccgatgccgtgttgtgccccgaccagaaataccatgatccatgaaaaaataagtacaataatggtacggatcgccgtagctgtattggaatcggtatttttgataccgcatttcgccagtatggaagtcagtccggcgaacagagctgacccaaatgcaaatagaatccacatatacaatttcctccatgggacaagcgtaaaatgttttggggcatttgtcaaaacttttttcttgtgatatgataattttatctttttcagaggtgacagaatgtttgaaaaaaaacagatcatatacagtgaaacacagggagtctgtcaggtagaaaatattgtttcgctttccgcatcacgcagggagcgcaaaattccgtactatgtgctgcgcccggtattcgacaaatccagagtatcttatattccggtagaaaaccatcaggtaaaactgcgggagttgtttaccagggaagaggcggaggcacttcagggaacggaagaaatgaaaaaagatgaaaaactgagacaggccgtggagtatgtattaggaaaaaaggagggataggatggcacagcagcagccacagcaggcaatacataaatttgtacttggaaataaagaacttgaaggaaagacagcggaattccagtatgacaaaggctggtacagcattacggatattgtaggggaggaacgcaacgtaatctacaaatcccgcaatgcgcaggaagcctatatgaaatggaacgtatatatcggccgcaaaaaagaacggacagcgtccggccgaaacagtgacgcagagcatggaaaccgtgcggaagggaaccgggcatatgacgcacgggaccgtcggaaccgtgattcccgtgaaaagcgcgatatgaccgatcgccgcggaaataataatcgtggtcggcatgaaagataagtcgatacaaaaacagcgcctttgtcgatttggcagggcgctgtttttatgaaacggagagcatgggattcgaacccacgttgcgtctattcgacgcaaaccgcatttcgagtgcggcaccttcgacctctcggacaactctcccttgaaattcatctccgatgaatttcctacgtacatcgcttccgcggagcggaacttttatgcgatgtgctccttgaggtatagcgtaagctatatctcctacgtacatcgcttccgcggagcggaactctcatgcgatgtgcttcttaatagtatacagaatttacatacatttttcaagtcgcttatcttgtgaatgaacaaaaattatactataatataaatgtgtatgcgaaaaaacattttgtacacaataagagaatatgcaggaggaaacgtgcatgatgaagatcggaatgcttaccagcggcggagactgccaggctttaaatgcagccatgcgtggtgttgtaaaaggacttactacgaatgtagatgaactggagatttatggatttgaaaatgggtacaaagggctgatctatgaacagtacaggattcttacagcctcggatttttctggaatccttaccagaggtggaacgattctcggatcttcccgccagccattcaaacagatgcgtgtgccggatgaaaacggtctggacaaggtagaggccatgaagtccacataccgtaagctcggactcgactgtctggttatcttaggtggtaacggtacacagaagacagccaatctgcttcgcgaggaaggactcaatattattcatcttccaaagaccattgacaatgatatttacggaacagatgtgacattcggttttcagagtgcaattaatatagcgacagagactatcgattgcatccatacaacggctgcttcccacaaccgtgtatttattgtagaggtgatgggacacaaagtaggatggcttaccctgtatgcaggagtggcaggcggtgccgacattattctgctcccagagattccgtatgatattgataaggtcgtggatgcgattcataagcgtacaaaagacggaaaaggatttacgattcttgcagttgcagaaggtgcaatctccaaagacgatgcacagcttaccaagaagcagtacaaggcaaaagttgcatcccgcaggtatccatcggtttcttatgagattgcagatcagattcaggagaaatgcggtgtggaagtccgcgttgcggttccgggccacacacagcgtggcggcagtccgtgtccatacgacagagtattatgtacccgtcttggatctgccgctgccaaagcaattatggatggaaaatttggctgcatgatcgccatgatcaacaacaagaccaaatgtgtgccgcttggagaggtggcaggcaagttaaagacggttgatccggacagtcagatgattcaggaggcaaaacggatcggtatcagttttggagattaaatttcctgatatccggcaaaaaggagaagaaaaatgtcttacacggctttataccgtaagttccgtccgcaggaattcgaagatgtcaaaggacaggaacacattgttacaacattaaagaaccagatcaaagccgatcgcataggacatgcttatttgttttgcggtacccggggtaccggaaagacgacagttgcaaagatttttgcaaaagcagtaaattgtgaacacccggtagacggaagtccctgtggaaaatgccctgcatgtcagggcattgccgccgggacttctatgaatgtcatagagattgatgcggcatcgaacaacggcgtggacaatatccggcagatccgggaagaagtatcttaccgcccgacagagggaaaatacaaggtttacattattgatgaggtgcatatgctgtcggcaggcgcattcaacgcgctgctcaagacgctggaggagccgccggcatatgtgatttttattcttgcgacaacggaagcacacaagatcccgattacgattctgtcccgttgccagagatatgattttcaccggatttccattgataccattaccgatcgtctggcggaactgatgcgcaccgaacaggtggatgtcgaggagcgcgcactgcgttatgtggcaaaagccggggacggttcgatgcgtgatgcgctgagtctgctcgaccagtgtattgcctttcatctgggggaaaaactcacctatgaaaatgtgctggaagtgctcggtgcagtggatacagaagtgttttccgcactgttgcgccaggtgctggcaaaagatgtgaccggtgccatccggacggtggatcatttggtggatcagggacgggaactgggacagatggtgaacgattttacctggtacatgagaaatcttttgctcatccagagtgcggatgacatggaggaagtgctggatatgtcggcagatcatctggcagccctgaaagaagaggcacagatggtggaggcggaaacactgatccggtatatccggattttctcggaactgtccagccagatccggtatgcggcacagaagcgcatcctgctggagattgcaattatcaagctttgccgtccgcagatggaaaaagatctgtcggcactcaatgagcgtatggatgatatggagcagaaattagaaagcggggcatttgtttcggcagcaccacagagtgcagcagttccggcagcaggtggcacgcaggctccggcggcacaggctcaggagaaaacacagcttcccaaagccattcctgaggacattaaacaggtgatgaacaactggcggtcggtcatttcagagatgggaggcatcaccagacagtatttgaatcaggcagtgccgacgcttggaccggcgggagaactgctcctggtgtttgacgatgccaacgcgttttcctatctaagcgacaataaggcagggtgtattgatcatttgaaagaaatgattgcgcagcggtgtgcaaagcaggtagaagtgcagctccgcttaaatgaaggagaacgcagcgcagccaatacggtaccggatttgcggcaattaatcaattttgatattgaggaagagaacttctaatggtatgataatacaagattcgtaaataactgaaattagaaagcaggaggaccccacatggcaaaaagaggtggattccctggcggtatgccgggaaatatggcgaatattatgaaacaggcgcagaagatgcaaaagcagatggaagaggcgcagaagaatttagaggaacaggaagttacggcagcagcaggaggcggagccgtggaagtgacggtttccggcaagcatgaggtgacaaaggtaaaactggcagaagaagtagtggatccggatgatattgagatgctcgaggatctgatcatggcagcgacaaatgaggcgatgcgtaaaatcgatgaagcttcccagcagtccatgtcacagattaccggtgcattgggcggaggacttccgttctaaatatggattattacagtcatgagattgcgaaattgattgaggaattgtctgcacttcccggaatcggagccaaatctgcgcagcggctggcatttcatattttaaatatgccgcaggaccacgtggatgcactggcctcggcgattgtttcggcaaagaaaaacgtaaaatactgtaagtgctgttttaacctgacagatcaggaaatctgtccgatctgcagtgatacttccagagatcacaagacgattatggtagtggagaatacccgtgatctggttgcatatgaaaagaccggaaaatacaatggagtctatcatgtgctgcacggtgctatttccccgatgcttggaatcggaccgaacgatatccgcttaaaagaactcatggttcgtctggagaaggatgtggatgaagtgattattgctacaaattccagcttagaaggcgagacgacagccatgtatatcagtaaactgatcaagccgaccgggattaaagtgacacggattgccagcggagtgccggttggcggagatctggaatatatcgatgaagtaactctactgcgggcattgcagggaagaacggaattataatacaccaccattttaagaggaggaaagaataaataatgaataatttagaattggaaaaacttgcgaatgaaatccgcaagagcattgtaacggcagtgcacagcgcaaaatccggtcatccgggcggatcgctgtcttcggcagatatttttacatatctgtatttcgaagagatgaatattgatccaaagaacccgaagatggaggatcgtgaccgttttgtattgtccaaaggacatgtagcaccggcttattattccacacttgcagagcgcggatttttcccgaaggaagatcttgtgacactgcgccatacaggttcgtatctgcagggccatccggatatgaagcatattcctggcgttgatatgtccagtggatctttggggcagggagtttctgctgcagtaggtatggcagcagccggaaaatttgatcacaaagactatcgtgtatacaccctgaccggagatggtgagattcaggagggacagatctgggaggctgctatgtgggcaggacacaggaagctggacaatctggtagtgattgtagacaataataatctgcagattgatggggagattgacaaagtatgttctccgtatccgattgataagaagtttgaggcatttaatttccacacgatcgtgattgacggaaatgatttcgaccagatccgtgcagcatttgaggaagcgaagaagaccaaaggtcagccgactgccattattgcaaagaccatcaaaggaaagggagtttcctttatggagaatgaagccggatggcatggaaaagctccgaatgacgagcagtacgaaatcgctatgaaagatcttgagaaagcaggtgaagcattatgtcagaagtaaagaaaattgcaaccagagacagctatggaaacgcattggtagaacttggaaaagagcatgagaatctcatcgtgctcgacgcagatctggcaggtgctaccaaaacctgtattttccagaaagaatttccggagcgccattgggactgcggtatcgcagagtgcaacatgacaggtattgctgcaggattatctacctgtgggaaagttccgtttatcagttcttttgcaatgtttgcagccggacgtaactatgagcaggttcgcaactccatcggctatccgcatctgaatgtaaagatcggagctacccatgcaggaatttcggtcggagaagacggagctacccatcagtgcctggaggatctggccctgatgcgtgagatccctggtatggtggtgatcaacccgtcggatgatgtggaagcacgcgcagcagtacatgcagcatatgattatgttggaccggtttatcttcggtttggacgtctggcagtgccggtgatcaatgacagagaggattacaagtttgagatcggaaaaggaatcgtattaaaagaaggtacggatgtaaccatttttgcgacaggactggaagtgtcagagtccttagaagctgcaaagatgctggagaaagatggaatttctgcagaagtaatcaatatccataccatcaagccgattgacgaggaactggttgttgcatctgcaacaaagacgaagaaagtcgtaaccgttgaggaacattccgtaatcggtggacttggaagcgcggtagcggaagtattgtgtgaaaaggcaccgacaaagatgatgcgtatcggcgtgaatgaccggtttggagaatccggaccggcggttgagctgattcataaatacgagctggacgcagaaggaatttacaaaaaagtaaaagcttttgcaaaataatacagcaagtacaaaggagactgtcgtatcgaaggatatggcagtctttttttgcctgaagtctggaaatatgtccggtagtgtcgtacgatttttttcatgcctgtcaggtttttccaaaattctaccggatggtggtgatactatattctggaaaaacggataaggaggcaggatatgatagatattgcagaaggaccgggacgtgacctgaaaaatatcagacagatcggaacaccggcagagggggatcggatttacatagaaaatgcggcgtatgccagggtgcatgaagaaacttatgaggagcggagagtgtttatctttatggggcatacagagtgcgagcagggtgtatatatgacctttgtagaggctgccattccggtaagggatatggagttttcacagaatctgccgagatggggaacacatgcgtggtcggatgtattccgtgagattaagagatcttatgagaattccattattgtcggatgggcgttggattgtaaaggatatccaccacgcctgacagcagaactggaagctatccacagagaacagttcggaggtgcacatcaggttcttttccttatggacagtatggagggggaagaatacttttatctgcataaaggcaaccggctgcaaccgaaaaacgggttttatatctattatgcaagggaactgcatgagatacggatcccggatgtgacgattgaactgccgagacgtggaacccggcagatgcttccggagattctgacggagagcaaaaaagagaatgaaaaagaagaatgcagcagttcaaagagcgaacgcaaaccaacgtcgtatgcgatggccgccgcaatcgcactgcttttggttctgaccggggtcggaatctggcagcagcgaattcctattccgggtctggaacagacggtggagacgataggggaaaaaatccgccatgtgtcacaaccggcagaagtcctggtggggactgaaaaaaatatagtggaagaacagacggagagcgcaaagagtacggaaaccatcagtgaacccatgcagctgataccgattgaagaggttccggcgggagcggtgaaaaaggcggaggaagcggcaccttccacacagccggcagaggagaaagaaaaacctgtggcggtagaaaaagcacaaaattattatgtggtacaacagggggatacgctgagtgggatctgtaaacaggcatacggatcaatgaaaaaattaaaagagcttgaaaaggcgaatgatctggaagattcggatgatatcagggttgggcagaaattattacttccgtaacggggacggcaatgctataatgatagaaacgtaagcgaaaaggagaaaaatcggtggctgaaaaaacggaatttaaaaccgtagagacaagtcaggaagacctggaggaactggaagaaaaaatcaggagacacaggcataaaatagcccgcagaacggcacttgtgatcgttactgttgtagcagcagtgatttttgtagaactttggtctgcacttcgcacatattcaggatttgaggtgcaggcatcggcggagagaaaggacagtgcggcaacgggatataagatgttccagggaaaaatactggaatatgataatgacggaatcgtgtgtcacgatacagatgaccggctgatctggaaccagtcttatgaaatgactgcgccggaactttccgtgtgtgaacagtatcttgcggtttatgatcgtggagggacatttatttatatcatgtcggaacgcggactggtaaagaaaatcgaaacggcaacaccgattgaacgtgtatgtgttgcccgtcagggaacggtggctgtgctgatgaaggaggatgatgtctcgtatgtacggctttatgacaaaaagggacaggaacttgccagtggtgaattttatcaggaaaaaggaagttttcctgtagatattgcgctggctccggatgcgcagaaactggcagtagatatgctcgacgtgacaaagggcaaaacctgttccacggttactttctataactttggttcggttgggcagaatgaaatcgacaacaatgtgggaacgtacagttacaaaaatacgatgatatcggaactggtttataccgaatccggaaaacttctcgcgatcagcgatgccggactgatctggtttgacggagcacaaaaacctgcgccgaaaaaacagataaagtttaaacgggagatacagagtgtcttctataataataaatatgtcggtatttcatacagcgataccaaaaaagaaaacagctggcacataaaagtctatgacatgaatggtaaaacggtcatggagaacgatacagagatcgcatacaacagaatcgagctcctcgataataatgaaatatgtgtccgggatgattataactgtgaattgtttaccatacacagcatccgtaaattccgttatacgtttgaccggcagctttataacgtattgtcgggatcggatggtcagaattatacattggtattaaacggagaaatagaagaggtacgattacaatgaactggttattgatactggttgtattacttgttgccggaaatattgtctggggattcttccgtggtttcctgcgtgtggtttattcaatggctgcctggatactgattctgttttttgttacgtttgcaacgccgtatgttgcagactggatgacagaacacacaggcctggataccagaattgaaaagaattgcaaagagaaattgcaaaatgccgtggcaggggaagaaaaaagtacagaagaacaaaacacgcaggagcagaaagatctcagcggtctgggaatgaaactgccggcaaacgtatggaaccagataggggatacacataaacttgcggatggctggatggaacaaagcggactgtataatacaattgcgtcaaaagcatcatcccttgccatgaaagcgattgcatttgttattgttatgctgattacggtgatcgcctttcatctgattgccactgcgattgatctggtggcaaaactgcccgtaataggagaagtaaatcatatgcttgggggaattgccggattgatcaaagggctgttgctggtatggctggtatttgcgtttgcagcaatgggggcagcgacagaagccgggagtgttgtgattgaagcggtatatcagtcgggaattctgcaatggctatatgaaaataatttaatactgacgattctgctttcgtttttatgattgaattgtggtttgtaagcacccagggaacaatatcttgtggtgcttatatttttgcaaataaaatgtaaagtttttgttgactttaggttgtctgcgtgatattatatctaagctgactcgtgacgaggacactgatacaggcactggcaggaagctgagtgatggttggtggtcatgatgatgaaaaaagttgttgacaaacaatgacaaacatgataagatatcagagttgccgcgtttgagagacagcaaagaaaaataaaaaagttgttgacaacgacttgaagatatgataaaatatacaagctgttggaaataacaacaacgaacattgataactgaacagtgaaaaaccttgaaagattttgag

SEQ ID NO: 1012 - DNA, 11228 bp, Unknown
  gut microbiota DNA sequence
cggtacgaaatgccgggtcccagccaagtacaacctgtccggcaattggaggctgcatgagaagctgctccaagtttttgccaaatacacggatggccccgtcctctgccttctcaaacagatcgcttcggatctcgcgctcaatggcaggtgcaatcagccggttgtaagcatcctctgtaacttcatgcagtacagctgctgtgggagcagaaggtgcggtgatgagtttacggtcgagataggaaagaatccgatccacgggtgcatcaatttttactatgaggaatttctctttttctccacggctgatggcaagaatccggtgtccggcaagctttgaaagactttcgctgaattcataatacatctcatagacggattcggcttcgggatcttttgcagcggataaaagctgtccgtgcttcatagtcagttcccggatatgggtacggaaatcggcattgtcggagaccgactctgcaaggatatcttttgcaccgtttaaggcatcttctgcagtggaaacttctttttccgggtttatatagtttttggcttcctccagaggagaaactgtcattttctgtaaaaggatcaggttggcgagtggctctaatcctttttcctttgcgatcgtcgcacgggtgcggcgtttcggacggtacgggcggtacagatcatccacggctacctgtgtttcggcggcaagaatctgtgcacgtagttcttccgtcagttttccctgttcttcaatggaggcaagtaccgtctgctttttatcttccagatttcgcagatacaccagacggtcataaaggtttcgcaagatttcatcactcagtgcaccggtagcttctttccggtaacgtgcgataaagggaatcgtgcatccttcatcaatgagtttcacagcagcggctgcctgttctttccggatgccgagttcttccgcaatttttgtattaatatccataaattttccccttaatagtcctttcctgtcaaataatactttccctattatatatgaaatgttacaataaaagcaatcctaaaaagaaaggaaaacgtattatggatatgtatggatcatcttatcaaccaaatccgaatcagccgtatcgcagccggagatctgcacgcatggaggcagcttccctgatacttggatcaattgcattactaagctgcacctgtctgtatcttgctgtgccgtgtggggctctggcggttatttttgcaacactttcccgcggaggcatgatgtcttatacttcgaaagcacagatcggaatgatcctggggatcattgcattaattgcaacaattgtactgtatgcatccgttctggggtatgccatccatcagtatggaagtatcgatggatttttaaaggcctattctgatatgcagggcatggattataatgaactgatgaagcagtttatggcaaaataaaaagattgttgcatctgcatagccatgctataatgagaaaagcaatcagttacagaaacggagtataaacaaatgaacctaccttgcaaagaattaaaacgaatcgcaagagacaatttaaatggaaattataaaataccaatgggagcttttcttgccgccacactgattcctttggcggtagaactcccattttccatgttgcagaaagatgcacagccgcttccggtgacgatcatgttttatgtggcggaatttttgatcacacttttaagcatggtattgtctgtcggaatccttcagcttcatctgtcacttgcacggaaaaaagaaatgacacttggcatggtattttacgggtttaaaaatcacccggaccgttatatcattgcaggactacttttgattattgcaacgttgatcagctgtattcctgtgatcacaggtgctgtgttattttttgtcctggacaagtcgcctgcggcgattgcagtactggtgatacttggtattgtgagcacgattctggcagttttcgtgcagatgtggtatgcactggcattgtatctgcttttggatcatccgcagatgaaggcacgcgaatcattaaagatcagccgtcagatcatgaagggaaataaaggaagattattttatatttatctgagctttatcggattgcagatactgtgtctgctgtctttaggcatcgggtcactctgggtatatccataccagtcacagacactggttattttttatctggatgtggtcggggagatcccatcaaacataagctaatgctccggctgattgccggatattagaatatactattattaggaggagtttttcataatgaaccaacaaaaagacattataagagatgccagggttttgggtacgccgaaaatgctgctgcttggtctgcagcatatgttcgctatgttcggagcgacaattcttgtaccgattctggtaaacagctattttcagagtacctcacaggtattgtccgtacaggtgacattgttctgtgcaggattcggtaccttgtttttccatctgtgtaccaaatttaaggttcctgcttttctgggatcttcatttgcttttctgggaggcttttccagcgttgcggcactggataccgggatatttgccaatatggcagataaagaaaaactgcagtatgcgtgtggcggaattgttgtggcaggattgttgtatctgatccttgcactgatcatccggtgcgttggcgtaaaacgtgtgatgcgtttccttccaccggtggtaaccggcccgatcattatctgtatcggactgagccttgcaccgtctgcggtcagcaatgcatccacaaactggctcattgcaattgtggcactggcggtcatcattattttcaatatctggggaaaaggaatgttcaagattattccgattcttctcggtgtagtgatttcgtatgtgttcgcactggttctgcagggacttggttttacgaatccggacggatctgttattttaaatttttccggcgtttcctcggcggctgttgtcggacttccaccgtttatcctgccgaaatttaatcttacagcgattcttatcatggcaccgattgccattgcgaccatgatggagcatatcggagatatttccgcgatttctgcaacggtaggacagaactttattgaggacccgggattgcatcgtaccctgatcggtgatggaattgcaacttccatttctgcaatgatcggaggacccgcaaatacaacctatggagagaacacaggcgttctggagttgtcccgtgtacatgatccgaaggttgtccgtcttgcggcatgttatgcgatcgttttaagttttatcccgaaagtagcagagattattgcttcgatgccggcatccattattggcggtgtcagctttattctttacggtatgatttctgctatcggtgtaagaaatgtggttgaaaaccatgtggatttcaccaagtccagaaacctcattattgcaggtgtgatcttagtttccggtctcggattctcagatggactgacctttacgattggaagcacttccattaccctgacatcccttgccatcgcagcgattgccggaatcgtgctcaatgcgattctgccgggaaatgattatgcatttggaaaagacccggaaggagatgcatctcgcggtgtggatctgcgtccgcatgagctggagcaggaactgaaaaatcagaaatagaatgtttatccaagaagtgcaatgccaaagacggcgagaaacagatttttgaccagccagttgagcagtacaatggcaagcgcgatccacagataaatatcacgataatgcatcccgatggcaagacgcccgcgggatgctttttctatggtctgggacagcataaaccagccgaaaaagacagcggtatacacaacaatcggatggtaaaagaaagagcgcacaatatgtccgtgcagcagggcatgaattgcgcgtgtgccgccgcatccgggacagtagtacccggtcagattgtgcaggacacagccatccggaggaaatatccacaggaaataaccgcttttccatgcaagtccgagcacgagtgcgagaataagacatacccagccaatgatataaaaagaaaaatctaaagttttgtccgtgcgtaatatatttgaaatcttcatggaaattatgttagcaaatgaatgggaaaaagtccagccggtgttgacattttcggacaatgtgaatataataacgatgaaaaattaaagaaggaattcttcggggcagggtgctgcggatgacgcatattcccgaccgacggtatagtccgtgaactgctttttgcagccgaaccggtgagattccggtaccgacagtatagtctggatgagagaagaaaaagtgcaaattaatgtttgcattgttgactgtatgatagaaaaagaaccccgatagagaaatctatcggttttttatttcctgatcatatatgcaggcaacactcctctggaattccgttgattctgaaaggagagttcgtatgagtgaacagacaaagacagcagtaaaacagggaggcatgaatacaaaagtacgctatattacggttacagcgatgctttctgccgtagcgttcgtgcttatgtatctggagattgccattccgatcatgccatcatttatcaaatttgatttttcggatctgccggcactacttggaagctttgcgctcggaccagtgtgtggggtattgatctgtctgatcaagaacgttctccatctggcattttcaaacagtatgtttgttggagaactttccaattttattctcggagccgtgtttgtggcaattgcaggtaatatctacaaacataaaaagaccaaaaagagtgcagtagtcagtggtctggttgcagcattggtcatgggaatagtcagtgtgttttccaattattttgtggtttacccggtatattacaaggctggtatggcagaggaagccatcctgcagatgtatcaggcgattgcaccatccatgaaaagtgtactgcagtgcctgatctgctttaatcttccatttacaattgtaaaaggactgattgcagttgtcatctgtatgctgatttacaaaccgttatctccagttttaaagggacgtttaagtgaatactaaatggttttgggagcacccgtggggtgctccttttttttctcttttcttttgtttggaaaattgttataatatgatacaacgtaatggttttctgtgtgatacgcagaaagccttatcatttattttggataggagaagaagacatgaaagcgtcatttgatgttacattatcacccaaagacctgtatcggtttaatatgtaccagacgtataccgggtttcagggatggagttccattgcacttggaattcttggatttgttatggctggaatcagttttcagaatggaaaaacatcttacaccctgctctatattgcagtaggatttttgtttcttctttatatcccggttgcactgtggtttcgggcaaaggagaccctgaagacaaacaaggtgcttgccggcacactgcattatgaaattacagagaaaaatattcatgtatcccagggaaaagaaactggggatatggagtggcaggcaatttataagattgtagcgaatgcaaagcagattttaatctacagcaatcggaaaagcgcatatattattcctatggagcagattggagatcagtatgcagcgttccggacacttgcagaacagaaactggaaaaatataaactcagaatgaaggcgtagaggcagtatgcaggataaaaaagttatggaatttgaaactttttccccggaggaaactttagagctcggaagaaaattcggaagagaggcacagcctggggaggtatatacccttgtcggggatctgggagtcggcaagacggtttttacacagggaatcgcacagggacttggaattgaagagccgatctgcagcccgacatttaccattgtccaggtatatgaagaggggcggatgccgttctatcattttgatgtctaccgtatcggggatatcgaagagatggacgagatcggatatgaggactatttttacggtgatggtctgacgatgattgagtgggccaatctgattgaagagatattgccggatcattaccgggagatcaccattgaaaaagacctggaaaaaggttttgactacagaaaaataacaattttagacagatagaggacagaatatgaaaatactagcgttggacagctcaggactggtggcaggggttgcagtcacggaagacgacaatctgctgggagaatataccatcaattataaaaaaacacattcacagacacttctcccaatgttggatgaagtcgcaaaaatgatagaacttgatctgaatacgattgatgtgattgcagtgtccgcaggacctggatcttttacgggactcaggatcggctctgcaacggccaagggactcgctcttgccctgaacaaacagattgtttccgtgccgactgtggatgcgctggcatacaatctgtgggggtgcggggaacagatatgtccacttatggatgcgcgccggcagcagacgtataccggactgtatactttctccgatggacagatgcagacacttctgccacagtgtgcggtaggaatcgatgaaattaccgcaaagatcaatgaaagtggaaagaaaaccgtatttttgggcgatggtgtgccggtttttgccgattacctgaaagaaaatttacaggtaccatacctgtttgcacccgcacattgcaataagcagcgcgcggcatgtgttgcggtacttggcggcattttataccagcagggaaaggctgaggatgcagctgcacacaagccggattatctgcgcctgtcgcaggcggaaagagaacgccaggaaaaggcaagggattttcgcatatgagaatacggcagatgaccgcggaagacattccggctgttgcacaaattgaaaaagaatgtttttcccagccgtggagtgaacagggatttctggatggaatgaaagatgccatatttttcgtggcggaagatcctcagatcgcaggttatattggcatgtaccggatgccgccggagggagagattaccaatgtggcagtgacacggaaaatgcgtaaaaaaggctgtggaagagagcttcttcttaggatgcagcaatgggcagatgaacatggaattgaccagatcatacttgaagtacgttccggaaatgagccggcgatacacttataccggacatgtggatttgaaaaaattggagtgcgaaaaaatttttatcagtttcccagagaggatgcagatattatggagtggaaacgattatgttagatgtatgtttgttaggaactgcaggaatgatgccgctgccgtaccggtggctgacatcacttatgctcagatataatgggagcagtttgctgatcgattgcggtgagggaacccagattgcaatcaaagaggcgggacttagctttaaaccgatcgatattctctgcgtgacacattttcacgcggatcatatcagcggtcttccggggcttcttctgacgatgggaaatgcggagcgaacagaaccgcttacgatcatcgggcccaaaggactcacacgtgtcgtgacggcactgcggacaattgcaccggaacttccgtttgagatcaattgtatagaactgacacagccggaagaatctttttctatccagggatatgacattcatgcgttccgtgtaaagcacaatgtcatttgttacggatattcggtggaaatccatcgtgcgggacgtttttcggtggagcgtgccagagaacagaatgttccgatgaaattatggagccgcctgcagaaaggggagaccatcgagcaggatggtgtgatctatgagccgcagatggtactcggaccggcaagaaaaggtctgaaagtgacgtattgtacagacagccgtccgctggataccattgtaaacgctgcaaaagaatcggatttatttatctgtgaaggcatgtatgcagaaaaagaaaagttaaataaggcaaaacagtacaaacatatgacgttttatgaggccgcagatatggcgaagcgtgcagaagttaaagaactgtggctgacccatttttctccgtctctggtaagggcggaggattatatgccacaggtgcgggatattttcgcaaatgcataccttggcaaagatggaaagagtgtggaattaacatttgaggaggaataggcgtatgaagaaagttgggattaccgttgcagcagcagtatgtgttgttttattgtgcgtgggattttatttcatgaaaaacagcgatggttcacaggcatcgaaagaaaatctgacggtggttcagagaatcaatgaaaaaaatctgacggatgattatccgaaaactccgcgcgcagtgattaaactgtataaccagatcattaccagttattattccggaaattatacggatgatgagttcgacaagctgattgatcaggcgcgtatgctttttgatcaggatcttgccgataacaattccaaggatgattacaagaagtcggtggagacaagcattgcggattacaagaaccgttcctttaagatccgtcagaccaatgtatgtgacagcgatgatgtaaaatacctgacggatgacagcaacggggataaactggcatatgtcacagcttcttattttacggaagaaaataaaaagtttgataaaacctaccagatgtatgtgcttagaaaagacgataacggagactggaaaatccgtacattttataaaatcaaggggaattcgacagaggaagaataaaaatgagtgacacagaacagactataaaaatacttgcaattgaaagctcttgtgatgaaaccgctgcggcagttgtggtgaatggccgggatatgcgttcgaatgtaatttcttcacagattgctctccatacattatatggaggggttgtaccggagatcgcatcgagaaagcatattgaaaagatcaatcaggtaatcgcacaggcactttcggatgcagatatgacattacaggatatggatgcgattggtgtgacttacgggccggggttggttggtgcactgctggttggcgtggcagaggctaaggcgatcagctatgctgcgaacattccgctggtaggggtacatcatatagaaggacatatcagcgcaaattatattgaaaatcctgatctgaaaccaccgtttttatgtcttgtggtctctggagggcatacgcaccttgtgaaagtgacggattacggaacgtatgaaatcctcggacggaccagggatgatgcggcaggagaagcatttgataaagtggcacgcgcaatcgggctgggatatccgggaggaccaaaaattgaaaaagtttcccatgaaggagatccgaaggcaatttcctttccgcgggcaaagattgcagatggggtatatgatttcagtttcagtggattaaagtctgcggtgctgaattatctgaacggatgcaggatgaaaaatcttccaattaatcaggcggatgttgcagcatcattccagcagtcggtgacggatgtgctggtggatcatgcgcggcatgcaatccgcgaatatcatatggacagttttgcaattgccggcggagttgcatccaacggagtaatccgtgcggccatggaacagatgtgccgtgaagaaggggtgaaattttatcatccttcgccgattctgtgcaccgataacgcggcgatgataggtgctgcggcatattatgactttattgcgggaaaacgtgcagggctggatctgaacgctgttccgaatctgaaattgggagaatgaccggatggaaaacaggaaacgctatacagcgatcgtacttgcggcaggcagtggaagaagaatgcaaagtgatacacccaaacagtttatggaactgtgtggacatccgctggtctattacagtctgtatgcatttgaaaagagtccggtagatgatattatactggtaacaggaaaagatgatgtttcctattgcagaaaagaaattgtagaggcttgtgatttcagaaaagtccgcgcggtgattccgggcggcaaagaacgttatctgtcagtatatgaaggattaaaagcagctgcgggcaccgactatgttctgatccatgatggggcacgcccgatgattgatgaaacggaaatccggttgtccatgcgtgccgtagaagaggagcatgcatgtgtgattggtgtaccggtaaaagatacgatcaaagtgggaaatgcaaaacattatgctgtggatacaccggacagaagctgtctgtgggcggtacagacaccacagagcttttcttatgaacttttaatggaagcatatggggaaatgtggcaggcagcagaatccggcgaaaggatcacggatgatgcaatgattgtggaacggtttaccgttcataaagtcaagcttgttcagggaaaatacgagaatatcaaggtcacaacaccggaagatttgttaattgcagaagtttttttaaaaaaagcaaaaaaaatgaaaaaatgttattgacataaagagccggggatggtaatatatgtcttgcgctgattcagatgaacagcgaaaacagaatacggagaggtatcgaagtggtcataacgaggcggtcttgaaaaccgtttgtccgcaagggcacatgggttcgaatcccatcctctccgctaggcggttaagccgtttgaaaaagaattcgaaagaattctttttctgtgtcaatatcatagcttctcgggagagaaaatgatttgagcagctatatggagaagtacccaagctggccgaagggacacccctggaaagggtgcaggtcgttaacagcggcgcgagggttcaaatccctccttctccgctttgaatcaaataaaaagattcaaaaagttgttgacaaaaagcgacagacatgataagatatcagagttgccgcgaaagaacgacaacaaagaaaaataaaaaagttgttgacaacgacttgaagatatgataaaatatataagctgttggaaataacaacaacgaacattgataactgaacagtgaaaaaccttgaaagattttgagaataatt

SEQ ID NO: 1013 - DNA, 7671 bp, Unknown
  gut microbiota DNA sequence
aagaagcattcttcaccttcagttcggtcaatttcgatttggtaaaccatctatacaatacttatttgtcttaaatgtcgcatgaaacagattacgcaaaaaagaagtcatttcttcccaataaccgtaaacattcgcttcctgcatcggcgtatcgtattcatccagtaagataattactttttttcatatgcatgctccaaatatctgcacaaataattaagactgtcacacgcggtaatatcatccatttccgccatctctgtcagaatgtgccggtatgccattttttcggattccataagtttttcattttcgagcagatattcaaaatcctgatacagacttacaatccgggatttgacctgtttttttgcatcagatacattatccgcttttaccgatgcaaaactgagatataaaacaggatatgtgccctgaatctgccggtacccggaatctttccagatatcaagtcctttaaacaaatctcccctgtctgcatatttattgggaaaaaagcagttgagcatactcatattaagggttttgccaaaacgtcttggacgtgtgatcagcgtaacatcatccctgtagttccaccactgccgtatgaaatctgtcttatcaatgtagaagcactgactttctcttaatgctgcaaaatcctgtttgccaattccaacctgtttttgcatagttctacccattttccacggttttgtgcgtttcattatttttatttatcatagcagataacgttttaaaatgccaccttctccagatgttttcatttctaaatgcgtctgtaagtatggaggacaaaacttaacagatcccaaagcaattctaaaaaaatataaaaaattttcctttacagttattcaattttaatactataatacaagggattataaaatagtaaagaggcctgccatcatgcagaacataaaaacgattgccggaactttcacgataggcacttatgaaattccaaaacaatatgtatgtgcaaaaacacccacaattacacaaaaaaatgatatctgtgagatcgtaacctacgatcagcagattaccgtaaatggacataactatgctccggtactgcatcaaaactgtatgcagccggagcagattacattatatccacttgtaatccggcaggaacacgcgacactgaccgtgtccgaccgttatcataccggacattggaaatccggggatgacacacagatttccgactggcgtccaaagcttatgcaccggggatgtgtgccatgtaccaattgcggaaggtgttagcactttttatattttattccggccaaagtgtaaccgcagatttattttcacttggtctgtaatatattttacggtcttttatgctaactctatgacatattatttaaaaaacctgaagtgccagcttcaggtttttattttacaacaatttcttatttttttgccttctttgattttgtttcctgtcattaacagaaaaccggttaccatccacaggtttccctgtaaacagtaaccggtaaaaaattttctcacctatttttttcggttttatttccacacttcttccgcgatttccttcacaagtgcaagttttgcccactgctgctcttcggtcagcttgtttccgatctcacaggatgcaaatccacactgcggactcaggcacagacgatccagcggaatatactttgctgcttcatgaattcttgcgatcaccttatccttatcttccagttccggctttttggttgtgattagaccaagtacaacttttttgtccggagacacttttgcaagcggtgcaaaaccaccggatctttcatcgtcatactccaaaagcagtgcatccacatgctcctgcgcaaacacgtaatctgccacggagtcgtatgggccgctggtaaagaatgtagagtgataatttccgcggcagatgtgggaagtgatcaccatatcctccggtctgttttcgagtgcaaggttattcacctttaagagccgagcctttacctcttcaatatcaaccccgagtgactgatatctctgctttgcggcatctccgacaattgcgccccaggtgcagtcatccagctgcagattgcggcatccggctgcataaaactgtttgattacatcctgatatgcctttccgatatcctcgatcagttcctcatcggttgcataaaattttcttgtctgctcaatgttctgcggaacgatcatctgctgatacatctgtgccggtgccggaatcgtatattttgcaacggtctgctcatcttcgaactgctttaaaaacttaaagtattctacaaacggatgtacttttgcttttacctttcctacgagataagttgcttcaagatctgccatctctccgttaaactgtacaccgccgccatctttctcgtgggcaacgccttcaaatccccacataaaatccaggtgccagaattttctgcggaactctccatcggtgatcgcatgaaagcctgctgctttctgctttgcaacgatttctgtcacgcactcatcggtgatgcggtcgagttcttcctttgtgatggttccttcctcaaaagctttctttgcagcttttaatttttccggtcttaaaaaacttcctacaaaatcataacgaaatggtgtctttaatgtgctcatttatccgataacctcctgtttcttttctggtttttgtctgtttgttttgctgaggttatcctaccatctcagagtttatttgtataatacctttctttggcggtttgtcatagtttaaagctatacctgtgtttattgtgtcaggcaccaattatacactaagcgtggactcggtgcatactacgaaccacagtcggatgatgaaataccggaatattcaatagcaatgctttcagaactgtttgatttgctgcagaaattcccttatcaaacagcggaagtcgacggcgtgaaggtaagatactagtatggcgctgtaatgataaacctacaaacccccagacttattttaagagattatacagagaaggattttgaggcatacagcagattgaaaatggatgccgagaccatgtactatctgcaggacatacagttgcattccgttgaggaagccagacgggatttcgcggaagtcctgtctgacatgaaatccccggagcggaaattctatttctgtcacatggagctgaaagacacgcacgaacaggttggcagcatcgggtatacggttgaagccgacactccggtaggaaagcttgtccatctgggctattttacatatccgaggcattgggggaatggctacacctcggaggcattgaagaaggttctggaatatgccttcacacaagacaatgtgtacagagttacaaccgggtgtctggcagagaataagggctccgagagggttatgcagaaaaacgggttaataaaagaagccgagcatattgattatgaatggcacgatggtaaaatgaaaacccgcttagaatatcaattattaaaacatgaatgggagcaattacaaaaaacactttaatttccccttgcaaaccacacgtattatgttataatacatttaacaattaagttaaatgttaagcgtaggagggataagtttgggaatgcaggatacgcttcgcgcgcttgccgatccaacaaggcgcgaaatccttaatctgctcaagaaatcacggctgtctgcgggcgagatcggcgaccatttttcgatttccggtgcggcggtttcccggcacctgtccgttttgaaggaggcagacctgatccgcgacgagcgggaaggaaaattcatctattatgagctcaacaccaccgtgcttgaggagatcatgctatggatcactgaattaaaaggaggaaatgaccatgatcagacaacataaaaaaatgatattactcacatcgattgcgacgctgctcccgatccttatcggattgcttttgtggaagcagcttccggattccgttgcaacccattggagcacaggcaacgaaccggacggctactcatccaaggcttttgcagtgttcgggcttccggtgatcatgctgatcctgcatctggtatgcgtgatcgcaacgaacattgatcccaaggcaaatagcatcaacaaaaaaatattctttattgtcctgtggatctgcccggtattttccatcattgtatgcagcacggtttatgggtataatttagggtatcagtttgatattggttttctttgtgggctgctcatcggagttttatacttgatattaggcaacttcctgccgacggtaaagccgaattacaccattggcttccgcatttcgtgggcgctgaatgatgccgataactggtatcacacgcaccggttcggtggaaaatgcatggtgatcggagggctccttctgatcgtcaccacgccgttccagaatatctgggtgcttatggcgctcgccatcctcccgtgcatttttccggtgatctactcctacatgtactaccgcaaggggcagtcacggtaatactttttattgtgtcagacaccaatggttcaaatacattttaggagaattgctcgtttatcacaagatattagtaaatttataagttgctattaaatttcatagtatgaaaagccacgacctgtactctgatttgagtacaagccgtggctcctgttcttgctgtcttttttcataaccagccgattttccctcagacatctttgcctgaatatcaatgagaaggtgaaagtctctttatgaattttctgatttttctaatggaaaatacaggcagatccgataagactcctccccacattcttcttcgcatctgccctgcatttgctccatcatgatttcaatattatgaaccccaattcccgttcctctatgatcctgttctttatttgccgctgcattcataatggaaaagaaaaactcgtcctgacaaattcccatatccaacaggatttcttttgtcttgtctgcatacttcaaaagattggataacaaattattcataatgcgtccgatataatcataacaaacacttatctttacttcctcccactgtttccatcccagtgtaaccgtatagccatttgtctgcaatacattgcacaattccgaacagtaatcctccattacaaaagctatggattccgacttttccatctgtggctgctgccctgaattgataagaaaaaactcaaatagctgatctgaaagatttttaatctgaatcgcttttcccactgttttctttacataaagtttcaccttatcgtgttcgggttctctttttataatttcaagatatgccattaatgcagtcaatggcgtccgcaaatcatgtgccatccccagaaccagtttattctgtgcctttttcatatttcgttctttttcttccttctccaaaagaactgttttcatatgctccagaccgcgtgccagatctgtcagctcatcctctccttttatagtaaaatccaccgaccataatccatcttccagtttcgctacttccccactcaattgcctgatgtaccgtacatatccgcttacaccaaacgcaaacactccaatccagaccagcacaccacaaagtgccgcagccacatctaccaggatataatactttcgctcacgattcacatatataaatacatctgcattcccatctgtaaacgatacttcttgaaaatattgccatgtatagtgtaattgctctgattttgtacgatccaaggcaactggaagtgcgtaataattatcgtaaagcagcatgcgctttcttgaaatcgtaaaatacccaatatggttttcttttgcccactcccggatacgctccgtgtcggaagccgccagatgatgtctggatacatattcctgaaacattgctaaggtttccttagaaacatttcttcgatacatagaactttcaaaataccggtttaatgctccatttcccataaaaaatataagcaaaaacaacagcagtgcaagaaaaaatcccaacagcagaattccgatcattttttccatcagatgttttctttttcgtttattcaatgcggtatcctttcccccacaccgtttgtataatttgcggtttctgcggattcttttcaattttcagtctcaatttccgaatatgaaccataacggtatttgcagaattattgaaaaacggctcctgccagacgctctcatatatgttttgtacggaaaaaatttttcccctgtatttcagcattaatgacaaaatttcatattctgtttccgtcaggtaaatctcctcatcccctgaaaatactttatttcctgtagtattgatcttcagatctcctttttttatccacacattttgtccattttctttcatgtttccacaagtataaacctgttttcgacgcaacaatgcctttatccttgccagcaattctgcataagaaaatggtttcaccagataatcatctgccccggctgtaaatccgataattttatcattctcactgctttttgcggtcaaaaataaaatcggcacataggaaatcttgcgtatttgttcacaggttttgatgccagaaatcccaggcatcataatgtccaaaataacaagatccgtatcctctgaaatctggtgcagcccatccattccattatccgcttcaattacatgaaaaccctcgttttccagcaatatctttacgctttcccggatatcttcatcatcttcaataatcaaaattgttatttcatccatattttctcccatttatcaagcattatttaatttatatagtattgtaccatatttttataacataatatcactctgtaaaaatgttaagatttgttaagaaatattaagacttattttaaaacatatatgctatgattaagctatccgtttaggaaaacaaaagaaaagagaccgtataatgaaacagaaaaaaaagaaacgcaaaagaaaaatttttctaccattatttttaatatttttcatcatcatcggattttattcccatcaatcctacgaaacagccatgcacgaacaactcccggattctcttatcgagtttgagcaaaaatatccggaagcaaccgattttgtagaaaattatcacaaatacaaaaacaaatcctttgaccttgatgtgtcacacgaagtaagaaaagacaacattcctctattcatccagtgggataagcgatgggggtacaaaacatatggcagcaatttccttggtgtcaacggttgtggtccaacttcactttctatggttatctgcggattaactggaaaagcaacgtggaatccttataaagtggcacaattttcgcaaaaacagggttattatatcagtggacagggcacttcgtgggatctgatgactgcaggtgcaaaaaagctgggccttacatccacagagggaaccataaataacgattatatccggcaaaatcttacctcatccaccccgatgatctgctccatgctgcccggagattttacttatagtggacatttcattgttctcaccggcatcgattccaaaggacgcgttgtcgtcaatgatcccaacagccccaaaaacagcaaaaaacactgggatatggatc

SEQ ID NO: 1014 - DNA, 11128 bp, Unknown
  gut microbiota DNA sequence
aggaagccaatattagcaggatgcattaaatatgtttcctgcttccaaataggagggttactatgaaatatatttatacagctttgtttacacctatcgaggacggatctggatactacgcaaaagtccctgatcttcctggatgcatcactactggcaatagtctttctgatgcaattgaccaaattaccgatgcaatgagcgcatggcttgttgttgcagaggatgaaggcgaaccgattgctcctccatcaccacaggaaaaattaagtgttgatgccggcacaatctgttccctgatttccgcagataccattgaatatcgtgcccagacagatactcgcgccgttcgaaaaaatgtttctcttccaagttggatggtccgtcttgctgacaagcgcggaatcaactgctcacaagtccttcaggatgccttacgaacacttcttgataactccactatcgcacatactcattaacattatcccttaaaaaccagttatctatatgggtaactggttttctcataaaacaaaaactgcctctccatcaaccataacacggttatttactatcttgaaatgtggagcatccctgcctataaccataaatataaaaacgagcagcaaaaccggatttacaccagtctgctactcgtttgatgattataatattttcttttcttgtgccattgcaaccagttatcggacaaatggcaggaacgtaatgctatactttattttccaaaccggctgatttctttcgcatatgatatttccgtttttcctcatacattttctcatccatatgcattaaaaaagtttctgcatcatcttctgtcccaaattccgtgtatcccatggaaacacttaaatgaaacggttctatcccggattcattaaaccgggacagattatggttaatctcctccattgtcgctaagacacgctccgtatcaacacctgacagcagcacaataaactcatctcccgcataccggattgccataccatcatccggtatggatctgatgagtatatttcccaacgtacaaatagccttatcgcccgtactatgacctaaattgtcattaatacacttgaaatcgtttacatccatcatgattccatataaggatttatggcttgcaattttcttttccgcaagcaccgcattaaaatatcttcggttatataatccggaaagctcatccatatacaaactctctgcgtatgactgcatctgcacaaatatcaatgcgaccgcaaccagcacccatgatgatgtaattccataaaaaaggaactggagaactacacctgcaaaacaaggaccaacgaaatagatcaccgggaaaaaattcaggttaaccccttgttttttggaatgatacaccagataaatactgtaagcaaaatatatgacaagcgaaatatatcccaccagcacaccggcagttctctgatatacattctccccggatattttaaacataatccctgttccaaacagattacataaaaccataattacttctaccagccagggaaatatctccactcctgctttttgaaccattcttttataatttcgatagatacgcaattccacgtacatacaccaaagcatacccatactgactgtccctataaagcatatgctgttagagatataattaatctgccggctgccagtaaactgttttccatctacgagaaaagcaatggtttcagacaatgcacccactaaatttacgattgctattccatcatatattttatctcccacatgaaggctctctctgttctttcgtctgcaaaacaaaaggaaccacatcattaacacggtcaagccgtttgccattaatatttcttctaaaacgatgattgttatcccctccatcattcacggtatgaactcatttttactaaaatgagctctatcattataccaagttaaaaccggtttttgtctttttcgacatgaattacagtttttttaacgtgaacgatgattttttatgtttcatcacttttcacaacctactgcaactgtgaaaaacccacggcttacaaagttaacagtctttgtatcggaatcataataagatcccggtatcttaactgctgcaccgtatttatcaattttatatgcaaaaatctttttgtctttttcctttttcgaagcattataggaaacagcgaccctgatccgtccctttttcaggacagacgactgctttttctttattcctgtgacggaaaaatcataaaccggacgttttccaataattttccctgccctggcagaaagatttttcttgtcaacctgtttcattttgataaccacagctgtattcatttctttctttaattcttttaatgccttcgaatcaaaggtaagatttacattgccaccattgaccttcaattcttttacattctttttgacaagtaaatttaccgcctgcccgtccatttcaagatgcagattcttccagtttccggcttttgccgtatcaaaagttatttcaacagacaggtcttttatcctgccaccctgttctttttctgcctttgtaatttcttttttcaaaactgctgcaatattcttcactttgaccgtattatttttaactgcagtttttgctttgacattaatatccttaacagaaacggacgtatctgctgcgggtggcggtgtcacattccccggttcttcttttgcatgatccggtgccggtaatgtgccggaatccggtgaaacattgccagatgatccgtccgtgcttccaccggcattttcaccggaacctccgccggaactgcctccggaacttccaccagaacttccgccagaacctccacttgaaccgcctccggatattccgccggaacttccaccagaaccgcccccggtctgggaatgatctgccgttacacggacctgacaatctgccttacttcctgtatagttgccattcccattataacatgcggtgaacgtatatgttttcgtttcattcggaagcgttgccatccagtgatccgttcccttttcttctaatgtgatcccggaaacatcacaggttacttttatcccggcatcttccggaatcccctgtctgcaaagctgtaattctactgtccccgcacctttgaccgtatcgttttttgcagtcagctgcatgctggtggaagccttttcgatttccaggacagcctccccgtatgttggaataaaagatgccttttccgctttaaaataaatcttatactggcctgcttctgtgtaaaatggcatctccgtttgtgtatacgatccgttttctgtcaaactgtaactgatttgtacaccatcttcctgtttgatatcaaatgtatggggttttccatcataagttacgcggacaggtacggtttgtatttccggcatctcactgtttttccggtaataataagtgatctcctggcgatcctctgtgatgtttatttctccctgatttgcactgtttcctacacatgtatatccatataaatccggacttcttaacgtatacgcagaattctttggtacatatactgtcgcgggtgccgtatcaggcactgttgtttcggtcccgtcttcgttttgcagcatataacgaatggttacggtactccacgcctgtcctgccgtctgattgtcagccagaattttcccagtatcctcatctatgatctttccttccagtctgtccccggaaaccagaccagttaccgcaggaagtgtgacagaaagggactctctggcagcatccggatcataccagttactgtgtggcggaacggtatatgtttcttctttttcatatttgactgtattgtctgctccaataatgcggaaagtaatcttcaaatgctgtttggcatccactatattttgtacgactgtacggaattccagatcctttccatttgcttttgtgatatttgtctcatcgatccggtattggtcactatccctgtcaagtgttcctgtcctgctatgcggaattgtaatttcaggatcgcacacataaacagatgcctgcctgctgacataatcacggttatttaatctccgcgccagttccattttgcacacttcacagaaaggattcccaagatcccgcatcatgcagacgcggcttggtgcaaataccgtttctgttcctgctgccgttattccgattccacggaacccaagcatcttatgccatttaatcttatccggatccgatgtgtcggaaatattttctccctgcatctttttatcatattcatcgcctaatcttccgatgctgtgggaaatttcatgggtcatgacatccccctgctcattctcacccgaatttgccgaaaaagaaaagagtgcattggaagaagaaccaatattcgcagtcgtattacaaatgatatggatggttccaacggctgcaccggtatccagatatctgctctccagctctgccctcagtgccctggctttatcttccccgtcctttgcaaaatagcaggatttcccgaatgcctgcacatgaaaatatgtgtccgggttcgactccccatacatcacgcccacaccagtttcattggataccgtctgtactgcataaatattgatcctgtcggaatactctttataaggggaccactttagcagcccctgtgcttttgccgttgcatccttcaaaaattgttcctgttgttcccgggtatagccctcacccatgataacaatcacaaaattttccttatcatcacctgtcttgtgaatggcataaacggaagctgccgtcgtctggtctgccgctgtctggtctgccatcacaggatatggaaacaccagggaaaacaataatatcaggctaagtacgattgccccaaaccattttccatccttcttctttacattcgtcatatcatcctccatactttacattaccagaaatactggtgctttccctattcttcccacagacaaactcccgggaaaccatctgccgtaaggcttcttaaagcacgattaccgcagcatcaaacccctctacatttccatcaaaggtgttttcggtaagcagattgtacttctgcgtgtactcattaaatttttttgcactgctgctgcagttgaaaatcatggcaatggtctcttcgccattttttctgatcaggacaactgtcccttcctcatcttctgtgacgctcccagccagttcgccttctacaatacatgcatggcttttccggacctgaatcagccgcttgtaccattcatacatctctttgtcctggtattcttcatcccagtacatgccccgtctgcagtccggatcgtttgctcccggcatcgcatactcatctccataataaatcatcggcattcccggcagtaacaactgaaaagcggctgccagatgctgctttttcttattgtcgttacacagatgtaaaaatcttgcggtatcatggctgtcaatcagattccacataaggggatagcagtttttgtgtaagcgtcccttcaaatatccaagattttgtacgaactggctgaccgtaatcttttcgtctgcaagcagatcgatcaggttcaggtaaaatggataattcatgactgtatcccattcatccccctcaaggaaatctcctgcataatgccagatttccccaatgatcagcatatctttcttcacagcctttactgcctttctgaaattcttccagaagaaatggctgatttcgtctcctacatccagtctccatccgtcaatatcgcattccttaatccagtagcatgcaacatccgtaatgtatttttcaacttcaggatttttcaggtttaactttggcattccgccataataaccaaaacatttgaagtttgggatctctccccattcgcttttaagtgggaatccatcaataaaataccagtcccggtatttggatttttcaccattttccaggatatccgcaaacgcaaaaaattctcttcccgtatgattgtataccgcatccaggactaccttcataccacgctcatgcgctttttgtaccagctctttgagatcctctgttgttccaaaggacgggtctatctggtagtaatccgtggtatcatacttatggcacgaatttgattgaaagataggtgtcatatacagcacatcgattcccagattctgaatatcatccatatgttcgatgattcccctgagatttccatgcaggtcatccataggcgtaatcggtgctttataccacagttctttgtctaccggctccgtagctgcaaaacgggatgggaaaatctgatacacgaccttgtttgctgcccactccggcacctcaaacatctcttcctcccggaggttctgcggacagtcaaacattctgtccctgtttgtaatgcattccttatcaaactcataatttccataatataccttttctccctgcgtgtccgtaaattcgaaaaagtaacgcagacagatcaaatgcatatttatctgtgcttcataataatcatgaaactgtgagacagcaaccttcttcatcggaactgtctttctggtatccttacgctccataggtatatacttgtcctcatagtgaaggattacctccttcatatcatccttttttacctgcacgcgtatcacaaataaatccttatcaactgcatagctaaaccttttatccatatcatgaaaaattgctgaatattccataaaatttcccctttacacttgttgttttcctgtattttaacttacttttttcaacaattctagcactatatccacgatatttttaactttttctacttttatgcttttttgcgatgatattactattcatataatttaaaatgtgcgttatcagtttaaaaccaataacgcacattttctcattgcatccttttcccgcatttatatatgtcacaagtcaaattatagttcctacctgcgacaactttatatgtaaattcaacatcaataattttttgcaccgtttttaatttttattttctgcaactttaaatttctggatcatttcacgcagattttctgcttcactgctcatctcctgaccggctgctgcacattcttcagatgttgccgaattcgtctgtacgacatcattgatctgttcaattccatcattaatctgttggatttctgttgtctgtgtctctaacgtttctgcaatatttgtgacttcttttgtaatgatctgggaattctcagcgacctcctgcaattgtgatgccgtctgccctgcaatcaccatacctttttccacggctttcacagaggtttcaatcaatgttgcggattcctttgctgcctgggcactctggtctgccagcacattgacctgattcgctaccactgcaaatccctttcctgcctcccctgctcttgcagcctcaatggaagcattcaatgcaagcagattcgtctgggacgcaatttcattgattgttgcaatgatcttgtcaatctcttttgatgccccgttgatctcattcatggaatcaaccatatccctcattttaccattgctttccagaatggcatttccaagttcgtctactcttccactgatttcttttgcggattgtgaattttttcctacctgttcagaaacacctgcgactgttgcggtcagttcttctacaactgctgcctgatttgttgctccatccgcaaggtcattggaacttgatgctacctgatctgcggcacccgaaacttcatctgaaacatgttggattccctttattgtctctgccatgctttcttcaaacaacataaaggagtttagaattccaacgaaatcccctttccactctacttccggctgcacatcaaaatttccttctgcaaacatcttcattgaacgtccaatatcatctacatagcttcccagaatgcggatggatttgcgcatattgtgtgccagtattccaatctcatcatctgaatggtagtccagcgtgctgtgcaggtttccatctgttaattcctgtgcaacggcttccacttcacgtaatggtactaaaattgactcaagtacttttttgcctgtttttattgccagtttccatgccaaaaccagacaaataataatacacacaattcctgccactgcagaaataaccgtaattctgactgcctggctgcttacctcatcggtcatttcatctaatcttgttgcaatttttacggctttatttaatgccggggtacaatcattcagaattgaatcaactgccttatccttgtcaccgcttttgatttctttcatgatggaataaccaatgtttccccagtctgtaagggcagatgcgtattcttcacaatccgcatccggaataactccggagttctttaaatttttcagttgggtattaacttctgcaagcagtctttctaccgtctgctcataaccgtcataagaggatgtatcattatttaatgccatttccctgatatttctcgctgatgagttaacatttatcctgcagattttcaccgcccggtctgcaacagtaacattttgtacataatgcatcgtattggcaaatagcatacctataaccacaatagaaaacagacctgagactaacatcataataatgacttttctgtagccatagtttatcctttccttcagatgtaaattttccaagttctttttcatcatatttttctttgacggcatagtttgctatttcctttctcttttgttcgattctgatatatcaaatttttttctcaaagtcaataaatttcgggaacaattttattattctatttttcacacaaaatgttgtacccatccaccctgaaaaatacagcacttttaccaattttttctacagttacctctccgatcgaacgtgatgtaatctggaatgtcgtgccggtggttccctcgtaagagtcatactagtacataactgaaaatactattgtctgaaacaccctctgttttcatatatggcatcaggttcttccaaaacattctctaattgtctttgaaatatctgaatcaataaaatctttatgtgccatgtcatcaaggatatcacatgttttttcatgggacaatccctttttataaggtctgtcttccgtaagagcctgataaatatcaacacatgccatcatacgttcctgctcatttaattcatcagcggtttttccaaaaggatacccttttccatttaatttttcatgatggaaagccgcccaatctcgtatttcttcaaaatcattaacctccgataatataaggtatgtataaccagcatgatttttcattgtagaaaattcatcatccgtaagcttatccggtttttccagaatttcattgcctaccgccatttttcctatatcatgcagtgcaccagccaaatacattttctgtaccgtgattgaatcatatcccatatatttggcaagcagggaggctttttcagctactcctatagaatgcctgcttgtaaaagaagatttataatctacaatctttgcaaagaaatccgcaacatttttacacatttcccaatcaaaaaccattttttctcttggaataatttcccatagcttcgtttcaaaagaatcatcacttaaacacatataggattcttttgtgaatacatgaagaaaagcattaacacattctgaatcaaatagactatcctttttttgggaaagatactgacatataaaatcccatctattatcatcagatttaatactatttcctatgatatcaacggtatctgcaagatgaataattcttgcaggcaatggggtttcattccactttttttgaaaaggaccagttccatcggcatgttcatgatgatacaaaatcacatttgagacatctgttttaaaaggaagtttcgtaatatttttttcaccataaatacaatgaagattcgtttttcttacggacaaatcttttttaatgtcaataacataattcctttccagctcttccgtaatatattgtgtcaaagcattatcatgcagtaaggcacacatagctaaatcttgtaacgcatcgccttgaattgccagatattcagccatgcatacacttatataagccactctttttccatgcttatttttgatttttaccaactctgcttctatacagtccaaagcataggaacaggctcctgcaagtccgacaatatctattcttagttcttctttcattggtataatcctatcataatacatttatgcttctgagaactggtcttttcctacaaagcataacggacattcaaaatcttctggaatatcctcccactttgtaccaggtgcaataccaccttctggatagcccttctcctcatcgtattcccatccgcaaacatcacatacgtatttcattcgttgttcctccttgtaaatatattaatacacagcctatattactgttatatttgtgttgttctttaaccttaatatgtataaatgcttttagcatttccataatccatgcaggttacaatatgcatatacttcttcctcagctgttttagcaaagccatcatacatatctgtccactcataattttcgccttctgccgctgccgccaggttttcctttgtatcaccaattcctgctaattccttgaaccacatctttgcatgttctttctcattatctgcagtctttaaaaacaatgctgacatctgctcgtagccttccttctatgctacagatgcaaaatatgtatatttatttcttgcctgggattctccggcaaatgcctcctgtaaatttttctctgtctgtgttcctgcgtatttgttatctgccatttattttacctccgttttctttacaactttttcaaaatctgatgctgggtgcttacataaaggacatataaaatcatccggcagttcttctcccacatattcgtatccacagattctgcaacgccatattgtctgaccatcctctgctttgccaacctcctccggcttaggcttaatgttattctggtaataatcatatgtagctgaaggaatattacttattacttccatatcggttatctcccc

SEQ ID NO: 1015 - DNA, 225 bp, Unknown
  gut microbiota DNA sequence
tcagcacattatctttgtcttttaagataaaatccgcattccgtcctatgatcacacagctttccttttccgcaatctccaaaatcacttttctctgcgcttcatacaccatattctctttaaaaatacatagccggccagacacgcgataaactctgtgatcgggaacgcccaccagatcagcgaaactcccatctgtccgtttcggacgaaaatagagaaaat

SEQ ID NO: 1016 - DNA, 320 bp, Unknown
  gut microbiota DNA sequence
tatttgtaatacaaaagcaataggaaattacacggaaagtgataaaaaatatggaggtataatgtttattgaaaaattagaaaagataatcaatgaaaaaaacataacaatgaatcgcctagcaaaaaatgcaggattcagtcaaacaagcacagacagatggaaaaaaggaagtctaccaagtgtagaagcactaataaaagtatgcaaatacctaaacgtatccgctgactacctactagatctggacaccggagcaccgcccccaatcctaaccgatcaagaacaagaactgttggaacacttccgacaatgcgatg

SEQ ID NO: 1017 - DNA, 2092 bp, Unknown
  gut microbiota DNA sequence
cgttttatgttaaattattcgtaattttttgttttgttgctaattttaatacatatgatgtatttgtgtttatattatggagatgaaatcaggtgtggcgcttttgttttttttctgctatactgataaaactaaatttggaaaggaagtatgaccatgcggattcttcttgctgaagatgaaaaggatttaaatcacattatcgctcaaaagctgaccgctgacggttacagtgtggactgctgcttcgatggagaagaagcgattgcggttctctcatacaccgactatgacgctgtgattcttgatattatgatgccgaaggcggatgggtatgctgtactggatgcgttgcggcgcatgaaacggacgacgccggtgctgtttctaaccgcaagggattctgtttccgaccgggtgaagggactggatcggggtgccaatgattatctcgtcaaaccgttttcttttgaagaattgtccgcgcggcttcgtgcgatgatgcggacttctttcggtgcctccagcaatgttctttgtatcggggatttgtcgatggactgcagtgcgcacacggttgcacgaaacggaatggaaatccatctgtccgcgaaggagtacgctctgctggaatatctgatgtataatcaggggcgtgtgttgtcgcgtgaaatgattgaggatcatgtgtggaattttgattatgaaggtgggacaaatgtggttgatgtctacatcagctatctccgcaggaaggtggacgatggctttgaccgcaaactgatccacactgtccgcggcaggggttttgtgctgcgggaagaggtctgagggcaggggggtatcgattatgaagaagtcatttatataaggaaggaagttggctattgtgaagaaatcgcctgttaaaaagaggttacctattcgaaagaagttgtctgtccgcttgaagattacggtctggtttactgccgcatcgatcgttgtcgtgctctttgcttatctggctgtttttgcggtaagccgtcagattttgatcaaaacgatacaggattgtctggtgcaggcggtggagaataatgtggatgaggtggaataccttttgccttccagccaggcgctgaaggagcaacggtacgattatctgatacggcatggttcgggatatctggatatcgatgatgattttctgtgtgaggtgaatgaggtatacacggggctgtatgatgagcattcggggctgctatacggaagtgattccgcgttttccattgtgtccggaatgcgttttgaggattcccggattcagaagctcctctctgatggtacctggtactatgtgtttgaccgcaagctttcggaaaacggtctggacgatttatggcttcgcggtatggtgtcggaggagcagggggagcggcagatgtccgggatgatccgggctgctgtgattcttctgccactctgggttgtggcggcgtctgttggcggatatctgatcgccggacatgcattgaaacctctccagaaaatttcgtggacggcaaaacagatcagtgagggaaatgatctgaaacaacggattgatatcggcgaaggggatgatgagctgcaccagcttgcgtcaacttttgacgagatgcttgaccggctggagctggctttcgagcgggaacggcagtttacgtcagatgcgtcccatgagcttcggactcctatggctgtgatttccgcgcagtgtgactacacgctggaacgggaacggacgaccgaagaatatatggatgccctgctggtgatccgcaggcaggggcagaaaatgacgaagctgatcaatcatatgctggattttgcccggctggagatgcgctccgggaagtatccggacgctttcgttgatgcggcggagcttgtggaagcggtctgttcggatatgaagcttatccgggagcgtgggattacgttggagtatgaaacgaaaacggtcatgatttcggtcaatccggaacttttttcgcggctgttggtgaatcttgtgagcaatgcgtaccgctatggcagggaaaacggacatatccgggtgcggctctgg

SEQ ID NO: 1018 - DNA, 21562 bp, Unknown
  gut microbiota DNA sequence
tctaataccagaatcatcggttttctactctgcatactttctttccccatttgcatattcaatgtaagcttgtttctttttttcatcataacccgctattggttttttacaaatttttgctttatttattgctgccttaacagcttcaactgctctttcgtccatttcattatccgattctgtcaatgtacttttctcttcttctctggatacaacttttataattctaccactctttgtgcttacagttgtcatataaacatctctccttaatacaaaaatagcttctcaattataatatatattatcacattttatataaaaaaacacctcggaaccgaaattccgaggtgtaacatacatttctgaaacgccataaggcactttgaattgtaactcctatctctttgagaactgtggtgctctacgagctgctttgagaccgtatttcttacgctctttcatacgtggatctcttgttaagaatccagcagccttaagagtaggtctgtactcgttgtctacctgaaggagtgcacgggagataccatgacggatggcaccagcctgtcctgagtatccgccgccctttacgtttactaaaacgtcaaacttgtcaactgtctcagttgctactaatggctgacgaacgattacctttaaagtctcaagacctaagtactcgtcaatatctcttttattgattgtgatctttcctgttccaggtactaaataaactctggcaacagatgattttcttcttcctgttccgtaatactttgtattagccaatgttgtttacctcctctgattagaatgttaaagcttctggcttctgagctgcatgcttgtgatctggtcctgcgtatacaaataactttgtgtacatctgacgtcctaaaggtccctttggaagcattcccttaacagcgaactcgatgacacgctccggatgcttgttgagcatttccttaagagttgtctccttgattcctccaacgtatcctgaatgacggtagtataccttctgatctaacttcttaccagttactttgatcttctcagcgttcacaacgattacataatcacctgtatcaatgtgtggtgtgaagattggtttattctttcctcttaatactttagcaacttctgatgctaaacgtcctaatgtcttgccttcagcgtctactacataccactttctgtcgatggtagcaggactagccataaatgttttcatgggttctcctccttgatagatattcaaatcaataaaatgcgaacagtttcaagcctcgtatgtccggacgctgctctttcctgctctgcttttctatatagtttaaatgctcgccggggcttttggctcacatttacatactatcacagacctatatattatattacccgggtcttttgttgtcaagcagatttctcgtgtaaatccccatttttccacctttatccacaggttctgtaaaaaatgccatctatatccacaatcaaaatctattttttgacatattcaacaaatcaacacaaaaatgatcctattccgtggtttattcgtactccagcccgatcattgtcagtccgtgtgcaggagccgtcggtcctgccacactccggtcacaggcatctaaaatcgtctgcatctcctgtggggcaaactctcccgctcccacctttatcagtgttcctgcaatgatccgcaccatattatacaagaacccatttcccgtcacccggatcgtgataatatccgcttctttcgtgaccgtacatgcatagatggtgcgcacgctggttttcgactgtgcattgaccgcacagaaacttttaaaatcatgctcgccaaccagataatccgcagcctcctgcattttctccacatccagcggataatgataaaaatatgtatccagccgcctggtcggcatgcggaaccgccggtttagtatccggtactcataggtctttcggcttctggaaaaacgtggatgaaaggtatccggcacttcgcaggaatcctgcaccacgatatcttccggcagcctctggtttaatgcgtagctgatcttctccgccggcatacgggtatccgtatcaaaaatacagacgtttcccagagaatgtacccccgcgtccgtgcggcttgcgccggccacgcggatgtcttccccaagaagcgcctgcaatgcttcatttaatttctgttcaatggtcacaccgttgggctggatctgccagccgctatagttggttccgtcatatgcgacgaccatttttactctcatatttcttaatcctgttctgtcaaatttcctgttttcagatgatttatatgctgctgccggcggtcaccgtcctgctactgtggccagcgcaacagcactcgtgcaacaatcacaagcacaagaaatgcaatcaatatcacataggctttgcggtctgttccctgatagcgcagcggtttcatctttgttcgtccctctccgccactgtagcagcgggcttccatggccatggcaagatcgtccgcgcgacggaacgccgatacaaataacggaatcagaagcggcaccatgcttttggctttctggatcagattgccgtcctcaaaatcggcaccacgcgccatctgtgccttcatgatcttgtccgtttcctcgatgagaatcggaataaaccgcagggcaatggacatcatcatcgcaatcgcatgcaccggtatgtgaatccggttcagcggagacaatgctttttcaagtccatcggtcagctggtttggcgtcgtggtcagtgtcatgagagatgttccgataatcagatagatcagccggatcgtcatgagcaccgcattcataatacctgtactggtcagatgaaacggtccccagtgccagtactccgtaccggtcggtgtaaagaccagattaaacactgccgtaatcaaaagcagcaccacaatggcttttaacccttttacgatatacgaaaacggtacttttgaaattttgatcataaaaataagcataccggttatgatcgcaaatcccaaaatgccctggaacgtaaacagcgcaataatatatatcattgtcgcaaataattttacacgcgggtccagtttgtgtacgacagaatctgccggataatactggcccagagtaatatctcttaacataaatttctcctgtgctctgcaaacactaaatgacgtttttctcccgaagtgccgacagaattgtctgtgctgcttcttttgccgtggttgcctgtgtatccacaggaagtccccgttccgcaagttcatgtaccagatacgtcacctgcggcgcagcaagtcctaccgcctcaagctccttataatgcgcaaacacctgcttcggcaaagcatcaaacatcacggcaccgtgattcatcacaatgatgcgatccacatattccgccacatcttccatactgtgcgataccagaagaatcgtgattccaagttccctgtgcatcttagaaaccagtccaaggatttcatcacgccctgccggatcaagtcctgctgtcggctcgtccagaatcagcacatccggtttcattgcaagtactccggcgattgccacacggcgcttctgtccgccggacagatcaaacggcggctgataaaataactcttccggaaacccgacgttgcgcagcgcttcaaacgcccgcagttctatatccctgcgatccagtccctgattcttcggtccaaaacagacatcctcaaaacaggtggtctcaaacagctgatgatccggatactggaaaaccagccccactttgctccgcagggctttcatatcatacccttcatcatagatgtcctgcccatccacatagatgcttcccgatgatgcccgcagcagtccgttcagcaactgagtcagagtcgattttcccgatcccgtatgaccgataattccgataaattcgccctgatgaatctgcagattgacatcctttaatgcctgaatctcataagcagtaccgtcgctgtatgtgtaattgatcttgtctaaaatgatttctgccatctttttatctcctgcctgtgcgcatatctttgtctaggcatttgccacggacataatcgcatccaccagctctttcctcgtaaggattccctgtggaatcggtacgcccgcgctgcgcagttcatctgccacaagcgttgcctgcggtacatccagacgatgttctttcagctcgtccacacgcgaaaaaatatcgcgcggtgtaccgtccatcacgatctttcctttctccatgacgtacacataatctgcgtcaaccacttcttccatataatgtgtaataagaatgatagtaacaccctttttcttattcagatcatgtgcggtagcaataacctctttgcgtccgttcggatcaagcatcgctgtcggctcatcaaagacaatgcatttcggttccattgccacaacaccggcaattgcaacacgctgtttctgtccaccggaaagtttatttggagaatgtttgcggtattttcccatatccacagcttctaaactctgattgacacgcgtccagatttcctctgtcggcaccccgatattttcgggaccaaatcccacatcttcttctaccacactggcaatgatctgattgtccggattctgaaataccatcccggcagttttccggatcggaatggtattgtcctcatcgagtacatccattccatccacccagatcacgccttctgtcggtgtcagcaacgcattgatatgtttggcaagtgtcgacttgcccgatccgttgtgtccgagaatggcaatgaactgtcccgcttttacatccagatttacatgatcgagtgccgtcgtaatagactcaacattgccttcctcatctctgcgtaaaaattcgtgtacaacattttttgctttgataattcccattttaatcgtcccagctcagtctgtgaagctgtccttccagcttcatatggtcaaaatcgttctggcgcagtgcctcataaagcacaatggcaacagaattcgataagttcaaagaacgggtttccccgatcatcggaatacgcacacaggtatccggattcgcctttaagatttcttccggaattcctgcactctcttttccgaacataatgaaacagtccggttcataatggacatccgaatacacatgacgtccttttgttgtcgcataataaatttttgcacccggatttcttttacagaaatcctcccagttttcatatacggtgacatcaagatctttccaatagtccatgccggcacgctttaaatgtttctccgataaagaaaaaccaagcggctcaatcagatgcagctttgtaccggttgcgacacaggtcctgccgatatttcccgtatttgctggaatttccggctcatgtaatacaatatttaactctgccatttttaattcttaatctcccgaatctccgttacaaactcagccacgcgatccagtgcaatccgcagatcatccagggaatatgcataggatatacgaaggaatccctctccgcaggcaccgaacgccgtacccggaacaaccgcaactttcttcgtctgcagaagttttgttgcaaactcatcactggtcatacccagatccttaatacaagggaacgcataaaatgctccaaatggttcaaaacaggaaagtcccatctctttgaaccgctccagtacataacggcgtctgccgttgtactcttcccgcatcatggcaacatcttcatccccgttgcgcagtgcctctaccgccgcatactggctggtggtcggcgcacacatgatcgcaaactgatggatctttaacatctgtttgatgattacttccggtccacatgcataaccgagtctccatccggtcattgcatgcgatttggaaaatccgttgatcacgattgttcgctccctcattcccggaatggaggcaatggatacatgattgtccagataggtcagttccgcatagatctcgtcactcaggacaaacagatcatgtttctttaccacttctgcaactgcttccagatccttcttttccataaccgccccggtcgggttatttgggaaaggcataacaagaagctttgtcttcggcgtgattgcagcctcaagttcttctgccgtcaggcggaattcgttttctgccttcagttcgatcggaaccggtgttccatttgccagtacacaacaaggcacataggatacataacttggctgcggaataagtacctcatcttgcggatctaacatggcacgcatggcaatatcaattgcctcactgcctccgactgtcacaagcatctccttgttatagtcataggaaagcccgaatctccggtcaagatatttggaaatctcaatttttaattcctttaaacctgcatttgaagtataaaaagttcttcctttttcaagggaataaattccctcatcacgaatatgccacggtgtatcaaaatccggctctccgacgccgagagagattgcatcatccatctcactgacaatgtcaaaaaatttccggatacccgatggctcaatggttgtaattgtttttgataatggatttctcattatgccatcataatcctttcatcttttgctttcggagccataacagttccgtggtctttatatttctttaaaataaagtttgtctttgtgctgagtacctgatccaaggcagaaagcttatcggatacaaactgggaaatctcacgaagtgtcttcccctccaatgtaaccatcaggtcaaatccgccggagataagatacacggaatttacttccggataattgtaaatgcgctctgcaaccttatcaaatcccatgccgcgctgcggtgtcacacgcacttcaatcagtgcagttactttttccacaccggctttgtcccagttaatcagcgtatgatatccgcaaataattccctcctgctccatagcttccagctcattcatgactgctgtctcatctacaccgagaattacggccagctcctgtgtatcgatgcggctgtttttttctataaaagttaaaatcttctctctcatattttattgttctcctaattacattttaccatattccataattcgtctgtctgtgttgtttctaagaatctgcgttcctccccattgataagtacacggtcattgctgtcgattgtccttccgataataacagcttcctcgccagcctgacggatcgcatgcaccagtgcattgccatctgccgctgccagaagaagactgcctcccgacagaagtttgtaaggatttaaatcaaaaaattcacagatttctatggtttcctgacgaattggtattttcttcagatcaatttccagtccgacgccggaacactgccccaattcccagagagctccgaaaacgcctccctctgagaggtcgtgcattgcagcaacgccagactttgcggcgactgcggcctccgaacggatagaaagataatctatatattttgccgctttgtcaagaaacggctgtgcgtatctggccgataactcttcccggtgttccgttgcaagaatcgctgttccttccagcccgacccatttggtcacaatcacatccatatccggctgcgcccctgctgctgtgacaaataattccctgtcagcttctcccactgcctgaacaatcagttgcggagaggtcactgtccgaagaacttccgtgtgtcctccgagaaccggaatctgctctttctcacttacacgggatactgccgaaatccatgcacgcagatcattttcgcttgcggatgtcgggagcagaagcgtcatcgtaatccccaatggttttgccccactgcatgcaagattattcaatgccgcataaacgccagcctccggaaacgtgtcaaatgcacggcaggcttccgcagtaacgatctgctttcccgcagaagcatccactacaccgaaatctattcccactcccggtgcccggaccgcagaattatgaagttgtcggagaaccgagcgctttaatatcgactcggataattttcctgctttcatactgttattttctattcgctttctttggacgattgtgtttttttcgtggatgtatttgttgaagatgttatttctttcttggtatcctgttttttggaatcttccttcttcgtatcttcctttttattattttcatcctttttggaggaatcctctttcttgttcgtatcgctcttgtctgcgtcctcctttttatcggtatcgtccttcttttcttcttctttctgctcttcttctttcttttgcgcgtttgtctttaaaccggctgccgcacttcttacttttgcttcatccccgattgtaattgctgcctttaaagcagaaagcgtctcgcttgtcgcatctttggttccaatggtaataagctttggagttgcctgataattactcttgttgaacagatccctgctctgctgttttccgtctaccttcacaatcttccacaactgcgcaatgcatccggactgtccggactgggtaacagaaaccgaaccggcggtaagggaagcatccattgtaaactgcacctttggatctgtctttgaaacggtttcactttcaaacgaaatctcccggttggatggtctcgtttcttttccatatacattaaaataaatgataccgccactgcaatatccttcgatatataccggcgcatccagattatttttaaacttcagatctttataatttccggcaattgccgcatccatggacggttccacataatgaaccagcatggaatgattaaaacgcatcgtaatttccagttctgcccggataactgcattatataaagtcgttgcaacctgacagattccaccgccaaacgattccactaccgttccgttctgataggcaccggccagttcatatccgttctcctgtgtaaacgggctgaccgtttttgccagatcaaactcctctcccggataaaggattgtaccatctactttgctcactccggttatgacattttttgcacgtcctgcactcgaacttgcaaagtttgtcgtataagaaccgatcagatccgtaatttctgcgagttctttctcatccccgcgcggttctaccgtctttgttaccagatcaatctcattattggagccgtcccagccctgtgcaagaaaatcattgattgcatacacggaatttacgacatccacctcgacgccttcttttccctttacaaattcaaattttccattgacacgctttaatccattatcaacagccccgacggcaagatcatctgcgctctcatatatcttttcggccgtcgcctgtttgtttacactcagatgcatatcgagaaccagttttttctttttgagatcctgcagggttttataccggttgatcagacttccggcgtgtcccaccgccaaagcttcctgcacggcagtatccgcatccgcggtcactcccatatcttccgcagtcatctgaatggaaccggtttctcctttcagcgtaaaagttgtatccatcagcccatccacgtattcttctaccgcagatatcgcctgattttctgtcattcctccgacgtttacatttccgatggaaattccattttcaatggtagtctcctctgctgccatcgctgcctgtgtatgagaaccgagtcccaccacacaaaaaagcactgctgcagccattcctaactttgttatcttcttcatattcttcctttaaaataattttagcgttatcttgtattttaacataaacaatcactttttcaagtgccgctacccataaatcagcgctgaaaccagtgttgtaacaaccattgcagcgataacaaccaacgatatgagtgcaatcagctgtctttttcgttttgaaccattaaaattatacatactattcacctctttcgcaaaatcagttataatgaatacacaacaatatcagaaaggatttccattatgtttgtatttcttgctatttttatcgtttttctgctgtatattaactttttgatgcataaaaataaacgcgcccaggaaaatctcgaaaaacagttctgggaccgggagcacagtgcgaatttcacacgcaaaaaagatatcagcaatcttaattatcttatcataacagaagataaaataccacaaaaccttacgaccgatgccaaaaaatcactggaaacactatgcggtcagaaaatgctgaatctttcttccatgagtaacaccgacctgaaacttgaatatggtgttgcaaacctggatgaactcagcgcatgtgatgaccgtttttccacatttgaacgaaatgctgccatctatgcccaggaactgagtgatgccggatataccgatcaggcacgccagctgctggaatttgcagtttcctgtcatgtcgataacagcagcatctacacacagctggcagccatctatcagaccgggggcaatctctccggaatcttgcagctgcaggaagcagctgcgcagcttgcgccgtttccgcaaaaaatcattctggaaaaacttaaaagtttccagccctgatcttatcctgcagccgggaggcttcactgcgtgtaagagtctcccagctgatactgtctttccttccatattgttccatcagttccctgagccgttctttctgatgctccgttgccggcgtctgtctctttgccttatacaccagaggtttcgggacaaacagttccatggaagcaccttctatggattttaaattttcaaataccttataggtttctactgcatcatccagtgcccggtgtgcatgttcccgttcaatctgaaaatattcgcacaggctttccagttttttcgactgtgcccccggaaggagtgcccgcgcaatccacagggtatcacaggccgacaattccagtggaattttctgattgacggcccactgcttcagaaaactgtaatcaaaaatcagattatgtcccacaagaatatcatccccgataaattgcagaagttcctgcattgccacattctcttctttccccaaagccgccatttcatctgtaatcccggtcagctgtactaccgtttccggaattgacattcccggacgcacgagcgttccatatgtatctgcaatctctccgttccgtacacgaaccgccccgatttctattactttgtcccttttcggagccagtcccgtcatctccagatcaagaaccgtataatccattttatgcacctgccttacgctttcatacatgtttattatacacatataagaaaagaaaaccagccagaatatggccggttttcttccacaataacgctctttataaaattcttccaatcaatacatccagtcctgccacccacagcaacagtgcgccaacgatatatactttggtttttgcttcatatccgacacggtatccggtatagatgccgccgatcacaaatgcaacggtacatacaacaatcatgatcagaatcataagcacattcgtttccagaaatccaaatgcaattcccgtaagcagcgtgtaaattccactgatacatgccatgcggacaaatctccggattccaagatgatgttccagatgttcttccacatgttcgttgcggattgcttttaccatcagccggatgccaagaatcataaaaatcaccatggatataatctgtcccagcagcttttcgtccggcaccgaccggtaatggcagaacagggaggacaaaaaatgccccagatataacgtaatcagctgtgccagcgcaacgattccacagatcactgtcagattttttttatttatttttgcaaccagtgatccctgacattccattgctgcgaaaatatccagagatacccctgctattatcagcaggttttccatccagttcatcctttttcctccgaccatcaaaattatttgttattttcactgtctgccttgatcgcatcctgtttataaataaattttacgcttccgtttacaccgtctgcaacctttgtaaatgtctggtaatcctcacccgcatcaagcattgcctgcagtttgtcggtcagcggtttgatatctccgttatagctgttcgcaatcttggaaatacccttctcgtcgaattctaccatgccatctgccagcgtatgggacccgtcatccagtttatctacaccggacacaatctttaccgtggcatcgttgagtgccttgattcccttcgtcagtgttggaactgcgtctgccagagactgtgttcccttactgagtgctgcggaaccggtaaccagactgtaaccgttttcctgtactgcttcaatctgctgtgcaattgtagcctttgcactctctgctcctgtaacagcggctgcacttgctgcctgtacggccacattctgacatgctcctgccagctgtgtagccagtgtctttaagctgctctccacaccgtctgtcacctgctcattgtttcttcctgctgcaagctgtgccttgattgtgctctgtgtcttgtgaaagagtgtgtcctttgccccactctttgcatacagcagttccgcaagctgtgcacttgtcataccatccgatacggcatacataaccgttgacgtctgatcgtttgcctgtgcgccctttgcccacgctgctttaatgccggcagccgcctgatctgcagtaagtttgctgtctgccgcctgtcctgcagctttcagcaatacctgtcttaccacttcattatacacggtttctgctgcatttgcactataagcgccatcataaagagaagtaaataatgcgccatccgttgtgctgccatcttttcctgtgctgtaacggagtgcggcatagatctggtttgcgacttcctgcgtttttccgtttgcaaactcttttgccaccgtctcggaagcggtctttgacgctgcctgtttctctgtatcactcagctttgtatttaacgctttatcaagtatctggattcccttgctgatggattctgcgctggtgtttaatgtctccacacctttgcccagatctccgctctttgaattcagctcattcatgccgcttgcataatccgcaagatttttctgtaacgtgtccagtccatcggataattcttttgatccgtcttttaacttgctgcttgcatccagcatgtcatcaatcatatcatccagagaagaagaatccccgctcttcatggaaatcatgcttccggcatttgccacgatcgtcattgccgtatccagcttgaaatcttttacatcggcagtcacttcgaaatcttccggaagttccagatcatcgatgaaatcagaatctttcacattcagactttctttgattcccggcaatgcatagccgataaccacattgctgtccccgttctgggaaacttttccgttctttacttccacattgctgaaactgtcatccaataccagtgccgttactgctgcaaacggaacctttaccgtctgcttgtttccgtttacggtttcttcataagaagaattatttgtgtaatcataatgtatggtaacttttccggattttccagccagatccttcggtgcaatctcatttccatccagataataagtaactttcagagaaaccggagcttcactgtctgtttttccctgatagtaaatatcggctccatctgcctgccaggtcagcttctctccgttctgtgagaactcctcgcttcccttcacatttttgatatctgtcagattggactgatcctccagtgtagcggactggtttttattgatcagatgatcggtgacaatggtatcatacacacttcccgttgcatcggaaataaggtaaacattttcatcttttccgatttctttatcactgacagatacctgaagcagatcctcaatatcatccttcttatcggaagaatcctctttctgctctgtctgaactgcagcatctttcttctgatctgcctgcacggcaactgctgtcatgctgcttccaagaagtgcaatggtcagcacacctgccacaatacggactacatatttatttttcaatctggtttttaactctgataatttcataattccatcctcctatttgattttgttgcgaaatcctgcacttgatgcacagatcacacggtcaaataccatgaacatgcttggcagaataaagattacgacaatcatactgatgatcgcaccacgtgccatcagcatacataatgaaccgatcatatcgatgttggaatataatcctacaccaaacgttgctgcaaagaaactgagcgcactgacaatgatcgactgaatggacttgctcaatgcatcggtaattgcttctttcttatccataccgcggaaacggttcttcttatacttgttcgtcataagaattgcataatcgaccgtagctcccagctgtatggttccgattacaatggatgcaataaacggcaacaccgttcctgtatatgccggaatccccatattgatgaaaattgcaaattcaataacacataccagaatgattggaagtgaaatggacttaaatgtcagtaaaataataataaaaatagctgcaatagaaataatacttacatttttgaaatccacatcggtaatctcaatcagatccttggtacatggcgcctcaccgatcagcattgcggtattatcgtattttttaataatcgcattgatctcatcacactgtttatttacttcatccgttgcagatgcatattccgaaacaatgaccatcatctggtaatctccactcttgaagatatccttcacatcgtccggaatgacatcctgcggaaccatcggtccggtcagggaatccatcgaaaccgcaagttttacaccgtctacttttttgatctcatcgatcatattcatactgtctttttcagacagactgctttttgccagaaccatgtgggttgcacccatatgatactgttcggacagcttatcatttccgactttactgctgaaagtctccggcagcgtaccagtcagatcataatatacattggtatgtgtatatccgtagattgccggaatcagcacaaccagaaacgcaatgacaaataccacatgatgttttgtgataaaccctgcaattctactaagatccggaagaattactttatgtctggtcttttcgattgccttatcgcagacaagaatcagggacggaagaatcgttacacatccgataacgccaaagacaaccccctttgccataacgataccaaggtcttttccaagggtaaagctcataaaacacagtgcgataaatccggcaactgttgtaatggagctgctgaccacggaagtaattgtattggaaatcgcatgtgccatggcacggtttttatctccgtcaaaccgctccttctgctcctgataactgtgccacaggaaaatggaataatccattgtaacaccgagctgcagtaccgccgccagtgccttggtaatataagaaatctccccgaaaaatacgttggaacccagattgtaaataattgccatgccgatactgatcaaaaacaggaacggaacaactacggaatccatcgtaagtgataatacgatcagagaaagcacaacggcaatcagaacatagatcacactctcattctctgccagttttcggatatcattgttcaccgatgccataccactgacaaaacactgctttccaaccagatcattgatcgtctggatcgcatccatggtgccgtccgacgacatggactcatcaaacaggactgccatcagctggctgtctgcgtctttgttattgaaaaagttgtagatatcatccggaagtgcttctcttggaatactaaaatccataatagaaccataccagataacattttttacatgaggtacatcctcaatcttatctgctattttctgcagatccttatcctgcattccctcaacaactacaaaagagaacgcgcctgttccaaattcatccagaaggatatcctgccctttcatcgtttcaatctgtcccggcagataggacaaaatgtcataattaattctggttttcatatagccgatcgcggatggaatcagcagtaaaaaagccaggatcaaaatcagaaaccgacatttaacgactccttttccaaatttaatcatttttttcaccatcctctatttttctctcagcctatcataaaaaaaaagaccgaatatgaaaatattcaatcttttcgtcatgtactgcatgattatacattttgagtgatttgtatgaattcgtatacaaatcattcaaaatgtcatcgcatattctttttataattctttgatgatgtcgatcagagaccgggtcagcatatactgatatgcttcggccatttcgcgcggcgagatggtcattcccatgctgatccattcctctgttgcaaaacacatggactgtgcataataggaagatatcacttccggcgtcagccatttgtgttttgaaacccttccgctgctttcgttttgaatcagttcaagcaatacttcccgcacacatttttttgcgatatcgtgaaatttgaccggtccctccatttttaccagctgtgaataaaatgccttgtccttttcaatgttggtaaacagcagaaccattgcttctataatcatatcattccggatcagaggttctaccggctctaacagttctgtccggatgatccattcaataagctcaaatttatcctgaaaatgattgtaaaacgttggccggatgacccctgctttatcagttatctctttaattgtaattttttctaccggccgcctgacagcaatctctttcaaactttttgcaagcagctggtcaatatcggttttgccctgtattgccatttcgtctgttatccttattcgtcaaattccatggtcacaaagtaccctttttctgtctccttcacatcaatcacatcgccttcccggctttttaaacgttcgcctaccgcataatttcccgacattgctattgcatgctcaatggtataataataggaagtgggaagttttccctctgtcaccttcaaatgatctcctgctttggtcagtcccggacgttccattttaaattccatctgtctcatcacgatcaccttcattttccacaaactctgtatcaacagtctctgtgcgccgtctgtaatccctcgctgcacgcgttgctgtgacagcaatccacagattcagcgctccgttgataatcagcacgattcctaccagcataataaactgtttcaatacggtaagcggacagaaaacacagaccagaccacagaccagacagatgatagcaaatacaagatccatgccccacttttcatatccgtattttttggcattcacagcctccgtcaccgcacgaattccatgaaatacaagtcctacacccaatataaccggaaccagactgacaatcagcgacggctggatgagaaaccagattccaactgcaagtaccagaattccgacaatcgttgatgctccaaatgttgcaaggctcaaaataaagcttcccagataaataattccaacgatgatcattgcaaccgaaagaagtgttccgatcacatcaatgactccgcctttccacacaacaaaaataattccaagcacaatacacaaaacagaagaaagcagataatccgcctttgcccgcttcaaaaattctctcatgaaatgacgcccccttttgaaatatcttttgcaacattataacatttccttttttattgttcaacttttcctctaaaaatgatatactgtgcgcggaggtgaatatcatgggaaaagaagtaaaaaccaatgccgtgcgtattctggaacgaaataaggttccctatgaactgctgacttatgaatgtgacgaatttatagatggaattcattctgccgaagccactggcaccccggttgcccagacttacaagacacttgtcatgcagggcaaaagcaaaaaatactacgtatttgtcattccgattgccgaagaggttgatctgaaagctgccgcgcgtgcagtttccgagaaatccgtagaaatgatccatgtcaaagatttaactgcaatcactggttatgtccgtggaggctgcagtccgcttggcatgaaaaaagcatttccaaccgttatcgatgcctctgccaggcaatattctgaaatttatgtaagcggcggccgtatcggaaccagcatccggcttgaccctcaggatctggcacggattgtccgcgctacttttgcggatattcttgccagaccataaaaagaaaagtgtgccaggtttatttccctgacacactttttcttttaattttcacccggctgccggataatatccagcacacgctgcaactcggctccctctgccggagcctctccatagtcaacatgcttccagtcttttttgaattctccaagcagatgttttcccggatcctgggtccgttcaatcgtaaaatatctgccctcctgcgtttcgtcattccatgcaaaatatacacggaaacaggatggaactcccatatcgcgtaccggcagatccacacggacaatcagtaaactgtcggacaaatccataaccataacggagaaatcttccggcagatacggatacatacgtttctgctgataacattcctcaaaaaactgatccatatattcttctttcttctcgcagaggtcatccatcatctgtttgccctgcgcaaaaaagcgctttggcataaaaccaaattcaaactgcttacgttcaaacaacagatactgttcctgtgtaagctgcatcttctttggctgcgctccctctttacgcttcttttccacttcctcgattttttccaccagtgcacgtttaaaaatcagattctgtgtgaatggattgatcactattccggataccttttcatcctgctgaaaaaccatgttattcgttgcaaggaacggcatgtttataactgcttcactcttcggagattccggaatctcctttttacttgtataaatcggaagaaacattccgtttttcggactgttgatcagacacggaaccggcttcttttcatcatttaaatttgccggaacaagcacacgtctggttcgcatcagctcgatcagggcatttaaattctcaccggttttttctttcagatatagatctatctgtgcttccacatcttcattttttacatcaagtgtcatgcttggatctgttggtttctcctgcttgagatcctgcttcttcatgacatcttttaacttctttttgtcgatcatctgtgtatatctcctaaccccatgctgtcggtattgtacaggttaatccctgtgctcatgatataaaagcattttagcacatattttcaggagattccatacctttatacggtttttgaatcatcaagcgttttctggatcagtttatcaagtcttcttccgatcctggcatatttttcaatgcggcgttccatttccggcggaactccttttttgtaagaaacccggttatccattcctgcccacgcatccatgatcatcgtccgcaactgcaattccacacgaaccacagttgtctttcctttgtaagacatcgggatatccagaacgatatggtaactctcatacccatttttctttggttttcgaatgtaatcttttgcctttactacggtatatgtgtctgtttttccgatctgccgcgcaatccagtagatttccttgacactgtagcagatacagcggaccccggaaatatcgtttagtgcagtaactgcggtatcaaaatccacgtcataatccttgcgctgcagcttttctgcaatgctctccggcgtcttcatccgtgtttcgataaaacgtacaaatccctgtcctgttttttcttcatattcccggttcagttcccgcagccggtttaccacaatctctcttgccagtgcatgttttctttgaaaattatcatcttcccagtgcttccggagtttttctaattcatccataacttaccttccctgctttctgttatatctatcctattctattctccacttttctacaggataacaggggcatgtaaatacagacttcttccctatgtaaattgtttgtaaaaactatgtggtgagaatctttttttccacaagcattttaacaaattcccgatcccggaaactccatggctgcgtctcacaaaatggttcgttcccatcgataatctcctgtgcggttgcccactccagatgaaatcctttctcgatctcgctttcggtcatgtgcgtctgtgtcatttctgttttcgcatcacagaaaaaaaagcaggagtggcagacatagatcttgtttttttcaaacagatctcgccgccgctccacaatttctccaatcggacggatggattccgggatcacaataagcccggactcctcccccacttcacgaatcagtgcatcttccagcttctcgcccggttccacacctccgccgagaattttataatctccggcactgccatgttgtgttgcaatttttccatcacgaataatcacgccgcgtgtcgagtatttttcgaacacaggcattccctcttcataatcttttttatctaatgttaaaagtatctgcacggcatttctcctttgctgttccgacatacaattttgtatcattatagcactatcacgggggtttgtgcagatgttttaaatataagttttctcgatgcgacgaatttgtgcgagtgttttaaatataagttttctcaatgtgacggaagaagggggacattctctttctacagaaaaatttacaagtcagcgccgatgttgatttcaggttggtttggcaaaggttttacttttatgctattagctttatatgatggaactacggcgcagttgcaaatttgttcttccgaaagaaatgtcccccttcttcctgtggattggagaaaatatagttgagaaatatatttccgcaaatcctgtctgtggaacaaatatacagccaccttcagtaaaaaatgtcatcgtggtatctatgccaataaaattcatgtaaaagataccattgtggtacctacacgctgaaaatttaacattcagataccggaaggtctctatagatcaaaaattacttttccagatacctctttttctaaaaaaccggtatctggaaaagcaatttttactatataggtgacatttcctgatttcaagcattaaaatttcggaaaaccgtcacctaaaactttaatttttcgtctatagatacccggccttatcatcgagtgatttaacagggtatttttctgtttattccagttcataggattcgtagctgtttttgaggcgtccctttaactgcaggttctggtgcctttatgtttgttccacagacaggatttgcggacatcat

SEQ ID NO: 1019 - DNA, 97182 bp, Unknown
  gut microbiota DNA sequence
ggttttccaatccacaggaagaaggggtacatttctttcggaagaacaaatttacaactgcgccgtagttccatcatgtaacgttaatagcataaaagtaaaacctttgccaaaccaacctgaaatcaacatcggcgctgacttgtaaatttttctgtagaaagagaatgtcccccttcttccgtcgcatagagaaaccttatatctaaaacaactcccccgcaaatccgtcccatttgccaaacccaaaggctcccagccccgcagttaaccagcaatttataaagttttgagatactctacaatacttgtcacactgttggcaccatccgccaccgcggtcacaatctgacgcagcttcttagtgcggacatctcctgccacaaaaagccccggctgctccgtcaccccgtcttctccggcacgcacatagccatgatctaaatccagcacagaaaccaccgcatcggtctgcggattcataccaactgcgataaagataccgctgaccggcagttctttttcttctcctgttccggtgtttgcgattaccagatgatcgaccatctgctccccacagatttctttcaccacggtatccggcaggaaggtgatcttcggctcatttgccacctgttcctgcagtaccttcgtgccacgcagttcctgtctgcggtgaatcagatacactttttcacatccggctgccagatacagggcatcttccagtgccacatctccaccgccgacaaccgccactgtcttgttacggaaaaaagctccatcacaggttgcacagtaagacaccccggctcctgccagtgtttcttctcccggcaccccgagtttccggtgtccggctccggttgccagcagtacggtttttgtctcatagacggttccggaagcaccggtgattttccacgttccgtctgtatttttctctacgttatccacttcatcgctgatgaacggaacctccagtgcttttgcatgctgctcaaatttctgtgccagatcaaacccattggtttccggcagtcccagataattatcaacttcctgcgtataaatcatctgtccgccacccatcggctctttctctaaaacaaccacatccagacaggcacgctttgcgtaaacagctgccgaaagacctgccggaccgcttcctataatgactaaatcgtacatgttattcctcctgattttcaaaaaaatctatttcataaataatggcatttttattctttcctattttaccatacccctatacaatgcgctattttcttttctccaataataacaaaatatgctccttttacaaaaattttacgtgattcagggttgaaaaatccatttacaaatgctaccataaccaaggatttaaatccacaatcataaaaatctgagtaatggaggtgaaattcatggacagtagcgatagttttgggcgaagtagacatttgaataccgatgcttttttcactggcaaaattatcgttttcactggaaaatgaattttgccggttcatgatgtttaaagcaccggtaggtgctttttttgtgcctgaatatataaaactgtatacctgagcccttttctattgtgcatatccgcagcatgatgtagcttttgttgcacatgatgactgcacacaaggaaaggagaattcatatgaacaagaaatatttagagcttacaaagctgatccgaagcaaacagaatgaccatgaaatcttaaaatgcttatctaattatcacgaaaacgacattgccgatatgcttacggttatgactccaaaagaaaggaaacgtatttatacgcttctggggccacagaaaattgcggaaatcttcgcatatctggatgaaccacaaatctacttttccgaactctccgtcaaagatgccgccaaagtagtttccctgatggattccgatgatgccgttgacgtcctcgaaacactcgacgataaaaagaaatatgaaatcgtggaaaacctggacaaagctgccataaaagatgtaaaaatgctgctttcctatgacgatgacgaaatcggaagctgcatgacaaccaactacatctgcattccaaagggactttccgtccgtcaggcaatgagcgaactggtccgtcaggccggaaccaatgacaatatttcaaccatttatgtactggatgaatccctgaaatttgccggtgctattgatctgaaagatcttattattgcaagaaaacatgatgtgcttgacgatattatcgtccgctcctatccatcggtaaccgatcacgaaaaaattgatgactgcatggaaaaaatcatggattattcggaagattccattcctgtcctgtcgcaggacggtcatatgctcggtgttattacatccgaagatatcgtagagatggttgacaatgagatgggggaagattacgcaaaactggccggcctcaccgccgaagaagatctcaaagaaaccacggcacaaagcatgaaaaaacgtctcccatggctcatcatcctgctgttccttgggatgatcgtttcctctgttgtaggtgtctttgagcatgttgtggctgtacttccgatcgtaatctgtttccagtcccttgtgcttgacatggccgggaacgtcggtacccagtctctggcagttaccatccgtgtcctgatggatgaaacactcaccggaaaacaaaaacttttcttactggtaaaagaaatgaaaattggtcttttaaatggtggaatccttggtattatggcacttgcactgcttggcatctacatccacctgtttaagggatacacctggatcggagcatttggcatctctggctgcgtcggcatctcgcttctcgtggcaatggtgatctcaagcctcgtaggtactgtgattcccatgtttttccataagataaagatcgatcctgcagtagcatccggtccactcattacaacaatcaatgaccttgtggctgttgtgacttattacggtctggcatttttgttactgatcatgtaaaaagataatctttgcaccatactaccgaaaaatgctgcctgacagcaatattgtacaggcagcatttctattcggcaatttctaagctgcataggagatatcgcttacgcgagataccccagatagaaaatctatccgcagacggataccctttactgaataaccagttcttcaatcgtcacatttttctctttgtcaatgtcaaaagctttaagcaccggctgatccatatccatcagggaaagaatcaggtaattgaccgtcggatcatatgccagacgcttatcttcctcggacgggcgtgacggcgattccggatgggaatgccagttgccaagcggtaccagatggtttgtgcgcatatctttaactgcggcaagctgttccttcgggttcatggaaaaatgctcattggtgtgatccacattttccagaaggtacaccttctcgatgatctttttgtctccgtctttggtgcctgcaatcagaccacatgcctcttccggaaggttttccttcgcatgagctaagattttttcatagtctgcttttttcatggtaagcataaaattttcctccttttcaaggagcaaatcgcatataaagtctgcttcgcagaggcgatttgcgtaggagatatcgcttacgcgatacctcaatgatccgggcactctacctgctcgtaatcgatcagttctgtgatggtcggatgatcgccacagattgcacacttatgatctgcctttggcagtttgatcgtgtggaattccatctttaacgcatcaaaagtcagaagctttccggttaagagatcgccaacaccgatcaggtacttgatggcttccatcgcctgtaaggatccgatgacaccgcccattgcgccgatgacaccagcctgcttgcaggtcggaactgcatcctttggtggtggattcttgaatacacaacgatagcatggtccttctcccggaacataggtcatgagctgacccttgaaacggatgattcctgcatgggaaaatggcttctttgccattacacaggcatcgttgattaagaattttgccgggaagttatcggttccatcaatgatgaaatcataatctttaatgagatccataatattttcagaagtaacgaactcacggtatgtatttacagttacatccgggttcattgcgttcatggtctcttttgcagattttacttttgcttttcctacatctgcggtgccgtgaatgatctgacgctgtaagttggacagatcaacttcatctgcatcgacaataccgatggttcccacaccggctgcggcaagatacattgctgccggtgcaccgagtccgcctgcaccgataatcaaaacttttccgttaaggagctttttctgtcccttcacaccaacctcctgcaggatgatgtgacggctgtaacgctccatctgttcattggtaaatgccattagaagcttcctcctcccatgaagtataagaattcaactacatcgttttcctttaatgttacgtttgcaagatcgtgattttctacaaaatcatcgtttacggtaacggtcacatattccggattttcaaccttctcgtcaacaacgagctgtgccagcgtggttccctctttgatgtcttttacgtttcctgcgattgttactttcatcggtaactcctcctaaatatattttttcacaatttcttccagttccggcttcctgatcagaccgcgcacacgctctgcttcctttccatctttgaaaaacaggatggtcggagaaaccataacggaatactgttctgccagttccccgtcaaaatttgcattgactttgaccacttttaagcgatcctcataatcatcttcgatatcgccaagaatcggtgacatctgtttgcacggaatgcaggaatcggaataaaactccaccagtaccggtatagaagcctgcaaaacctccgcttcaaaattatctttacttactcttgctgccatgcgcttaacctctcttgtctactcttcgagtttctttacaataaggtcataagttccatcttcattgtcgatcagctttaatacctgctgtccctcttccttgaaacttctcggtacgttctgcaccggctctccatcattcatatgtacggaaagcacctgtccgatctctaactcttccatggccacctttgccttgacaaacgtcatcgggcagaccacatccgtaatatctacagtttcatcaattgtaaaatcagccattgtatgcctcctttatcttctcttcaaatttatcaagtcccactctctcgagtgtcatgcggaaacgctctcctggattggcattgtcatcaaagaactggattgccgcatcggtaatgcggaataactgttcctcggatgtcacaagcggaagataattctcgcctttgtatacgcggtttccaaacagtccaccgaaagatacctcaaatgcaggtgtcgctttccatgcatcggtcggacaggcctttacacagcgtccgcagttgttacatttttcctcatcgagaacgatttttccgtccacggtgctgattgcatccacgcggcaggtcttctcacagatcccacagttgatgcaggctgcttcctcccattccacaatagatgcacccttgattccgacatcattttcttctgcctttaagcagttgttctggcatccggttacaccaaatttaaacttatgcggaagttctcttgcaaaataacgctcatccagtttttttgcaatatcataactgtcaatatttccactagggcataccgccgatccctgacaggctgtaatcgtacggacacgcggtccacacacacccggcttacatcccccggttgccagcacttccttaacttcttctacatcgtcaagtttgataaatgggatttccacactctgacgggaagtcagatgtacgtgtccgtctccgtatttttctgcaatctttgcgataatctgtaaattctctgctgtaagatttccacctaccacagccagccgcagggaaaaattatttttttgtttctggcgcataaatccgccttttttcaatgtagcataatcaacagccattactctctcctttaaaccttgtgtatttttctttgtttatccggcggtattttggattgctgctgtaaaatcctgcttcagatcttcgatatcctcaataccgacacttattcttatcatatcatcaaatacggcagcgtcaatcttttcctgctcggttgagtgtgccgccagtgtggattccggatgcacaatcagtgtcttggtatctccgatgttggatacgatctgtggaatcgtcagcgcattcatgattgcaaaagcgcgttccttgcttcccacacgaatggttaaaattgctccaaatcttccatccagcaactgctttgccacaccgttccacggactcgatgcaagtcccggatagtttacgctgattcccggaatggtttccagataagccgcaagctgcattgcgttgtcacacgcccgctccatacgaagccccagtgtctccataccaagcagattatagtatgcagtctgcggcgccatacaggctcccatgttgcggaacaatccgtttctcagttttgcagtaaaggcaaattttgcaaactttttatagtctttcatgcccggataccgctccagatcccatttgaatcttcccgcatcagtgatcacaccactgatggcactgctgttgccgttgatgtatttggatgtggaattgatcacgatgtctgcgccaagttcgagcggacgaacgagaaacgcggtagctaccgtattatcgatcatgagcggaagattgtgccgctttgcgatccttgcaagtgccgggatgtcggtcacatccagctttggatttccaatcgtctccgcgaagatgactctcgtcttatccgtgatcttggattcgagatcttccagatcattcgtatctgcaaaaattgttgtaatcccaaacgcttccagatcgtggtaaagatcaatcgttcctccatacaggctggtgcttgtgatgatctcatcaccacttcctacgatattcagaagggcattggtaattgccgccatgccggatgcacaggcaacggatgccacgcctttttccaaaaccgtcatgcgttcttcaaatgctgcgatggtcgggttattgattcttgtgtaagaatatccagcagctttgttatgaaacagcttctcatgctgctctgccgatggctgaaagaaagcactggactggtacaccggggtaagtgtggctccggtcaccggatctccggtttttgtaccatgtagtagttctgtgttgaatcccatttcatttcccctaattcatacttatctaataggtttaatatgttatagttaatataccgcaatcataccctattgtcaaccttttatttccacttatttttccaccaaaaaaatccccactggtgaaaaccagcagggattccattctcataataaaattattattctgtccagtgctcatccttaaatacgatgcggcggtaagtctcaaaatcaacccacttattaaagaagttctcagaaatctcactgccctctgcggaaagctccttcttgaacgcatccacatctgcggcacttgttacatgaactgcaaatccacggccgttgatgacaggcacatcgttgtatgcaaagtcagcaagcggaataattgcagtaaccttctggtcacggatggataccgctacctgctcacgcagaacaaccacatcaaagctgtccggatactgatacgtctcacccttgaccggaatcacatcaccgatcgtgtaagttttatcggaaggctgtaccttaaagacgttcatagcctcaaggtcatagtaatattcctcgaagatatctccgtttgccttgagatttccgtgggcaaatgcgcattttaagtctttcgtctcatcgagcgttggattttccacaacaccacatgcggaggtcatgttggaaatacggtcgatcaggatcagttctcccaatgtcttatgctttgcaaaagcatcaatgacgatctcttcctgcaataccagatcgcagaccgcaatctcgttcttgcgcaggcggccaaccggaataaattcaccggtgttgacatcaatcttgtactggatattctttaagatacccggaatcgtacgtgtaccgagttttacgagataatctttgccgacggtcagttcctcatcgtccatccagaggattgttgcggtaaatttcttgctgaccggaagcttcgtatcttttgcgagaacacatccgcgggatacatccacttccttgtcaagctggatggtaactggacggcctgcatctgcagtctgtgcatctttatctccgactaaaatgctctttacttttgcatgctcattgcttggcagagtcacgattgtatcaccgaccgatacagcgccactctcgatctgtccctggaaaccacggaacgtgtgatccggacggcagacacgctgtaccggcatatagaagccttcttcctgcttcttttcgctcacatcgatattctctaagtaagcaagcagtggctcctgcgtgtaccatggcatattgtcggaatgggtggtgacattgtcaccctcggttgcagataccggaatgatcttgacacttgctaaatgcagttccttggaaagttcctgaatttggtcaacgatctccttgaaacgctcctcactgtaatcgacaagatccatcttatttacagcaaatacaaagtaacggattcccatcagtgcacagattctggcatgtcttctggtctgtacgagcacgccctgctttgcatccacaaggataacagcaaggtctgcaaaggatgcaccgactgccatgtttcttgtgtactcctcatgtcccggagtatctgccacgataaagcttctcttttcggttgtaaagtaacggtatgccacatcaatggtgataccctgttcacgctctgccatcagtccgtccagaaggagggaataatcaatcgcaccgccgcggcttcctactttggaatccagctccaacgctttctcctgatctgcgtaaagcagtttggaatcgtataaaatatgtccgatcagtgtggactttccatcgtctacactaccgcaggtaataaatttcaataatccgctcattttagaaataaccctccctctttcttcgttccatgctgccggctgcctcgttgtcaatgacacgggtggtccgctcagactctacagcactcaaggtctcgtcaataatctcatctaatgtggtcgcgttggattcgattccaccggtcagtggatagcatcccaaggtacggaaacgcacattcttgtattcaattttctcacccggacgaagtttcagacgatcatcatccaccatgataatctgtccgtcacgctcaatcaccggacgctttgctgcaaaatacagcggcacgatatcgatgttttctctctttatgtactcccagatatccgtctcagtccagttggaaatcgggaacacacgaatactctcacccttgttgatcttggagttataaagtttccacatctccggtctctggttcttcgggtcccatgcatgattctcattacggaaagagaaaattctctcttttgcacgggatttttcctcatcacgacgtccgccgccgaatgctgcagtaaatccgtatttattcaacgcctgttttaatgcctgtgtcttcatgatgtcggtgtactggctgccgtaatcaaacggattgatgccacgctttacaccgtcctcgttgatatactcgatcatgttaatcccaagtttctttgccgtctcatcacggaactgaatcatttccttgaatttccatgtcgtgttcacatgtaaaaatgggaatggcggcttctccggataaaatgctttcatggcaagatgaagcattaccgaactgtcctttcctatggaataaagcattactggtttttcacactctgccgctacctcacggataatgtagattgcttccgcttcgagtgcatcaagatgagataattgactcatgatcttcctccttaatatttattcgaatcctttttattcacaacaattgtttctattgtaccatctgtttttttaattcgccagtgtaacagatctccttccgtatgaacggtcatctggcttcccatgccgccgatgtcggcacccaggtaataggaaattgcctcaaacggacactccttgatacaggaggcgcatccccagcagtccttcggataccggatcacggcttttttgtcttcgccgcgcacgatcaggcttcccggacagacatccagacattttccacatgccctgcatttcatggaatcaatcgcgatgctcataggtttctcctcctttcaccagatctctgcggatcatcgtaatctggtccccgttctttttcgagtttacatagcagagccatgcatcactcttctccggataatccagattctccgcgaaactgtgccagcgtgtctccttgcgtgcacgcagatgtgcgatcaccgtcaagcacacagtcaggcgttctttcagctcatagataaacatcagttcatgcatatcggctgccgcaagtccttttgcaaggatctgcagtttctttattttttcttccgccatggcaagctgcttttcgttgaactggtaatgggttccgattccgcctgcatactggtccatgactttctgcatggcttcctcgagttcctcaacggtaaatgccgggtcctgctttgtgagaaatgcatcatactcggcaattttattttcaagaaccgcttcttcatcagaagccgccgtatctgccacctgttcttcgtttaatttctgcacgatggaatgggctgcgatctcgccctccaccagtgcgccggttacatatttctgtggacagccgcctgccacatctccggcagcatagagtccgtggatcgttgtctctcgttcggtgtctacccagtaaccgctggcggtatgaccacctacgatgtacggctcggttccctcgatttccacgttctgttcgcttggatttttcccggattccacccacttgagtgtctgtcccggcgccatgtttaagtatgcttttaagagcgattcatcctgttctgcggagatgccctcggtgcgaagataacatggtccgcgtccctgtacattttcttcaacagttccgtacacacgctgggaagtagtcagaccgtattttgtctcatacacttctccgtgtgcgttgatctgctttgctccgacaccctgtgcaatcgttccggtcggagcgatcgtatctttacagcgcagggcgataaagcgcatctcaaatgtggtcatctcggctccagcttccattcccatggcatatccggcaccggtgttaaacggcggataccacattttatgacgggaaaaacccggattgttcgggcggtaaagtcctgcggctcctccggttgcgatcagcactttttttgcgcggatctcgtaggccgtaccgtctgcaatggaaaaaccgacggctccttcgatcttattattgtttaccagataatcggtaatgtttaactggttgatgacggtcacatcgtctaatttgctgacagcatctgcaagaagcggcttgaagttttcgccgttgatcttgatattgcggtttcctcttgccacatactcgccgttttcatcttttaagatgaccagaccaagctgttccattttggcggtcacacggttgagtccttcggacatggtcaaaagcagatccggccggacgatgccgtcggcatcttttgtggcgtagtccacgtaatcctgcggaacatgacctttggtgatataggcattgagcgcgttgactccggctgccagacagccgctgcgcttgatgttggctttttctgctatgattatggaataatcggattgttcacggatggtcattgccgcgtagcagcctgctgtgccgccgccgatgatgaggacatccgtatggagtattttttttccctcgattttcataagtaatccttccttgtgattaaatgtagaagacctcgccttcctgcatttccttattttctacaagataggtctggttttcatcaaatatatacaggcggtaaattaagacatatacctgttctccaatttcaaccggatctttttcaagtgagcgctcggtgacgatcgggatacctcccacatcaacgacaacatccagatgatttcctcggaatatcacatcttttacgattccacgctcggcggcactcatgtgctgcggtggctcgcttctggacatgcggacaaattccggacggataactgcgtgggttgcgccctcgaccggatcaaatccaagcagacgctcataatgctctacgatcgaggaacggccgataaactgtgccacgaacggggtgtccggtgatttataaatttccatcggcgttcccatctgctcgatatgtccatggtttgtgatgataatctcatcggccacctcgacggcttcatcctgatcatgggtgacaaaaatgcttgtaatgccaagctttacaaccatctcgcgaagccagttgcgaagttcggtgcggacttttgcatcgattgccgcaaacggctcatcgagaagaagtacctgcggattcggtgccagtgcgcgggcaaatgccactcgctgacgctgcccaccggacaactggttcggataacgcttttccattccgcttaatccggtcagttccagcagttcggtcacgcgctttttgatttcttttttcggcaccttggcaagttcgagaccaaaagctacgttgtcgtagacggtcatataacggaacaatgcatagttctgaaaaacaaaaccgatgcctcgttttgccgccggcacatcgttgacacgctgcccgtcaatatagatatcgccgctgtttggtgtctcaagccccgcgatcatgcgaagcagtgtggtctttccgcttccggaaggtccaagcagtgcgactaattttcctttttcaatgccaaagctgacatggtcggaagcccggaagtttccgtaatttttacaaatatctctcatttccacgtacatagcctgactccttactgtatgcctttactgtttttgcttctgtattcaaaaatgtttctgagtatcagcacgatcaccgcaataatgaccagaatggaagataccgcaaatgcggaggtgatggaagtatccgtccccgacatatataaggcatcaatctccagcggcagggtaaatgtctgccctctggtctttgagagtgcattgactgctccaaactcgcctaacgcacgcgccgtacataaaatgataccatagatcagtccccatttcatctggggaagggtaattttccggaaaatcgtaaatcccccggctcccatcaatgctgcagcctcttcttcgtctttgccctgtgcatttaagatcgggatgatctcacgcgatacaaacgggaaagtgacaaaaattgtggcaagcaccacacccggtaacgcaaacgtaatgcggatgtttgttccgaaaaactggttaatcgcccggattgccggatacgtccagccgagtcgtccgaaggtcatcaaaaaggcaagacctacaatgacgggagagatcgaaaacgggatatcgatcagcgtggcaagcacctgtttcccacggaaagaaaactttgtcagaagccatgccgccatgattccgaaaaacgtattgacaactaccgcgatcacagttgcaagcaatgtaaccaaaagagccgaacgcacatattcggttgtgaccgcctgtatgtaaaaagcaaatccttctttcaatgcactgaagagaatcgaaaacaggggaagaatcagcataacaaatatgaaaagaacgctgatggctattaagatgtatttcgtacttttcttttgttccataaaaacgaacttcctttcttaaaacaaactggctggtttcccgttgtacttacacattgttggttctggctgcctgtttcatctgtacgatattcacagcaagcagtaaaacaaacgataaaatcaacattaccagcgcgattgccgtggcactcgcataatcaatatacccaagcttctgcatgatcacataggagatcacctgcgtatgttcccttgcactgtttccggatatgtaaatgacacttccgtactcaccaatccctctggcaaaggcaagcccaaatccggttaaaaccgggggcatcatctccggcagaagcactctgcggaaggtctgaaaccggttggctccaagcataaatgccgcttcctcatactgtccgtcgagtttttcaagcaccggctgcacggcacggatgacaaacggaattccgacaaacaccagtgcaatgaccagtcccagatgtgtgtaggatactttgatgccaagttttgcaagcggagtcccgaggattccgttttcggaatacattttggaaagtgtgatacctgctaccgaagtcggcagtgcaaacggaagctcaatacagccatcgaggatacgttttcccggaaactcatatcttacaagcacccaggcaatgatcacaccgaacacactgtttataagtgccgcaataaacgaacatccgatgctggtcgcaaatgcatgccgcacggtcggcttcgtgatcagggaccagaactctgccggacgcagttttaatgcggaaaccatcacagatgccagcgggatcagcacaatcagggaaagcattgtcactgtaattcccaatgtgaggtgataccccggtatcacacgtactttttttgtcttattcgttgccgtagatttcatcaaacattgctccatcgtcaaaatagttcttatatgcttcgttccagccgccgtaatctttgatcgtatataatttcacattcaggtcaaaacggtcggaaaattccttcagaattgattcattgctcggacggtaaccatactctgccgccagccgctgcgcatcatcggtgtacagataattcaggtactcgcggctcacttcctgcgtgccattggcatctgcgttgtcatccacaatcgccacactcggctgtgccagaatactgacactcggcgtaatcatctcatattcatccggataacttttcatcgtggtaattgcctcattttcccacgcgatcagtacatcccctttctggttttccacaaacgtggttgtggaaccgcgcgctccggaatccatgacggaaacctgcgagtaaagtttctgcagaaatgctttctgttccttctcatcatcggtctgctcctttatataggaaagtgctgctaaaaagttccagcaggcaccaccactgctcttcgggtccggggtgatgatctcgacctttttatttaccagatcgtcccagtctttgatctgtttcggattgcctttccggacgaggaaaacaatcgtcgaagtgtatggggaactgtcatcggcaaattcctgttcccagcctttttcaatcagtccggtctgctcgatcagtgtgatatcatgctcaagtgccagtgtcacgacatcggcgttacatccctccacgacggaacgcgcctgtgcaccggaacctccgtgggattgaataatattcacttcttttcccgttttttccttataatatttctcaaacagaggattatatgcttcataaaattctcttgtcggatcgtaggagacgttggtgattgtccatacatgactctttttgcttccgcatccggtacatccaatcaacagaatggctaccatggacagtaccgctattttctttaccattgaaaatgattttcgcttcatgctcccgcctcccttgactttcgtttatcataccccttaattcctatcatgtcaataggtattgtaggaataattttcctttctttctacggtaccatggaaagattgaattttgcttgaatctcaatgccgggatttttatggacaattaaattgctggttaactgcgtggtctgggaccttttgagtttcttaaaagggacggatttgcggagattgttctaaatataagttttttcaatgcgacggaagaagggggacattctctttctccagaaaaatttacaagttagctctggcgttggtttcaggtacgtggagtaaagtttttcagtttgcgcaattcactatgggttgtgagtgccagagcaagttgcaaatttgttcttccgaaagaaatgtcccccttcttcctgttggctggagaaaatataattgagaaacatatttccgcaaatcctgtctgttgaataaatataaaggcaccagaacctgcagttaaaggtgctcccggaaggtaatgcgtgtaatgaatgtttacggtaaagtgataaatgtttgggaaacttaacatgcaaataagtgaaaatttcattgctggtattttgtgaaacaatcgttctattgaagcttttatatgatcaggcattatgaatttataaatgaaagatgggggctatataatcaaaattcataggaaaaatgccatcgtggtatctatgcaaataaaattccgtaaaaaattccaccgtggtatctatgcaaataaaattcacgtaaaagataccattgcggtacctatatattgaaaatttaatattcagataccggaaagtctctatagatcaaaaattgcttctccaggtaccgctttttctaaaaaaccggtatctggagaaacaatttttactatataggtgacatttcctgattttaaaccttaaaatttcggaaaactgtcacctaaacctttaatttttcatctatagatacccggccgtatcatcaagtgatttaacagggtatttttatgcttattccagttcatgggattcgtagctgcttttgaggcatccctttaactgctggttctggtgcctttatatttgtcacatagacaggatttgcgggcatcattcttttacttatagttttccaatccacaggaagaagggggacatttctttcggaagaacaaatttacaactgcgccgtagttccatcatgtaacgctaatagcataaaagtaaaacttttgcaaaaccagcctgaaatcaacatcggcgctaacttataaatttttctgtagaaagagaatgtcccccttcttccgtcgcatcgaaaaaacttatatttagaacagtccccgcaaatccgtccctctgaaaaacaaaaggccccagaccacgcagttaaccagcaatttatcaaaagaagtttccatcactcttccctggtcaattcatatgtcacctccttgatctttgttcgcataacaatccctctgacatcttccggattaattttatttgccacctgtaatcccagataagaggtcaccctatagaaatctcctgactgtaacactgcattgcagtcggaataggttttctttgcctttgaatcactaatgatatccatcggataaggatctgcaatattccagttacgcgttccatctttgtaaatcaaagaggtttttccaagatcctctcccacactttcctgattctttccccatctctctaagccaaatgaccattcagcatttttctgcatttttctgtaatactctgtagttgttccataaattacagcactcaatggtgttagccgcatccgctttggctcataatacttcgggctgatctgctcctgattttttgctttcaacgtatattcataaacaggaacattacagctcgcgtcaagtgtcgcagtattattcgttcttgtaggcaaatcataacacaatgtcaaattcattgacgatggaatccattgtcgaaaatccatgtccattgcaaaatactgcacattcttatcactttgtgttctgagataaatagatgaagattcaaaacgctcttcatacacgttctgctcaagacgcaactgtcttttcgaacgaagatttccattttcatcatagctctccgatcccgccggtcctttggttgccagccatttttctccggtttcatcctttgcctcatagcgcacaactgcacttacgacaacttcatccgaaaggatttcctctaccgaaaaaatcatatgttcatcctggtcactgaatactcctcttgtaacgtaatcggacaattcacttcgctgtccccaatacccctgaaacatcttttttagctgctccgcaaaagatgtctgtggaacaatgcaggcaagtgccagtgcagccgccacggtacctgcaataccggccattttcattcgtttttttctcatcattttttcctcctttcgtctctttttgagtacaatttcctcctctttgatctcccgctgcggtgtaagggccttttttaaaatcttatctaattgctcatcgttcatatccgataacctccagtttttcctttaaaagtgattttgctttgcgcagacgggttttaacagtattgacggaaagatgcagacactccgcaatttctgtcagtttcatatccgccgaataatacagatacaccaccagccggtatttttcgggaagctgctgcaccagtttctgcacttcatgtattgtttcctcctgcaatacctgtacttccggatctgcattccgggtttccgatgcttccccgccgttttgtatatgtacttcgtagctctcctgtggtgcaatccgcatccgccatgcaaattttcgtctgcgatttttccagagccggattgccacagaaagtgcataacttttactgttatttttctcatccagccggtctaaatgttccagcagcgtaagcatggtatcctgatacagttcatcaccctcatgggcatttcctgcagtcatcctgcaaaaccacaggatatctctcccgtgcgcaagcacaaactcatcaaacttttgttttgtcacgtgtaattcctttctattccccaaagacgtccatgagatttctctcttacataatgatattgtaataaattttcaaaaagttttccggatttattggcacttgaacaaatacgttgaatactctataataagtagaaaacctgtgccctgcggtacatttttaatgtatcccaatcgcatctggctttttattacacattacgaggaaattttatgaaaaaaaataccctgcggcattcccttctgctgcttctgactgcagctatctggggatttgcctttgttgcacagagtgtgggaatggactatgtgcagccttttacctttactgctgcccgctcactgatcggggggatcgtactgcttccgtttatttttatccgggcgcagaaaaccggccggacttctgaggaaaaatccgcttcctggaaacaggcactgcccggaggcatcatctgcggtgttctgctgtgtatcgcatcgaatctgcagcagatcggcatacaatatacgaccgttggaaaaagcgggtttatcacagcaatgtacatcgtgcttgttccggtactcggtatactttttcacaagaaaaccggtatccgcgtgtggatctctgtggcacttgctgtatgcggactgtatcttttatgtatgaccggaggttcctttcgtctgcagcgcggagatctgtatacactctgctgtgcgctcatgttttccctgcagattcttgccgtggatcactatgcaccgatcgcggataatgccatactggcatgcatcgaatttttcacctgcggcatctgttccctgatcccgatgtttttactggaacagccacggatgcacctgattcttgccgcatggctgccgatcctgtatgcaggcatactctccaacggtgtggcctacactctgcagttttttgcacagcggggacttcctgcctctacagcctctctgctaatgagcacggaatccgtgttctcgcttctggcaggttttctcatcctgcaccagatgctgaacggtcgcgagcttgccggatgtgtactgatgtttgccgccattattcttgtacaaataaaaggaaaagaaaaggagtcgattaattcatgaaaaatatcattgaaaacgaagtcggggccatcctgacagatatccttgacgattataaaaaaggacgcgcggttgataagatggatatctacaaccagccggataaaaccgaaattatggacattcttgaccgtctgttttccattgtttatccgggatttttccgcgataaaacccacaaaatctacaatattgaacacagtgtgtctaccatgatcgaagatgtaatgttccacctgaacaaacagatctgtgttgtcttaaaatatacaaaagaatttggggacaatgaggaagaaaaactggaacagtttgcacagaaagcaaccgtttcttttatgcggcggatcccaaaagtccgtgaatacctggagacagatctgcaggctgcctatgacggtgatcctgctgcccgcagcaaagatgagatcgtattttcctatccgggactttatgccatcaccgtataccgtctggcacatgagctgtttctgctgggtgttccgcttatcccgcgtatgatgacggaacaggcgcacagcaaaaccggtatcgacatccatccgggtgcaaccatcggcaaatatttctttattgaccacggtaccggcatcgtgatcggtgaaacaaccatcatcggctgccatgtcaaactgtatcagggtgttacacttggtgccctttccaccaaaggcggtcagaaactgcgcgatgtgcgtcgtcatccgaccatcggtgacaatgtaacgatttactctggtgcttccatcctcggtggggaaactgtcattgaggagggggttgtaataggtggtaactcatttattacccagtccattaaaaaaggcaccaaggtcagtgtccgcaaccaggaactgatctaccacagtgatgatgaatcacttcaccacaaagaacaggatgaatcctggttttacattatctgatagttacaaaaggggattttatggatacaaaagctttccgggaaggattccgcgatggcattcccatcggacttggatacctcgctgtttctttctctttaggtatttctgcaaaacaggctggtctgactccgcttcaggggttcgtgaccagctttctggaaaatgcatcggccggcgaatacatcgcatttactctgatcggtgccggtgccacatatattgaactgtgtctgatgacaatcatcgccaatgcacgctatcttctgatgagctgtgccatgagccagcggttttcaccggatacccctatgatccaccggttttttgtcgcatttgacctgacggacgagctgttcggcattgccatcggacgtcccggatatctcaatccctactacagttacggtgcgtttcttgtcgcacttccgggctggtctatcggaaccgccgccggtgtcatcgccggcaatctgctgccgggcgatatggtaaaagcactcagcgtttctttgtttggtatgtttctggcaatcatcatcccgcctgccagaaaagacaaagtcgtgctggtgttgatcatcatcagttttgcagcaagttacctgtgcagccgtctcccggtcatccgtgacatttccagcggaacgcgcacgatcatcctgacactgatcatcgctggaatcgccgcatggcgtttccctccgcagacggagatcactccggaaaatgctgacgcacaaaaagaacagggggcggacgtatgagtggaaacatttatatctacattgcaatcgtagcgatcaccagttatctgatccgcgtgcttccgctgacgctgatccgcaagccgatcaaaaaccggtttatccgttctttcctgtattatgtaccttatgtcacacttgcggttatgacctttccggcaatcattgatgccacagccacaccacttgcaggagcacttgctctaattgccggcatctttatggcatggaagggactcggacttttcccggttgcgatcgcctgctgcatcattgcttaccttggtggactgattttttaataaaaaagtgcctgcatcattttttgatccaggcatttcttctatccccaaagtgaaaataaaaatactacgattccaagaataacaagaaccacgcccgtcacacggttaagtgttttcggtgtggctttatttgcaaataccgcagcaattctcgcccagatcagggtaaaaatcacacacagcgtaaacaccagtccgtccggtttcccgccaataacaaaatgggaagcagcccctgtaaacgcagtaaatgccataataaatacactggttccgactgctgtcttcagttcatacccaagtacagaagtcaggataagaagcatcatcatgccgccgccagcaccgacaaatccacagataaatccgatacagataccgcttatgaccgactggatggcacgcttttgtgcggataccccctgcatggtctctttggttgtcataaccgggcgaacaataaatttgataccaagcaaaaatgtcataaagacagaaaaatttcccattgtggcagatggtacaaggcttgaaacatagcttcccaccacggtaaatgcaaggacactaaccatcatgatcagaccatttttcacatcaagattcttattttttccataggtatacgcagacactgcactggcaagtacatcagaagacagcgcaatcccgaccgccatatacggctccatcccaagaaatgtgataagcatcgggctgataaccgctgccgcactcatcccggcaaaaccggttccaagtccggctcccatacctgcaaaaaatgttactagaatcgtaaataatactttcattctcctgtatctctcctttgttccagataacaagtaattttagcacatttttcaaaacaaatccagcatgttatccagataaatttcttcccggacatgcagctgatattgtggctttgtcatgtaatatagcagaaactctaaaatcagtgcacttccaagtccccgtccctcgatcttaaaattagaaaatcccattggaaagtaaacattttggattgcctctattccaataaatcccggattttgcatggctttggaaaagcaatatccctgctcagattccggtgccgtacagtgatgttccctattttctccaagattcttgcggctgaccgcttcataacaggctttcctgtccttacagccaaaccagcagcattcattgcacaaaaactccaccttgtctttttctggccaagacagtgtcttccatcggtcataggctttatttaagcgaaaatcaggaacaacataccggaaatcttcacgtcgtatttcctctaccagctgcttaaaatccgtgattacttttgtggtggacgaaacaaaataaaggtgcggataatgttttttcagatattccaacagcagatccgaatggacaatcacaccgttttgcacatctttattttcttccagtaaagcacagagcgcattgcatttccggtcagaaagatgcttctcttttaaaagagagttgctgaaggtcagccgcgcggatactccatactcctgcatcagtgccagaacttctttcggatcattctctccaaaaccggcacgtccgccgccccagatacaatctgccggagctccatagatcgaaccgatttcacaccagtcataaaaccagtccctgtgctcccgatataacggaagaaacacgcggtatagttcataaaattcaaacaagcccggaaggtgataatacgcttttaccattctgtacattcctctcattttttatcataacgattcagaccacctcagaatagttactttattaaatacaaaatcaacccggacatcaccccgattccaataatacagataatcacacctccaatgaccgtcacagttcttccttcatccgataattccgcattctgaaactgccatctgcgcagaaaaaagtataccttatccggataataaatctgtacgattccaagtacataaataaggactcccagtaccgtaaatccccaaaatgaaatcgactccagattgccgtaaaggatgtgtcccaatgcattgctgtatgtttcatcactgatgacaggcttttcattccctgctataatctgcatttcatcccagcccacagggcttccatctgccgcgagcaactgatcccccgtccatgtgccgtttatcgtatcatccgcaaatgaaaacgtgacctgatcccctttcatggtataggaaacattctgtttttttccatctgccacaagtaaaaaagtatcatcttttgttcgttcaacatagttgactgtgttgtgcacaaacttatctgcacggactttgtaataaaaatcatccccaataaaaacgccttttcgcagcgtaaaatatccaccgattgcaactgcaaaaatggcaattataatcaaaaaaacaagtcccaaatgctcttggattttcttcatttccgtcctccttctctttaaaaaaaagccattctctcctgcgaaaatggcttctgaaatactactacttattttcaaaattaacactgcggatcatgttacggttgataaactgtgttccctttttcggtgtctcgatcttcacccactgcgcatccacgtccatcagttttcctttgataccacccatatcattaaataaacttaccgcacaatcttttcctatataagtatctaaaattgaaccactcatcatttcgtcttccttcccattttctgtcactgtaaacagctcagtatcctgcattgccagcatattccatgtatttaccatattgaaataattgactgctgccattgttgttgcgatatccataccttcatcacctcatagatatcagtgtagcattctttgtgcacacttgcaattactttctccctctttccctctccgacatcggaacttcatttttcatgtaagtatcccacacctgcatccgatcctgctcatccagtttgcgcaaaacttttgccggaacacctgccacaatacagttatccggaacatcgcgggttacgactgcccctgccgccacaatacagttctttccgatggtcactccgccacagatcgttgcactcgaacaaatccagcttccgcttccgatatggatgggctttgcatactccaggtcatgaaaaccatccggatactgctgcggcagccgctcatcggaaagaaacggatgacacggggttgcaatcgtcacgtttgcgcctacccacacaccatcctccagcgtaatcggcgcacagtccagaaatgtacatttatagttgacaaaacagccttttccaaaatggatattgacaccatattcacagtaaaatggggcaaaaatggctgctcctccatcctttgcagatggaatcagtttttctaacaaacgctgttttctttttttcctccacagcggagtgcggttgaatttatcacaggtttccatgccaaatttatgatattgttccagatctttgctgtcggcattgtaaagtctgccggctttcattcgttcccagttattcatgtttatctccctcttttttatttcctttagtataacaaacttttgcaatacaggaaactgaagtttggtgactatctggttctcttaggtgctattatgcgcgaggaaatgatgattgactggctaaaaaaatgtatcaaactgctcggttaacatgctccctctcccttcaaataggcgatcacttcgaatagatccggtaacaccaccgctgctttttcctgcatttcttcatttgcaggcagcagatccggaaccatgatcggaagcaaatgtcctgcatgtgccgcacgaatcccattgtaggaatcctcaatcgcatacgcgcgctccggtgcaaccccaagttctgcacaggcctttaagaaaatgtccggtgccggtttgctgtgctccaccatatccccgcagatcacattgtcaaaaaaattcaaaattccagcatcctttaattggtttgtcacggtctgtctgcgtgtcgaagatgccagcgcaatcttctttccatcttcttttaaaaaggtgagcagttccacaacccccggcttcatcgggagcctgccgccatcgtatctgctgtgatagatagcagaggactctttcgcataaatatcatacggaaaatcctccccataaatttccagcataatctcccgcgtccgtttcatcgtcgtccccgtacaggaaagcaccgctttctcaatatctggaatctggtatttatctgcaagctccttccagcactgcatcacagcccgctcagaatcaaaaatcacaccgtccatatcaaatacaactgcatcgtaaccggttttcttttccatagaataatttcctttctgtcttacgtgacaattttattctaacacgatttatccaattagtgcatgatagattctcagatcatcgtccttgaatacgttaaatatgactttttttattctgctgtcctcattgatataattctttaccgtctcggtagcgatttctgccgccctttgctgtggaaaacgaaacacccccgttgacagacaacaaaaagctacggactctgctcccgtgtccgccgccagcttgagacattctctgtagcagcttgccagcaattcttcctcttttcctgtaacctcccactgtatgatcggtcctacggtgtgaagaatatatgttgccggaagattataaccggacgtaatctttgtctttccggtttcttcttcatgtccctgctttttcataatttcatacattttcaggcgaagttccatccctgcatatgtgtggataaaattgtcaatacaggcatgcatcggggaaaaacatccaagcatctgcgaattacaggcattgacaattgcatcgcattttaaggttgtgatatctccctgccagatataaagtcttggatcagatgctaccggtgtcaggtctgcaatgtctgtgatccctcgctccctgtttctttcgataagatattcgtcctgaatccttaagaaatctgccgggattggttttggcaatctggtattcatcagggaacggagcaaattctcctgtccctgtttatctttaggaatcttttgcttccgaaaacggatttcctctttcagaagatattgaatcaggcagcatcttctttcttcctgtgtcataatacactcccccttatcgcagtaattgcctttgccatatcaccgccgatcccaattgcgcgctctttaaagctttccggcactaccgcctcatctttattcaatcgaatcaggctgtatgacttattttcacgtaccattttctcaaacggaaaccggataataattggtgtgttgaatccgactccaagttctaaaagtacaacctttttatctttgttctgttccagaaaatccgcatatctgtcggcagcctcatgccatgcctcatcttctacgaagtaactatcacagcgcagatgcattgccatttttcctccgcataccggacatttgggcacaagttcggatgggatcagacagtcttttctggcagcatccatcttttcaaacagttcttttgcatcatacacctttggatgacagccgcgctgacactgaatttctccataatcgccctgtgttgcaaaaatccggtctgccgaaaatcctgctttgtaaaactgatgatcgacattcgtggtaagtacaaaatactccttatcctgcaccatggcaaacaattcctgatacagcggcaatgccggtggatcaaaccggttgatcagcgcatgtttggaccagtagccccatcttgcttcctccgaaggaaatggataaaaacccgctgcatacatatcggtcatatactgaccaccatattttccgatgaattccgcaaagttttcccgaaaccgctttccaccatacgcaagtcctgccgccgtggaagctcccgcaccggcaccgatgatcaccgcatcggcatcctttaggagttttgctgcatttttgatctgatcctcatatgcatccttttgaaacacataatcctttgccggaatcccgcataaaaatttattccagtctacatgcccttttctgattttttttaagatcatacttaacctcttttctgaatgcactgcttcggacaaatttctgcacatcttccacaatgaagacaatgattctgatcgattacaaccggcttcccagacacgtcaatgcatttctgtggacaaacagaataacagagtttacagccaatacatttttgtcccacgaaataaccggtttggattttctctcctttccctatcaggatcgtatctcttacaatctttgacggattgctgatatcaaagtattccccctgcgcttcatataactgaaatacttcgagtgcttcccacgtatcccccggatagatttctttcatgtagggatttttttcaaacatgagagtcagattctttttcccaatatttttcacgtttccgcgaagcgatactgcgcgcttgtcttttgtcgccgatattgccacatactgctgctccataagctgttcgtaaaatgcttttccttttgcggtaagaaaatataccccatccgcatcgtagtacatcatatcaataattcttgtctgcggatgtctgcctgaaccaattgttgcaactgtggtggagtgaatttcttcaaccaaaaactttaaataatccatatttgccatttcaaaacttctcctttattgaacatcagccctcacctttggcgagggctgatactttcatcaatatcggcgtttgcctttatcgatgaaatttagaattcgtaaggtggatttcctgagaaatcagcgatcacaccgtgaggattttcaaggtaaaatacctcaaaaatcgggttatctgctgtctgatactgtcccttaacgattggattgttcatgcagccttccttgacactcatgttgtcttcaaatacaaccttgccatgaagacggatccatgcatactctggagaagaaacggatacttcgatttccggattcgcaagcatatctttgtaaacatcctttgtgttgtttgtgcagaaccagagctttccatcctgctcaaaacagaacatgaatggacggcactttgcctttctgtcacgtcctacggttgccagatactgtactgggtttgcctgtaaaaattctactactttctgcataaaatagtacctcctgaattgtttttgttgtaaccctcgttattacatctgatggttgtactataacatggttttaatgtaatgtcaacggttacatcaaacttttgtaacttttttggttacatctgattttttcctataaaataaaagccccaggcttatcatctgaagctccttcctactgctctttttctatacatgaggcaacatcgtttttcacatccgcaagcgttatctgggaaagtttttcttccattgccttttgcacctccagcaatcggttatccaaaacacggtgaatatttttccctaccggacagttcgggttcggattctcatgaaaatgaaacaattgttcctccggcgtacactctaccgctttgtatatatcgagaaaagtaatctgctccaaaggtctggtaatcgtaactccaccggttcctcttgacacctcaatcagccctgccgcctttaactgctgcaatatttttcgtataatgaccggatttgtaccaatgctgcccgccataaaatcactcgtcatcttctgatctgtaaatgtatctatacaggcaaacatatgaattgccattgtaaatctgcttgaaatctgcatgatctgcacctcttttccgtgtttatcctatcagattgcgaatgtaattgcaatggttacgttactgttcactcagtgcctgaacaacaaagtattcaggtgttgcgtgaaccgtaaaaatcgtcatttgaattgaacttataaaattcctctacggctttacaacagaatctttgatctgcagttgctgtgaaatcgttccactttcatataagaaatcggcagttttctgcagatccgccacatcgtcttttctcctttgaataggtccgttccatctgctaaaatctgtgtgtccccactgctttgaattttggtgatggatggttcccaggtcgtgacagcatccacctgtccctgcgtcagtgccgttgcctgctccccattataggaaattccaatgatagaacggttctgtccggctgcaatccctgaaatcgaaggcacatttcccattactccgatgtcctgctgcccggccgcgaacgatttattttccggtggtccagattcaaactctgtaaagttgatgtctactgcatcctcttttaatgcatcggaattttattgtgtcaggcaccttgttcctttaagtgtgtatgtcagatctttatatattcatcgtcatatatgggggaatgcatataattccatcttttacaattaaatttcttggatgaataatataactttcccctatgcactccttgtatttttctctgaaattatttaatgaggtcgttttgtattgctttcctgacttcacttcaatcggaaacatcttatattttaatctgcggttatttgaaataataaaatcaatttccatatcatttcgatgcttattttcattataatatcatggctcctccagattatgcgcatatatattagttctatattttatgattatacgcacattctataaagtcatatgttcatgcttttcctcatttcaaattataaatcttacctaattatatcgggaaaagcagtttgtattatatgctgtgttattagttttctgggatttgcgacgatatattatatatagtactgattctaaacgtattttgaatttatttgtagggaggcttttatatgtcaatgaatattaacggtttaagtaatacctataatagtatcaatacaaatagcaaacagtataaggcattgaaagaaaaaggctggttatctggagtaattgaaaatgaatccatgatgtctccggaagaaaagatgatatatgaaatattcggtggaagggatacgattattaaaaatctgatgaagcagtttgattcggacggagatttactgaatgcaaatggtgttgcaggtatggatgtgactggcaagggtacatcatggcagaaacttacaaatgtatccgaagatcatcgtcaaaaaatgtttgataatgtgaagcgggaatttattcaggaaaaagggctttcaaatggtgacacaacgaagcgttccgatattttcaaagattatcagttgagtgtcagcaaagataagcgtttaagtggtacatggactttagaacaatatgaaggacagtacagagctgctatgtatgcagccgtaaaatcagccaatccaaattggaagcccggacaagcatttgatacaggcattcttgataatgtcacaagagaatccgtagaagctacacttgtccaaaatggtaacagactcgttcgtaattctattgatgtatcggtataaaagggagaaacgtatagactttgtgatgaaacaagacgacatgcataaaagatagctctgtttaatatatgatattcggttggcatatctttttgtgcctccacatttaccataatctgcgataatccatctttcattcgcacataaaacacaatatcaaaattaattgttccttcattgatttctgtgttttccgtattcattccaaccacacgctcaccattaacatttgtaagtcccggttccgttggaactacaccaatcttaggttctccctcaatatattttactacatctctgggattcatacctcgaaattcttctaccgtatcaactaaaatatgtgcaagaatacttttatgaccaagcagtctcttagcctctcatcatattgtgctttatcatctgttgcattcacagcatttgctatttctgtattcaagtcagcatcccaaacgaatggtatttttccagatctttgctgtcggcattgtagagtctgccggctttcattctttcccagttattcatgtctgtttctccttttttctgatctcatcccttattcttctttctccagaaatgtctgcacattttcttttgtaaccttctgatatgcgcgatatatatatttataatttttaaacggatttggattattttcatcctctgtggcaatcgaaaatgcaagatttgccattgctgctgcctgcccttctttatcattatatacggttgctgcaagtgttccgtcttttaccgcttcaagcccttcttttgtcccatctattccaaaaaataccggccggtttgtttccgtatacccgagcttttcataagcatccatagcaccgagtgccattgcatcattattggcaagaacaacttccatccggttgttatattgtccgatcagctgcatcatacggttctgcgcctgcacacggttccagtttgcaatctgataactcagtttttccaatgcaatcccctgttctttcaggctctccgcaacgctttccgttcttataatggcatcctgatgccccatttccccctcaagtatcacatactggattttcccatcatgattgcggtccacatccggatgttctttgatataagctgctgcaagctgtccctgcatctgtccggattgttttgcttctgctccgacataatataactgatcccactgcatcagatcttcttccacaggttcccgattaaaaaatataatggggatatcgtgctcctgtgcggctgtaatgatctgcgacggatccgtccggtctgccagattgacacacagaatatcacagccattaccgatcatttcctgcacctgatcgtcctgcgttctttgcgaatttgcagcatccataatagtcagactgatatcatatccccttttttccagtgtcctgcattcccttttaaaattttccagaagttcccccaggaaggtatctctctggtcataacatgcgacaccaatataaatctgtttcggtatttcctttttttcgtttccacatgcaccatacaaaagaattcccatcagaccaattaatgccatagcgttttttatttttcttttatccatgataacccctgattttaccggctgattgtaaacagcagattccggttctccttcgaaaaaagattctcccgtgtgagaacggtatatgtaatctgccggtctttcattttatagaaaaaattatgtcgttttttaataagctctgcaacgctttcatagcctgcgtcaaactcatccggagcaaccagacattgtgcccatcctgcatccagataataaactgcctccgttgaatttccaattccatagagtaccgccccatacaggtcattatcctttgccgcctccccggcttccacaaagcttgcattatccaaagccatcacgatatccacccttctttgtgtctgtaaattgattttctctttcgaatcattttcttttgatacagaccataaaatttctgcgccactcccctttaatgtatcacaaatccccttcattctttttatcaccgcttctgaagtggcatgctgcgaatagatcccaatcttcttcccgatcagatttccacggtaattttccagaagcttttgggcaagatccgcacccatatggtaatgatcaggttctattgtatgcaatccggacggttcttcgggaaatgtatctcccacggccattataggaacacttttttccagctgttttagcttttgctgcccatcccggtttgcaatcggttttacgatcaccgcatctgctccttttacaatttcctgattcataatctcaatctcatcattgacggtttccatattgtccttactgatgatcacaacatctgcatcatattcccgtgctgccattttcagtccgtatttaaacgctgaccactcgctctcatccacatccggtatgatcaccgcgattgttgccggttcatggccgttttgcttatagatgataaagccgagaaccagaatcacgagaattcccagtactgcctctattatcacaaatgtttttttcccatgtttcattttaagaatcctccggcatatggtgttcctcaaatttcctgcagttttcctcactgtaaacaatttcaggaatgataactgtcactgtcgttccctcatccagttcactttctatctgaagtccatatggttctccaaacaataaccgaagccggttatttacattcacaagcccgactccggagccttttttatgtacacggtttgtatccttcaataacaggtcaatctcctcttccggaatccccattccgttatccgatacctgcataaagatattttcttgttctttccatccgcgaatgaggatttttccgcagtcatccatctcccttacgccgtaattgatcgcattttcaaggatcggctgcagcacaagtttcacgatacaatcatccagaatatccggacggatatcaaatacaacttcaaacttgtttttataccgcactttttgtatattaacataactttgcgcgtgctgcagttcatcccttatgcggataaccgtatgtccttttgaaaggctgatccggaaaagctttgccagctgcgtgatcataaaggccgcttcctcatttttaccgctctctatcatccaggtgatggagtctaatgtattgtataaaaaatgcgggttgatctggctttgcagcacatcaaattcgctttttcttctttcattctgttcccatatgacttttttcatcagttcggaattctgccggtaggattcctgaatggattgtcccagatgccggatctctgttgagcctccgattgcaatcttttcttcttttccttcctggtattcacgcaccgagtgatccagtttcataatcggccgcgatatccgcacggaaatgatgcggtttacaaatacaagcatcattgccataagcagtaaaataagcaggacaaactgctttacatcggccatcttatttgtgaatatttcatacggcataacacagaccaggcgccatcctgtataactgattgcacccaccataacttttctgtggtttttttccaaatattcatcgtaaattttttctttggacgaagctgcctttacgctgctttccgtatccataccattgtcaattcttgcctgatgcggatgataaataatatttccctcaccatcacacagataaaaatactgtccttttcctgacgtattgatccgttccatcatacgtgaaatcccggaatagtccatatccacaagcagcacccccaactgtgtctctgtcccattcgtaagttccacgacacggctggaagaaatcacccagtaataccgacaggtaccgtcatcaaataaattctggacatggggtgtggaaaaatggatattctccatacgtgtttttgcctgcataaaccatccctgcctggtcacatccggttcttctttctgggcaacaaccggctctgctgccataaggcttccgtatccattatatatagcaatgctccttaagttctctttatttgcctcatataaaagatttaaccctttgtggatggaatcgttctgttcccggatatcgttttcctttataacatcataatatgcggcatccgatacctgtctcatattcacaagataattttctatggaatccaccgtctgatccatcatctttcggttattatccacaatattctgctgtgtgatccccgaaaatttccaatataccatcatgcccatacagaccataattaaggttgatattacagaaaatgcaaccatgatggttgactggatatctcccggtttatttttcatttttttcatatgctgtcctgtattttgaaggggataccccaaactgtcttttaaacacataactgaagtaatttggatcggaatatcccacactctttgcaatcatataacttttttccgcggtttccacaagcatgcgtgccgccttatccatacggtattccgtcaggtatccgacaaaagaattccctgtttcttttttgaacatgcttgaaaaataagaatttgacacgcccagttctttacagatatcgtcaagccctaaatcttcctgctgataattgtcgtgcacatattcttttgccctcccgatcagggatttcttggaatgataccgggcatctgccatgtcatcatgcagcatacagcagaattttaaaagccatttctgcaaaacctgcggttctaaattgcacagttcattatacaaagaactgatgcctcccggtatttttgtggtatccatttcattgtttaccataaaatgatacagttcgccaataagttccataactgccacatgatatttttccaatgatttcaggtcaaggaaattatgctgcatgtaaacttctatggcatttgcaatatcttcattttctccaaggcagatctttttgaacacattggacagttctgttttctctccggcatccctttggatttttctctgtggaacaatctcttttaaatttatcgcccggttgcttccatataaaacacgataggaaaccgcttccctggcgctttgatacgatgctgcaatctttgcaatgtgcccacatacctgaccgatccctatggttacttttgcccccataatatgatggatatatttacagaaacggtcacaggcatccgtcagttctgaaatttcttcctcactttttaactgcataatcataatggtatccccaagatagcgaaaacgcttcgcgttccatttttccccgaggttctcccctgcctgccggtctaccgataccgaaagcagccgtatatccataccctccggaacctgacttgccgatgtgtgtatgatcaggcagcaataccacgggcctgtaaaagcaatctggtaatccttaaaataatgcggcatctcctcttccggaatacgtccttcaataagcgttgtatacaaattcgcctgcagcatcggaagggaatccgcataatattttttcaaaagatccgtatttcttttttcactgatctcatagtccagtttctctttcagacgctcaaacacttctgttatttccacagcattgagcggctttaaaatatattcctcaatttcaagatgcacggcttcttttgcatattcaaaatcatcaaacccggtaaaaagcagaatttttgttgccggatactttgcttttatatgtgcacacaattccagtccgtccatatatggcatccggatgtccgtcataacaacatccggctgcatttcttcaagcatgtccattgctttaaatccgttgtttgcatgcccggcaacctgaaagccgagttcctcccatttaacttttttaacaatggcttcaatgacttcttcttcatcatccaccagcaataatgtatacatacctcttcccccatgttattttatttattatagcaatttgtccagataaagtaaaacctttccaacataaaacagagatgccctgcatgtttcatgcatcaccggcatccctgctttttcattatagaggagagtatatgttttattttttctgaacgtatttcagacaatccaatgttactgcaacaaggatgataatacccgagaatacgaactggaggttggtatcaatacccaggattgtgagggagtatgttaatgctgtaaagatacatacaccggtaacaacaccggaaatcttaccaataccaccggtaaatgatacaccaccgacaacgcaggctgcaatggcatccatatcccagccctgtccataagcggcagaaccagatcctaccattcgggtacattcaagccaggaaccaaatccgtaaaggatacctgccataataaatgcaccaagtgttactgcaaagacagaaattcctgaaacagctgctgcctccggatttcctccgactgcataaagatttttaccaaaggttgttttgttccagataaaccatacaatgacaattgctgcaactgcccagagaatgatggtcgggaatccattgacttttggaattaccatatttggaatggtcggctcgatcgctccgaaggaaacaccttttgtcgcataggttaccagtccaaaaatgacaagcatgtttgccatggtcgatataaacggatgcatcttgaatttcgctgtaaaaaatccggctatacttgtaaagaacgtacataatacaatacatgctaccagtgcaagaacgactcttgccggtgtcggtactttcgtaaaatcaaagatgtgtccgaacacaccacctgtatttacaccctgatgcatgataatggttgcggttgtcattcccataccaaccattcgtccaacggaaagatccgttcctgtaagaaggatcagacctgcaactccaagtgctaaaaacattctaggcgatgcctgctggagaatatttaaaatattattatacgtaagaagcggcgttccttttttgattggagttatgatacataacgcaacaaaaataagaatgatcgcgatgtagagtccattctgtaaaaggaatgttctccggttaaatgtatacttataattttcccatttctgtgcctgattttctgcaaatgtaaatttggacaaccggagcagatcaatcagatgatacttgtaactgtacgcatcatgcttccggtctttgatcctctgatactctttttccagttcaatcttttcattggaaacacggttcttatatacataattttcttctttgacctcggcctgggcggaagtctttgccagagtttctttgtgttccttttcaatctttgcaagtttctgctgatgctcctgcagtgcctgttccttttccgctatacaacttgccttaactgcattataatacttgtcaaaattatttttgagataattttctgctttcccgatcagttttgcgatctggtctttgttctgtgcctctaccgcttttgcctgttcaagctccttctggcaggatgcaatctcagaatctttttcccctttggaaagtgttttatctctttttacgttttcgatcctgctctggtacataataacttttgccgtaccatcttttctgagttcatcaatctctttttgtatttttccgacatattcctcaatcggctgacgcagtgttttttcctgctccgctgtaagaatcttgctatttgccatatctgtcccccctgcctataaatatttcgcgctgaggcgaagtaattcttcctgattcgtttcctttgtattgacaatgcccgcaagccgtccgttcgacatgacaccgatccggtttgtaataccaaggatttccggcatctcagaagaaaccacgataatggtctttccctgttttgccatctgtatgatcaggtcataaatttcatattttgcgccgacatcaattcctcttgtcggttcatccatcataaacaccttcggttcacgctcgagccactttccaaaaataaccttctgctggtttcctccggaaagacttgaaatcatatcgtttggtcccagacatttggtatgcatgactttaatttcatttgcggtagcctttgtcattttcggttctgaaagtgccgcgccttttttatatgcattaagatttgcaatggttgtattaaatgtaagattccctttcaggaataatccatttgccttccgttcttccgtaataagcgcgaatccataatccattgcctcttttgcacagctgaaattcataagcttatggttcagataaacacggcctgcggctcttgtgcggataccgaatatggtttccagcaattctgtccgtccggctcccacaaggccatataagccaaaaatctccccttcacggacatcaaatgtaacatcctgtaaatacggctcatattttgtggacaaatgctggattgataaaataacatctttcggctgattatccaccggtggaaaacggttttccagcacacggcctaccattgcagtaatcagttcattcatatttgtttcttttgcactttttgtcatgaccagatttccatcccggagtacggaaatatcatcacagatctcaaatatttcatccattttatgggaaatataaataagggagatgccctggtcacgaagcatccgcatcatatcaaaaagtttatccacttcctgtacggtaagtgatgatgttggctcatccaatacgattactttcgaattatatgagatcgcctttgcaatttcacacatctgccgctgggaaacggacatatttctcatcggctgatccagatttaccgtcattcccagtttccggaataattccgaggcttcatttttcattcttccctcatcgatcatcccaagggaatttaccgggtatctgccaagaaagagattatccacaacatttctctccagacactggtttaactcctgatgcaccattgcaatcccattttcaagtgcatccttcggaccggaaaaattcacttcttttccgtcaaggtatatagttccttcgtctttctgataagttccaaaaagacatttcatcattgttgacttaccggcaccattttctcccataagtcccataactgttccttttctcacatcaaggttgatatgatcaagtactctgttgcggccaaatgatttactcatgccacgtatcgataagataatatctttgctctgatcccccatactatccgctcctatccttttgttttcggggagagaaccgtatttctccccccgaagttaagttgttttactgatttaaaagagctgtgtaagaagctgcattatctgttttcaccatgttgatggcaaaagcatcgtactgtcccggattgcccagacggtttgtgatattagactctgtctgtccgtcaccaccaatgtactcaacatccagatttaaaaggtcatcatacttctgtaacagcggctgataggtagaacttaagaagttatcagaagcattgtaaatattcagccataccttctttgtcggatgggcagatgcatctaactgtttggataccggttcccatacaacggtagaatctgtaaaatctttgtagttatcagcggttactgccacgttcagggaatagtaagatctctcgtcttctttgtatacataaacgtcactgcttaatacatttcctgcatcgtctgcagttccgatacccgtgtcaacatctacaccatccagtgcatttctaagaacacgcagtgtcaggtatgcctgtacgtctgcatgctggctgatcgttccaccgtagccttctgcaattgctgcaactgcatcgctgtttgcatcatatccgaatgttggtacgccgttatcctttgaccatgcattaaacattgacattcccattccatcattgttggatacaacgacatcaatggaatccccgaaagaagatgaccatgtaccaatcgcattgccggctgttgctgcatcccatgtagcacctgctgagtttttcatttcctgggaagcaagttcacggatcacataggtttttccacctacttcaatgcttccgtcctgaacctgtgatgcttttccatcggtattggttcctgccggtgcactgtctgcctcgccgtttttatccactgctgttccaagtgcttttctgacacctcttgtacgggcaatggaatcattgtgaccgatatcaccgattgctaaaacatagccgatcacgccatctccgttacggtcaatcttgtcaatatttttctcgatgtaatcttttaccatggtaccctgaagttctgcaccctgatttgcatcaaaccctacataataagtatctttgttaaaattgagtgctgtcatatcaagctctcctgtggaactgtttgacggctgacggttaaaccataccaaaggtttatccttgtttgcgacagttgaggtagaagtgcctccccctttattgcctgcctgtgtgccaccgccgttgtttcccccatcggctccgcatgctgcggttgaaagtgcaagtaccgccatcatcataattgcaacaattttctttttcataagaatttcccccttcttgttttgtttgtaatgctagtatacgggatttttatctcataaactatagaatattttttggttcacattaaaaattttcatatttttccgttatttgttcaattttttcatattttttctttgtcatttcgtcactttgccgttgatttgtactaaaaaaagccatctttctttacaaagatggctttttaaatcttttataaaaggctctgttatcattgttccagaatcacatgccacgcctcacacagccgttccagcgaccacgcggcatttgccggacttgtggatggaagcaccatcgcttcgatccccgtgaccggaaactggtatcttttataaagctgtcctgccttgtttccgtttgcataaatacgtgttatgttcgttttttccagaatcatgccaatatccgttggctgtacatttttaatactgctgtcacttgagcctttgatgtcacagctttggatcacatcccacagggcaatccggtgggcaagcagcatggcttttttctcctcaattgtatccggaaccggctcctttaaaagtgttgcaagcactttccagaaacggttctgtttgtgcccgtaataaaaattgttttctcttgatttgacggacggcagggttcctaatatgagaatttcggaagctttgtcgtacaccggttcaaacgaatggacaatgtgttcatattccatgagattctccttttaaagttaccaccctatccgtatccatcttactgcttatccttctctaagatctggtcaatcgcagctgtcacctttttgtaaacttcatcactcgtgattccgcccatgatcggatctccgacaatgttgccattacggtcaacgagaactgtcgttggaaatgccataatatttgttgcgtatttaccggcctcactgtccgaatcaagggaaaggttggtatagtctgccccctgttttttcaggatgctttttgcttccgcaattccctctttgttaccatcgagtgaatccgtgtttacgccaatgacctgaccgccctttgccttcagttcttcatttaatttgttgagtgccggaagttcctccacacatggcgtgcatccattaaaccagaaattaacaaccgttaccgcattctgtgaaaaaatgctgctgtccaccttatttccatccagatccttcgcctgaaaagacggaaagacggatgtttctgcattcgcgctttgggcgccggaattttctgttcccatctgcgcggtaagttccgttacctgatcctcgattttcttaatctcttcgatatccttatccagctttttcaggtctgcctccgaaaactgatccttcacatgatccagctgtgtctccagaaacgttccataattttgttctcctgcgtctgcagctttgtctttgtcaatgttattaaaaaccgtattccacaattcctgatgtttcgcaataatggcattttccttttcgtacagtttgttgagttctgcattaccagcccctgtatcttccgcagactgtgcctgcgtttccgtcacattgctgcctttttccgaggcattgccacaagcggcaagtccaaataccagagtcataaccagtaacattactgtaagttttttcattttaattagtctccttcttcttttttgatttttccgcaaatccatacttataactgattgcttctaccggacattccttcacacatgctccgcagcgtatacattccgtatgatttggatgccggaccacatccacatccattttacagacaccggcacatttgccgcaagatacacatttaccggtatctatatgcatctataaaagagatactttattaaaaagcgcatagactgcgccaagcggacagatccatttgcagaatgggcgataaaacataaggcttaacaacacgaccgcaaccagtattccggccttccatgtaaacagctttcccaatgccgcacggatgcctgcatttgcaatcgaaagtggaagtgccccctctaatactccctgtggacagaggtatttgcaaaaaaatgggtcccccattcccagctggttcgtcaccaatataggaagcagaataacgaaaaccaaaagaattccatatttgataaaccgaagcggctttaacttccgggtggatatttttttaaatggaatcttatgcaaaagttcctggaaccatccaaacggacacaaaaaaccacacacaaaccgtcccagcagaacccctgccaaaatcaggaaaccggttatataatatgaaaacttaaattttgatgaaccaaccactgcctgaaaggccccaatcggacacgctcccgctgctgctggacaggaatagcagtttagtcccggcacacagaccgtctttgcattaccacggtagatctctcccttaaaaaaattcggcagatgaatattcgtaagaatcgttgccacagcctgaatccacccacggacatgtgcaagaacatgtgatgccttatgcttttttttatccaatgccaacacactccagacataatttaattgctttggagaataccgtggctgcctctccacgcatcgcgccataacaaaccataagcattgctgctgcaaggagcagcagctgtacggctgctttcttttgtagtttcattccctttcattcctttctttttgcttgttacaggttatcagccaactgtgaacgtcctgtgtatgaaattctaagatatccttaagaaaatctgaagtatccacgcccgaatatacagaagccttcgcatatactgatgaagcctcatgcaaactcattaaggttgaccgggaacgaaatgatcaatatctgaccggcacaaaacgcaaaatctatacttttttgtatgatattctcccaacctgccagttttatcagattgttcaggtatccgatacaccgattgaaaactatggtgtactcattgcatatgacggactgctgctgtttctgagcaccggggccggcatccttattttcgggaaaaaagatttaaaataggagaattttatggaattgtggctggaaagttgtatcgtggtactggcggttcttgtccttttattatgtatccgattacatctggcaaagaaggtggcactggaaatccatgccgcccttccggagaaattaaataccgacaccaatacaccgattacactttcctgccgggataaagatttgtgtcttctggcggatacgctcaaccagtccctggaacagctccgtgccatgcagcattgttttaaacagggaaatacccagttgcagacttccatcaccagcatttcccacgatctgcgcacaccgctgactaccatctgcggctacctggaacttttggaaaaggaaccgttatctgctgtctcccgccagtatgttgccatcatccgggaatgcacaaaggtgatgacacaactgacggaagaactgttccggtattcagttgtcctgtctgtgcctttggcacagcccctgcaggaagtgtcggtaaaccgcattttagagggaagcattgccgcaatgtatgtggtgctcaaaagacaccggatcacgccggacattaccataaccgaccataccgtgctgcgcacgctcgatccgtccgccttatcgcgcgtcttttccaacctgttaaacaatgccgtaaaatacagtgacggggatctttccatcacgctttccgaagacggcatcatcaccttttccaatacagcggcagcactcagtgaagtggaagtcggcaggctttttgaccgcttctataccgtggaaaatgccaaaaatgcgaccggtcttgggctttcattgcacggacactggtggagcagatgcacgggcaaatggatgcctcttatgaagcgaggaggcttgtcatccggaggcagatttagtttatttttttataaaacagaccaaaaataaagcaactacaacaactcctgtgcctatgattatacacctctttgctgtggtgacttctttttgatataagcgaaataattctccggaatgattctttctattatggagaccaatcattgcatagatcaaaaagaatgcaactccgaatattaaaattacactcagtcgtccccaggcagaaggaatggtgtattgaccgattatgatacatagcaggatcataaaatacacgattttattttgcccatatcctaaaggaagttctttttgataatttctatacatcatttttccataataaacgatcatgcatattaaaaacaatagatagattatcatgaccattgatcccattcataatcattaccatataaatttgggacaatgtattgcataagtaaggatgtagcgttcttattattggaatcataataaccaccaccctcatagtataccttattaattttgttgctttcctcatcggtaattatatacttacatgtcttgctatatgtagtagattttttacctgttttgctgtcttttccataatattttaagttatatttgtcagcagctaaggttatttttgtaccaatattaagtatatcaccgctaacaacaccaagcccagcagaaattatagcagctactattctacttgctattgaagaaggaacagccataccagtggcaataccaactgctaatgcggcaacagttccactaaatgttctgatagaatatgttgtgtgaacagctgaaccgatattctcatataaatacatactatgtctatctaaatttactctattatagacaggaaatgtaccaattctgttaaatgaataagttgacggcaaaatatcggttgatatagtctcaataatatcattcacattaaatctatcgttagcaaaagcatctgatgcaataatttctccgttgcttctgtttgctgtagcggacgcaatcaaattatcttgtgaattatattgctctgcgtatacgatatttccagaatcccataaaactaatttgtaatccccaatataggaaatacttttaccctgttcattttgtatataggtggaacttgtattctgtgcaaatacagttgcagatgtagaaaaagtaagacaaatgattaataatacagaaattattcgtttattcataaagaatcctccctttaatatccatctcttttatataagaatagctacataatttaaaaaatatataattttgaagagtacattggaatcaccttatcctttcaaatcatcctataaaatatagtgttttcataaaaattatataataaaattactatattttcaatattttccgtaaaaatattgaaaatataaacgagataattgtgaaaaaatcataattaataagattagcggtcaatgtgagtgggagtacggtgtataggttgacaccaaaaaggcactcccttatacttgagaaaaacggtgcaaaaaactattaataaggtttccaaagtttctgggagcatctttgatttaagacggatatagaaggggcatctgctgacatttgaaaaaaatccaggaattcacgcttggtaaaggattcaccttaagaactaagggacaaaataatctgctccggagagagttctcggacacgcaaaaatctttttccggatgagaaacaaaagaatctctatcagatgtaacttttgcgatagaatgattaagagtttctttaagttttgaatggaacataaatatgtgtctcctaaattaaaaagattttaatttctaatccgtggatcgctctcgtcacctcataataaagtcataatcagaaagcaatcttacatttcaaaaaatgtcacacttcgtaaataggaaaaagcaaggaggaacgaaacgtggaatatgttaccttaaacaacggaatcaaaatgccaaaactcggatatggtgtttaccagacaccgccggaagacacgaagcactgcgtgctcgatgccattgaaatcggctaccgaagcatcgacactgcacaggcgtattacaatgaagaaggtgtagtgccacactcgcttcctgcggtctgccgcgtgaagaatttttcctgacaaccaaagtatggatcaccaatgccggctatgaaaaagcaaaggcatccattctggaatccatggaaaaattacagaccagctatctggatctgctgctcattcaccagccgtttggcgattattacggcacttaccgcgcgatgaaagaactgtataaggccggaaaactgcgcgccatcggtgtatccaatttcggtccggaccgttatttggacatccagcactttgcaaccgtaaagcctgcggtaaaccagatcgaaacccatgtcttccagcagcagaaagttgccagagaatatttacagaaatacaactgccaaccggaatcctgaggaccgtttgccgagggacgaaacgatatttttaccaaccctgtccttacaaaaataggtgaaaaatatggaaaaactgccgcacacttttgcacccgggcggatgtgttgcataatctttcgctccgcggggtgcgcatctttgcaggcttactttttctatttctcattcccttatctatcagcgctcctgaatttcttttccgctgagatgctcgatcgtaatttcgtaaacctgtacggctcttccagactgggcaatttctccttctatcagagcatcatccgggtaatacttttttgcaatctgtctcaccagatctattgtccggtttctgtcttcgagaatccggcatctcccgaatactaccacactctgtaaaaacggagtccacggttcttctttgaccatttcattcccgtaaacggtaaaacatactctgtcatcttttttaagtgcatctgccttatgtccgaccgccgcgccgtgaaaataaattttaccttcctcttcgctgtaataaaaattcaccggaacggcatatggacaaaaaatataaaaattttcaatccggcataataatccggatcagatgtttatccagcatgattgtccggttccagggattgataataatccctgcaatctccggcacagtaagtgctgcttcaaacatcctgccgatctctgataaaaatgtcgacttcacctgatctgcaccttttaattcttcctcaaagctggtaaatgccgaccaccagattttaccatccggagttctcactgtctgtaacttcatttgtgcctgtgccggatccggttccactgcaacgatcagttgtcctccctctttcatccgccgccggatcaccgtcaacgtatgtgcaagctgctcctgtgtggcttctttctgaagcgcaaaaattgcatcttctattctttcattgccctttaatccctcatcctgatattcatttttcttgtccatattttgtatcctctcttgtctgttcattctattataaaatgagtgattcctttttgaaagccatttctttcagattctccttttgggagaattctttcgacagaaccgtccttctctttctctgagacaacgaacctccaactctccaactcatagattgtattctctgcacgtttcttctatactgaaaacagacagatgctgcagcaactgtctcttacgaaggaggttccactatgtcacaaaataatattggcgaatttatacaacaatccagaaaagccaaaggactcacgcagaaagatctcggtgaccggatcggcgtcagtgataaaaccatatctaaatgggaaaacggaaacagcgttcccgacacctcgattttaaacgaactttgtgcttctcttgatatcaatgtcaatgaacttctctccggtgaaaaactaacaccggaaatctattctatgaaagcggaggaaaatatgatgaaccttttagaagacaatcaaaaacaacagcgctctaccatccttccctttgcagcgggtgttattctgttgctcctgactgggctgcttgcaatatttacgcatgtattttcgccggatatgttggagctttgggatgttccaacactcctcatttacatcggaatctgttgctcccttgttttattgagcggaaagcgacataaacaggaaatcattcactttctccggaaaattgtggtacctgtcggatgtatctgtcctctgttggggataaaccagtttattcatcagttccgtgatccggctgatattggttttttcgtaaaccaatgtgtcttatttgttctctattccctaattgcctatgtgattctggttcttatcgaacagcatctggacaaataaaattttatatgtaaaaacagcccctgtacctattggtaagggactgtttttattttatcttacatattcttaaccgttgcaatatccactggagtaagctccccatgagcggtctctaaagaacgtgccagcgcatttgcggtatccatagcggtaatacagtacacaccggtctcaatcgcattacggcggattaagaatccgtctcttgtcttatcaccgttaccctgtgtcggtgtatcgatgacaaggtcgatcttgtgaccaaggatcagatccattacatttggtgactcctgcgaaatcttattgacacgcagtgcattgacgccgtgctcctgcagatactttgcagtgcttcgtgttgcgtagattttgtagccgagtgcctcaaaacgctttgccacaccgacagcctccggcttatcggcatcctttaccgtcataatcatctgcttgtatttcggaagctgtacacctgctccaaggaatgctttatacagtgcctcattgaatgtctttgcgatacccagacactcaccggtagatttcatctccggtcccagactgatctctgccccacgcagtttctcaaaggagaataccggcatcttgattgcgatataatctgccactggtgcaagtcccggctcatagcccagaccacggatcgtatttccgatgataaccttcgttgccagatcgacgatcggaatacccgtcaccttactgatgtacggcacggttctggaagaacgtggatttacctcaatgacatatacttcctcgttcatggcgataaactggatattgatcagaccaacgacatgcaatgcctgtgccagacgcttcgtgtattctacgatggtatcctttactttctcgctgatcgttggagccggatatacggaaatactgtctccggagtgcacaccggtacgctcgatatgctccataataccagggataagaatatccgttccgtcacatacagcatcgacctcgatctccttaccctgtaaatatttatctacaaggattggatgatcctgcgcgatacggttgatgattccgatgaattcctcgatctcctcatcattgaatgcaatcttcatgccctgtccaccgagtacataggaaggacggacaagtaccggatatccgagacggttggcaacctctttggcttcctctgcggtaaatacggttccaccggcagctctcggaatatgcgtcttttcaagaatctcatcaaacagctcacgatcctctgcggcatcgacatcctctgcctttgttccaagaatcggaacgcccatcttcataagcgcctctgtcagtttgatcgctgtctgtccaccgaactgtacaacagctccgtccggtttctcaatatttacgatggactcgacatcctctgcggtcaacggctcaaaatacagcttgtctgcaatatcaaagtcggtggaaacggtctccgggttgttgttgataatgacagtctcccagccttcctttgcaaatgcccatgtacaatgtacggaacagaaatcaaactcgataccctgaccgatacggatcggaccggaaccaagaaccagaacctttttctgcggtgtggtctctgcagcctcgttctcacttccgtaaacactgtagtaatacggtgtctctgcggcgaactctgcggcacaggtatccaccatcttatatgctgcaacgataccgtttgcataacgcatctgtttaatctcttcctcggtctttccggtaagctctgcgatgacgttgtccgggaactcgattctctttgcttcttttaacagatctacggtcagctcctcactctttaagcgctgctccatctctaccaggattgccagcttatcgataaaccagcggtcgatcttggtaatttcataaatatgatcataggaaacaccgcggcgcagtgcctctgcgatcacccagattctgcggtcatcgaccacatgaagctgtgcctccaacgcttcatcggacagtccggtaaaatcataggacataaggctgtccacatgctgctccagggaacggatggctttcatcagtgcgccctcgaagttatcacagatactcataacctctccggttgctttcatctgtgtacttaacgttctctttgcagtgaggaatttatcaaacggaagtctcggaatcttcactacacagtagtcaagcatcggctcgaaacttgcataggtcttctgtgtgatggcattcttgatctcatcaagtgtatagcctaatgcaatctttgcggtaacctttgcgatcgggtatccggttgccttagaggcaagagcggaagaacgggatacacgagggtttacctcgatgacacagtactcaaaagaatccggattcaatgcatactgcacgttacacccaccggtgatttttaactcattgatgatgtttaatgcagaactacgaagcatctggtactctttatccccgagtgtctgggaaggtgccactacaatggaatctccggtatgcacaccaaccggatcgatgttttccatgttacatacggtgatgcagtttccgttcgcatcacgcattacttcgtactcgacttccttccatcctgcgatacagcgctcaaccagtacctcaccgacacggcttaaacggagtccgttgcttaagatatcgaccagttcctgctcgttatgggcgataccgccaccgcttccgccgagggtaaatgccgggcggagcacaaccggatatccgatcgtattagtaaacttgataccgtcttctacggtatttacaacctgggaagctgcacaaggctcaccgattttttccatggtatccttaaatgcctgacgatcctctgccttaaaaatggtctctgcggttgtaccaatcagttttactccgtgctcttctaaaaagccggactctgccagttccatacccagatttaatccagcctgtccaccgagtgttggaaggatgctgtccggtttttcctttaaaataattttttcaagaaccggaagtgtcagaggctcaatgtatacctgatccgcaatctgcttgtcggtcatgatggtggcagggttggagtttaccagacatacctccacgccttcttcctttaaggaacggcatgcctgtgttcctgcgtagtcaaactcggctgcctgtccgatgacgattggtcccgaaccgattactaatacttttttgatatctttatttcttggcattactgattccctcccatcatctgaataaagcggtcaaacaggtacgaagagtcctgtggtcccgggcatgcttccggatggaactgcacggtgaaaatattctttccgacatactctaagccctcgttggttccgtcattgacattgacgaatgcaggctttgcaaccttcggatcaagggtatcggtatctaccacatacccatggttctgggaagaaatgtaaacacgaccggttgacaaatctttcaccggatggtttccaccacggtgtccgtatttcatcttgtgtgtatccgctccgttggccagtgccatgagctgatgaccgagacagatggcaaagatcggtacgtcacttgcatacagtttctttaattcttcaataatcgctgtgcactctttcggatctccaggtccgttgctgagcataatgccatccggattggctccgagaatttcctccgccgatgtgtgtgccggataaatcgtcacctcacagccacgggcatttaacgattttgcgatattgttcttcgcaccgaaatccatcagtgcaactttctttccgcttccctttaatacgttcttctcgctgcaggtaactttatccacaacatttccggttgtatattctttcagttttggaagaatttcatccagattataattttcgtttgtcgtgatcattccgttcatggttcccttttcacggagaatcttggtaagcgcacgggtatcaattcctgcaattcccggaatgtcgtgctttgtcaggaaatcctgaatgcttccctgacagcggaaattgctcggcatacgtgaaagctctcttacaatatatccgtccggccacggtctggcggattccatatccggtgtaattccgtagtttccgatcagcggatacgtcatcacaaccgcctgtcctgcataggacggatctgtaagtacctctaaatatccggtcattgaggtattaaatacgatctcactgatgatttcgcgtgtagaaccaatgcttgtacctgtaaacacggttccgtcttccagtatcaaaaaagctttcattctttgccctgcctttcttgcatcttggcaaaaaaaaagagagaatctcttttttttaccttgagttagctttacctaaattgtaaaaattttatcacaaatcgtcacttttttcaaccttttttgcaagagaaaaaagtgacatattttatgaataaatatacatattatacaattccatgcatccacaataccatgaacccgacagcaactgccgcacagactgccagaccgccaatgctggttccaaggatcacgccggatggaatttctttcttttcatatatcgcgcgtgccacggtttttgcctgcatcggaacaaacgaacacggctgtgttacctccattggatgaaaccggcgtttggtaaaataatccgctgtccatgccggcattgccgataacgtcaccctctgtaactgatattgatttgccgcatacgccttcatttcttccaacagacatctgccacatcctctgcgctggaataccggaagcacatatagcatggtaatatgtccctctttctgcattcctgacatggcgatcatatgcccctgttcaaaaattccccacatggtgagagttccttctgcaatcatgttccggatgtttgtgttttccgtatattgcagaaatatatgaatcatttccagatccgtgatccgcgcacgcagacagtaatcaaagacaccccttgcaatactgagcgcttccggaatctgatcttccgttaaaatctgtgctttcatttacgcttcctccttattttccaacagccggtccttcagaccactgtaacgtctctgttgggaattattctcaatcatttgttcaaatgttgtatcatctcccactatcgtaacacatttctttgctcttgtaaccgccgtatacaataaattccggttcataagcatgcggggtccggaaagaagcggaatgacaacggccggatactccgatccctgtgatttatggatcgtcacagcatacgcaagttccagctcatccagcagtttgtacgaatattccaccatacgcccttcatcaaaatttaccgtgatggtctctgcaaaatcattgatctcttcaataattccggtatctccgttaaacaccccggttcctttgtctatgcagagtccatatttgctgcggatctcccattccagctgataattatttttgatctgcatgactttatcgccttcccggaaaacgatcgccccatgctctttctccttttttctgtccgatggcgggttcagatacatctgcagaatcgtattgagacgttctactccgagcagccctttccgcataggcgtaagcacctggatatcgtattcgcttgcccccacaaatttcggaagtttctgcttgatcagctgcagcgtaacgttgataattttatctgcctcataacgcttcaggaaaaagaaatccatgctcttgttatccaggctgactttttctccccggttaatcttatgcgcattgacaataatatcactggtgcttgcctgtcggaaaatttttgtcagcattaccgtaggaaacatcttcgaatcaataatgtccttcagcacacttcccgcccctacactcggcagctgattcacatctcccaccaggatcagacgcgtgcccggtagaattgctttcagaagggaattcatcagggaaatatccaccatcgacatctcatcaataatgatgagattggtctccagcggattttgttcattgcgctcaaatccggcatttccttccattccgccattcagttcgagcatccggtgaatcgtccgtgcctcatacccggtggtttcgctcatgcgctttgctgcccgtccggtcggtgccgccagcataatatcttctccggataattcaaaataccggatgatcgtattgatcgtcgttgtttttcccgttccgggacctccggtaatcacgagaacaccgtttcttacggcttcctttaccgcttctacctgatgctcatcaagatccattcccgtcttcttttcaatctttcggattctgtcctcaatttcgatatccggaacatcaaacacagcattcagctgtgtcagacgggtagcggtatttgcctccatataaaaataggttgccgcatagatctgcgtactgtcttccacctggcgcataatgatcttgcgatccatcgccagattcatgtaatgctgctcgatgtgctccgggtctacctcaagaagccggcttgcccgctgcgtcagttcctgcatcggcagataggtatgcccctctccggcagcctgcagcagcacatactggataccgcttcgaatccggaaatcggaatcggtgcggattcccacacgggatgcgatctcatctgccgtgcggaatccgaccccttccacatcatctgccatacgatatggattttctttcagtattccgtatatttcctgcccgtatgttttatatattttcactgcaagtgtggtattgatcccgtattgctgcaaaaaaatcattgcctgccgaagatcttttttctgattcacctgatccgcgatttccatcgcctttctctggctgatgcctttgatctccgccagccgctccggttcttcttcaatgatacggaaggtatctgccttgaatcttcgcacaatccttgccgctaaggcaattccgatccctttgatcgcccctgatcccagataccgctcaattgccacctcatcctgtggtgccttttcttcgaaactctttacctgaaactgtctgccgtaagtcggatgttctgtataacttccctttgccttaatgttttctccctcggcaatatccgaaaatacccccacacaagtctcttcttcttcgttacacaccagaacaagtacggtatatccgttgtctgcatttcgatagatgatgtgatctacatatccttcaatgctctcaagattctcttccaaaatatgttccccattctctaaaaaagagactgttgtaaacagtctctcctcttttctttgtgctgatgttactactggccaatattacgtttcatctgctcatacagtgtctgtgtatagctttctccgatctgatccaccatttcatctgccaccgtctcgattgcctgatccatatacagatctttgtactgtgacatcgtagaatcctcgtcatcatccgaggtaaatgtatctttcatctgtttgatgacctgctccacaaaataagattcaaaatctttgatgacaccttttaattgttcctctgaagagtccgatgaaatattctttaatgaactctgaagagaattgctctgctctgcacttttgtttgcatttgcaaccgtataatttgtactgattgatgaaatatccatagtatatccctcttatgtaagtaattccgaatcgctgcctatcgtttcaggttatttgccgtctccagcatggaatccgaggtcgtgattgccttggaatttaattcatatgcgcgctgtgcaatgatcatatttaccatctcatcagcaacctgtacatttgaagcttcgatgtagccctgatatacaccggtcttcgtcaatcctgcattttgtccctccagcatcggatttcccgaagctgcagtcgctgcaagtttgcttcctgacattttctccagtcctgccggattgttaaactgatagattccaaaagactggtttaatgacactacattgccggttgcatctttatagccaatcgttccattgctcgaaaataccatgctttccgaagatacgcctctcggcacacgaatggtatttcctctggaatccaataccggaagcccctctgaggttgccagaattgtgtttccattcgaatcctgactccaggagaagttaccgtttctggtgtaatatgtctgtccatccacaccccgcacggcaaagaatccctttccttccagtgcaaaatcggtcgggatctctgtctcttcacgcgccccctgcgtatagttggacatggtcgctgccactctggttccgagtcctacctgtgcacctaccggtttattggcaccatttgccgtcgttgtctttgtctgcagtgtctggtacagtaaagatttaaactcggtacgttccgtcttataacctgtcgtattcacattggacaggttatttgaaattgtatccagatttgtctgctgcgcaatcattccggttgccgcagtataaagtgatctcatcatacgcttctatttcctccttgcggtctttcagcggctattatactttaccgacattgttaactgcccggtcaagtgttccatctatggaagtgattaccttctgtcctgcctcataggctctctgaattgtaatcatatttaccatctcatttacaacatttacattggaagtctccagtgtgccctgctctatattggcatctgttgcaatccggtttcctcccggaagaaggttatacagattctcaccgtatttttcaagatagtcataattatccacatccaccatgccgatcgttccgacaatctggttattctgcatgacgtatcccagtttattcacggtaatcgaagcatttggatccagacgtatataattattctgacccggatcgccattcattgcaccagtggcatttaaaacataatcgccatccttcgtcaccagataaccctctttatttacggtaaaggctccatcccgcgtatacttcacggaagtatttccctgcttgtccgtgaatgccacggcaaaaaagccgtttccttcaatcgcaaaatctgtggtgttatctgtcaccttgaaatttcccgtggaataatccgtatatacctgtccaaggtgaaccccatatgtaatatctccaagctttttcggaatccccatgttagaagaatccttaatgcgcaaagacatctcatcggcaaaagtacgactcgtcgttccttcttttttatatgctgttgtgtctgcgtttgccagattatttgccagaatatccagacgcttcatttcgtttaccattcccgtatgggcggtatacaatccttttaccatttatgacacctcaattttcacagttttaatttatatcggccaatgccctcacgagctttatagacatgcgataaaaagtgcgcataaacgcgcactttatgcattaatcctcgtctctttttcctgcaaggaattctacatattttccggttccgattgctacacaggtcataggatgctctgccgtcatcgtgttgattccggtacgttcttcaattagttcctccagaccacgaagcaaggagccgccacctgtcaggacaattcccctgtctgcaacgtctgccgccagttccggtggagttttctccaatacggaatgtacagcttccacaatctgtaatgttgcctcacgcagagcttcctctgtctcctcagagcttaccgtaatggttcttggcagaccggttaccagattacggccacggacatccatcgtctcattctgtgccagtgggtagcatgtaccaattttgatcttgatatcttctgcggtacgctcaccgatcaaaagattatgtttctttctcatatagcggaccagggcttcgtcaaaatcatctcctgcaattttcacggaagtgctcacaacagaaccacccagagaaatgactgcgatatccgaagtacctcctccgatatctacgatcatgtttccgcatggtctggaaatatcaataccggcaccgattgctgctgcaattggttcctcaataatctctacttcacgggctcctgcctgataagttgcatcctctacggctttcttttcaacctctgtaacaccactcggtacacagacgctgatgcgcggcttacgaaagctcttctttccaagtgctttctggatgaaatacttgatcatcttctctgtgacggtataatctgaaatcacaccctggcgaagaggacggactgccacaatgtttcccggtgttcttccaagcatcagtcttgcttcctcaccgattgctttaattttattggtatctctgtcaaatgcaacaacggaaggctcttttaatacaacaccttttcctttaatatatactaaaatactcgcagtacctaaatcaattccgatatctgatccgatcatcccgaatgccccttcctattttctttttatctttctttatcaaaatccgatctgcgttcatggcgcaaatctgcagttaatcatatttttatgcatacagtaacattatatacaattcatcccatttttcaaacatttttttataggttaaagcattttaattaaattttaaggaatctctctgttcccgggacaaaaatctgtgcattttcgctattttatacgttcttcgattccagatacggttttaaaaactgaccggtatacgattccggaactttgcagatttcctccggagtcccctgtgcaatcacggttccgccaccgtcaccgccttccggtcccatatcaatgatatagtcagccgtcttgatgacgtccagattatgctcgatgacgacaacggtatttccgccgtccgaaagctttctgagaatctccaccagcttgtgtacatccgcaaaatgcagtccggtggttggctcatccagtacataaatggtttttcccgttccgcgtttgctcagttctgtggcaagtttgatacgctgcgcttctcctccggataattctgtggaaggctgtcccagttttacataggaaagtccgacatcgtacagtgtctgaatctttcggtggatcgttggtacatttttgaaaaattccaatgcctcttccaccgtcatatccagcacgtcatagatcgtctttcctttatagcgcacttcgagtgtctcgcggttatagcgcctgccaccgcagacttcacacggcacatacacatctggcaggaaatgcatctcgatctttatgataccatctccgctgcaggcctcacagcgtccgcctttgacgttgaaactgaaacgtcccttcttatatccacgtgcctttgcatccggagttgccgcaaacagatcacggatcatgtcaaacacaccggtataggttgccggattcgaacgcggtgtgcgtccgatcggtgactgatcaatatcgataatcttatccagttgttccacacccagaatatcatcgtgatctccggggatgcagcgtgcccggtttaaagttcgcgccagatgcttatacagaatttcattggtcagggaactctttcccgatcccgatactccggtgatacaggtcatgataccaagcggaacctgcacatcaatatttttcagattattttcccgcgctcctttgatggtaagaaatccggtcggtctgcgccgttccgatggtaccggaatctttatccggccgctcagataagcgccggtaatggattttttgcatttcatgatatccgccgcagtaccggccgcaacgacttctccaccatggacaccggctgccggaccaatatccacaatgtagtcggccgcacgcatggtatcctcatcatgttccacgacaatcagcgtatttcccagattcttaagattcatcagtgcatgcagcagcttgtcattgtcccgctgatgcagtccgatactcggctcatccagaatatatgccacgccgaccagtccggaaccgatctgggtagccaggcggatgcgctgcgcctctcctccggacaaggttccggtcgcacgtgtcaatgtcagataatccagacctacctcctgcaaaaagcccacacgggcacggatttcctttaaaatctgattgccgatgaactgctgctgttccgtcagctgcatttccgccagatatttcacgagatcctttaccgacatatcggtcatctcatatatatttttgtctgcaaccgtaaccgcaagagaactctgcttcagacgctgtccatggcaggcagcacacggtgtaatacgcataaactgctcatattcctgcttcatcgtgtccgatcccgtctcccggtaacggcgctcgacatttttaataaggccttcccagttcagatcatagacgccttctccacgctgtcctttataatgcacctttaatatccggccatctccgccatgaatgagcatatgccggatttcttttggcagatctttatatggtgtatcgagagaaaatccatatccttccgacaacgcttttagggtagcataggtatagctggacggatcagtgcaggactgccagcccattacctgaattgccccctcggaaatagacagtgtcttatccggaatcatgagattttcatcaaactccatcttgtaaccgagtccgtagcagaccggacaggcaccaaacggattattaaacgaaaagcttcgcggttccacctcatccacactgattccgcaatccgggcacgcaaaattctgggaaaaattcattggttccccgtccaccacatctacaatcgcatttccctcggtcagctcaaaaacattttccagggaatcggtcagacgtttttcaattccgggttttaccaccagacggtctaccacaatatcaatattgtgtttgatgtttttatccatcggaatttcttccgaaagttcatacatatttccgtccacgatcacacgcacataaccgcttttttttgccttctcgaataatttctgatgttcgcccttacgcccgcgcacaaccggcgcaaggatctggatgcgtgtgcgttccggcagtttcatcacggcatctaccatctgatcgatcgtctgtttctcgatggcacgtccacacttcggacaatgtggaattcctatgcgggcatacagtagtcgaaaataatcataaatttccgtcacggttccgacggtggaacgcgggtttcggtttgtcgacttctgatcaatggagattgccggcggaagtccctcaattgactctacatccggtttttccatctgtcctaagaactgtcttgcataggaagacaaagactccatatagcgccgctggccttccgcataaattgtatcaaatgcaagtgatgattttcccgatccggacaatcccgttaaaacaacaaattcatctctcggaatatctacgtcaattgcctttaaattgtgctcattagccccacgtattttaatgtactttctctgttttctcggcattttatttcctcctgtcggtaacgtccctgtttttatttttcaatatcacgcagcatatttttcagtgacaccatcttatcacgatactctgccgccgcctcaaaattgagttctgcggcagctttcttcatcttcttctggatgtccccgatcagtttttctaattccctgcggctcatggattccggatctttatcaaattccatctcctctgctgccacttttttggagattgcaatcagatcacgcaccgatttctggatggtcttcggtgtgattccatgttcctcattgtacgcctgctgaagcttgcggcggcgctccgtctcatcaattgccacacgcatggaatccgtgatcttatccgcatacatgattacatgtccctcactgtttcttgccgcacgtccgatggtctggatcagtgaagtctcggaacgaaggaatccttccttatccgcatccagaatcgccacaagcgtaatctccggaatatccagtccctcccgcagcaggttgataccgacaagtacatcaaacacgtccagacgcaggtcacggataatctctgcacgctctaaggtatcaatatccgagtgcagatattttacacggatgccaagttcgctcatatactgtgtcagatcctccgccatacgcttggtcagtgtcgtgatcagcactttatggtgatttttcgtctctttgttaacttccccgatcagatcatcgatctgcccctcaaccggtcgcacggaaatctccgggtccagaagtccagtcggacggataatctgctccacacgcagcaattcatgctcgttctcatagacattcggcgtagctgatacaaacaacatctgatcaatcttgctctcaaactcttcaaaattaagcgggcggttatcgagtgcggacggcagacggaatccatagtccaccagtgtctgcttccgtgagcgatcccctgcatacattccacgcacctgtggaatcgtaatgtgggactcatccacaataatcagaaagtcatccggaaaataatccatcagtgtctccggcatttctccctcggcacgtcctgccagatggcgggaatagttttcgatgccgctgcaaaatccggtttccttcatcatttcaatatcaaaattcgtgcgctccgcgatacgctgcgcttccagcagcttatcttcacccttaaaatacctgaccctctcttccaattctgcctcgatacggtcacacgctgcgttcattttttcctgtggcaccacataatgggacgccggaaacacagccgcatgctttaatatacatttgatctctccggtaagcacatccacctccgtaatccggtcgatctcatctccgaaaaactccactcggatcgccgtgtcggtattattcgccggaaaaatctccagtacatcgccatgcacccggaacgtaccacgcttaaaatccatctcgttgcgcgtgtactgcatgtcaatgagtcccttgatcacatcatcgcggtcaatctccattccgggacgcagggaaaccatcatgttcatatagtcatccggactaccaatgccatagatacaggatacggatgccacgataatgacatcttttcgctccgccagcgctgccgtggcagaaaggcgcagcttatcaatctcatcatttaccgcggaatccttcgctatataagtgtccgactgcggcacatacgcttccggctgataataatcatagtaggagacaaaatactcgacggcattctccgggaaaaattctttcatttctccgtacagctgccccgccagtgtcttgttgtgggaaataatcagcgttggcttattcagcgcctgaatgacatttgccatcgtaaaggtctttcccgaaccggtcacacccagcagtgtttcaaactggttgccttctttgaatcctttgactaatttttcaattgcctgcggctggtcaccggttggctcatatggggcatgtaatttgaactccataatgccctctcccttctcaaatttatcgtaaaattaactttattccatgaaaaaaaagataaaatccatatctttatagtctgcacatatatgctaattttactacaaagatctgactttgtctatcttaatcagaacatttgttctcatctttctttttgcctgtaaagtgtgtatgataacagcaaatacatatcacaaaagataaggagattttgtatgaaaagaagaaaagaatttcatttatttccccttggaatattgttatttaccctgacattaaccatagtttcaggccggattgctatccatgcggcagatctgaatacagaactgcccgcaaatgactccacggaaatttcttccgaaattccaacggaaacaccggtggttccttccacggaaaatcccaaaccggtattgcagggacttatccatgataaaaacggacatttctatttttatcagaatggaaaaaagctgaaaaaccgttggaaaaaggttggcaagaataaatactatttcgggaaaaacggacaggcagttaccgggaaaaagcatatttcccattacttatgttactttaataaaaagggagttctgacacgcaaaatcgataaaaacaaaaagatggttgccctcacttacgacgacggaccatcggtttataccccaactattttaaaaaccctgaagaaaaatgattccgttgccacattttttgtggtgggcagccgcgtatcgacttactccaaaaccgtacagaaggcttatgacaacgggtgtcagattggcaatcacacttatgatcacaaaattctgacccgggttgggaaaaaggaagttcaaaaacaggtttccaaaaccaatcgtgccgtcaaaaaagtaatcggtataaatccggttgtgatgcgcccaccgggaggtgccaccagttccaacatcaaatcatgggtgggaatgccttccatcatctggtccatcgataccttagactggaaaacgcgggattccgcaagtacccagaaagccgtattgaaccatgtaaaggatggagatatcgtactgatgcacgatctgtataaagcgaccgccactgcctcccagacaatcattccggaacttaccagacgcggatatcagctcgtcactgtcagcgaacttgcagagtgccggggcggcatgaaacagaacaaatcttattctaaatttccaaagaaacaaaaatagtgtcaggcaatgaacgattttacaaaaaaacgcggaaaccatgatggtttccacgtttttgttatctgcttcaattttatacaaccttacgtccgcagcactgcttatatttcttaccactgccgcatggacacggatcattcggatataccttggcgtgttcacgcttcttcggtgcctttgccgcactctcgtccttattggttccggttacttttgcgacctgctcacgctctaccttctgctctacctgtacatgatagagaagacgaatggtatcctcctgaatacccgcgatcatttcatcgaacatatcaaatccggccatcttatactcaaccagcggatctctctgtccgtatgcctgtaatccgataccctgacggagctgatccatatcgtcgatatgatccatccacttgcggtcgatcaccttcagcaatacgacacgctccagctcacggaactgctcgatctccgggaattcggtctcttttgcttcatataaaagcactgcctgttctttcagatgctgctttaattctttgacatccttgatatcttcgatatttttctctgtaacaggttcaagaggaatcaccggcagaagaatttcatttaattcatttaaattccactcttcgcgcggaatctcattcgaaatacaggtatcgactgatttctccacctgttcctgaatcatcttaaagatcgcatcacgcatgctgtctccatttaatacggacatacgctctttgtaaatgatctctctctgatcgttgtttacctgatcatactctaacagattcttacgaataccatagttgttgtactcgatcttttcctgtgccttctcgatggcagaagtaagcatcttgtgctgaatctgctcaccttccggaacaccaagtgcgttaaatactgacatcagacgctcggaaccgaacagccgcatcagatcatcttccagagaaataaagaactgggattcacccggatctccctgacgtccggcacgaccacgcagctgattatcgatacggcgggattcatgacgctcggtaccgatgatctttaaacctccggcttcacgtgcatcctcgtccagcttgatatcggtaccacgtccagccatattggtagcgatggtaaccgctccgtgctgtcctgcctgtgcaacgatctcggcctcctgctcatggaattttgcattcaatacggtatgcggaattccctcacgctttaacattccgctgatcagctcggaagtctcaatcgtgatggtaccaaccagaaccggctgtcccttctcatgtgcttccttgacttcctcaacaactgctttgaatttttctttcttcgtcttatataccgcatcctgatgatcgatacgtgcaatcggacggttggtaggaatctcaataacgtccatgccgtaaatatcacggaactctttttcctccgtcagagccgtaccggtcataccagctttcttctcaaatttattgaagaagttctggaatgtaatggttgcaagtgtcttgctctctctcttaacctttacatgctcctttgcctcgattgcctgatgcagaccatcggaataacgacgacccggcatgatacgtccggtaaactcgtcaacgatcataacctgatcctcttttaccacgtaatcctgatcgcggaacatcagataatgtgcacggagcgcaaggatcacattatgctggatctccaggttctccggatctgccaggttatcaatatggaaaaatttctcaaccttttccacaccctgctgtgtcagattcaccagtttgtccttttcatttacgataaagtctccggtttcttcctgctcaattcccatgatggcatccatcttggaatactccggtacatcatcaccacgtgtcagctgctgcgctaaaatatcacatgcttcatataatttggtggactttccactctgaccggaaataataagaggtgtacgcgcctcatcgatcaatacggaatcgacctcatcgatgatcgcatagtgcagacctctttgtaccagctgctccttgtagatcaccatgttgtcacgcaggtaatcaaatccaagttcgttatttgtaatatatgtaatatcgcaattgtaagcgtcgcggcgctcatcgttgctcatatcattcaatacaacgccaacggtcagtccgaggaattcatgcacttttcccatccactcggaatctcgttttgccagataatcattgacggtgacgatatatacccctttgccctccagcgcattcagataagccggaagtgtagataccagtgtcttaccttcacctgtcttcatctctgcaatacgtccctgatgcaggataataccaccgataatctgtactctgtaatgctccatgccaagcacacggcttgctgcctcacgtacggtcgcatacgcttccggaagcagatcgtcaagtgtctctcctttttccagacgctccttatattcttttgtctttccccgtaattcttcatccgaaagtgccttcatctcgtcacgataagattccactttatctacgaggggcgtaattcgtttcaactccctgtcactgtgtgtaccaaaaattttagtcaatgcactcataatatattttgctcctaactcgcatagaatataggtattgtaccactttctccacatttacacaactcaaaggccatgaatgttttataaactttttatgaacgaacaggattctgctattgaaaatttgtaaacagcttgctatgataagaggacgattattgtattccaaacacaaggaagaaacagaaaggaaggtaacaacccatgtcttatatttacaaaacaaaaggcacctgttccacacagatcgaagtggagctggacggaaatattgttaaaaatgtgaaattcaccggcggctgtcagggaaatcttcaggcaattccccgtctggttgagggcatgactgttgaagaagtggaacgccgtatttccggtattcactgtggcatgaaaaacacctcctgtggtgatcagcttgcccgggcattgcgcgaagcctatgatgcacaaaaaaatgcataataccattcccggattatgtaaaagcctccccagacagatctgtctgggggcttttttatccccgtaccaccggctgcagctgctttccttccaaagctgccgaaatcgtctccggcaaaagttccatttttgccaccatcgaatttggctttttttcataattatcctgtgcgaatggcacaaaataaatatgtttcgtattcatcagcatcccgatatttttaaaactggctcccagtgcatcgttggtggatatggcaattaccagtggtttgccattgcgcatatgcgctttggcagccatcagaaccggagtatcggtgattgcattcgccagcttcgccgcagaatttcctgtacacggtgcaatcaccatcacatccagatatcccttcggtccgatcggttctgcctcctgaagtgtgcggattccagggttccccgttatgtcacagacttcttccataaactcttttgccgttccaaaccgcgtatcacagttctgcgtctgataagaaaagatgggaatcacatgtgctcccatctccgtcagtctctgaatctctttcctggtttttgcgaatgtacagaaagaaccggtaatcccataccctatattgcgatttgataaatccatgtctttgcctctttcccatcctgcctgattttactgtgttcaagaattgcatctgccagcactttggcactgctctttgtcgtatacagccccggaagtcccaatgccgccacaactttgattccatatgcctccgctgccatcagatccgtaccgccgggtcttgatgcaatatcaatgatcacggcatccgaatgcatttcacggatcatcggctcgcggatcacaagtgccggaaccgtgtttacaaccgtgcgtgccccataggcttcctccggaccgtacgaaaagtccactgcctcatgtccttctgtccgtgccagccggcgtgcctctacgctccttgccagcactgtcacttttgctcccatcgcagacaaaaccctggcgatctccctgccgcatcttccatacccgctgacaataattttctgctcccgaatagaataatcactgtattttagaatttcagcaaccgttgcttctgccgtaatacatgcgttgcggtgcacaaccaccgcatctgtcatcatatcataatattccgttcccgcatcctcacagcgctgcctccattccggtccgaaaattcctccaaacagcatccagtccctttctttttccctcgtcagttcctcctttaatataaggtttacatcatggtttctctcaatctttgtaacaggaaccggcagcacaagatacctgctgttatccagcactttcagcgcctcttccttttccactccccgtctccagtccagtcggtgtatctttcccggaagacatgcggcaagattgctttgtcgctgatccgtaacaaaaatcacgatatttccggtcatataaaaacgctcccttccatataacatatgaaagagagcgtcataaggtgcagaatcattattactaaagtctggtctctacaaagatatcgtagattgccttgatggcagcctcgaaatcgtcattgctgacaccaataataatatttaactcggaagatccctggtcaatcatcttgacattgatgttcgcatgggccagtgcagaaaagattctgcctgcagtaccgcgggtagatttcattccacgtcccacaaccgcgatcagacccagatcagcttccagatcaatcacatccggatgggtcagacggcggatggagctgatcacctgctgctccttgccttcaaactcttcctgatgcacaaatacggtcatggtgtcaataccggatggcatatgctcgatcgaaattccgttttcctcaaatgcctgtaatgctttacgacagaagccaacttcggaattcatcatatctttgtcaatgcttactgcgacaaatccttttttaccggcaataccggtaatcgtgtattccggtttctggcaggtactctctacgatcagggttccctctgcctccggatcattggtattgcggatattgatcggaatgccggcctttcgtaccgggaataccgcgtcctcatgaagtacggaagctcccatataagaaagctctcttagttcgcggtatgtgatcacatggatcggctgcggattgtcaatgatacgcggatctgccacgagacatccggatacatctgtccagttctcatataaacttgcatgacatgcttttgcaacaatggacccggtaatatccgaaccgccgcgggagaatgttttcacccttccgtcagcaccaattccataaaatcccggaatgacagctttttcacattcagaaagcttcttcgccagaaccttgtcggtcttgtctgcatccagatttccttcttcatcaaaaaagattacggttgcagaatcgataaactcatatccaagataatctgccataagaataccattcagatactctccgcgggaagccgcataatccgcgccggccttttccttaaagtttttggaaattgtcttaaattcctcatccagcgtcactttcaatccgagtccgttgataatggaatcataacgctctttgatcttcatgagaggaacacggaactcctcgcctgcctctgcttttgcgtagcatgcatataacatatccgtaaccttggtatccttggaattacgctttccaggagcactcggcactacatattttctggattcatccgcacggataatatcgccaaccttggcaaactgttcggcactcgccagcgagctgccaccaaattttacaaccttaaccatttttaacttttctccttcaagaataataacttctgctattatacttctaccgtctggctttcgtcaattattttcttccagatagatcacatccgttgcgatcgtattgcttgatccgtccacctgcagaatcccatatgatggcggtattccgtaaggcggctgtccgatgcttcccggattcatataggcgatccggttgtgtttgtcataaaaaacccggtgggtatgcccgaacagcgcggcatcgaccttccgctcctctgccgcatattccagattcagatatccggcttttacattaaatgtatgtccatgacagatcagtatttttttcccttcgatcagaagaatccgttcctgaacttcctgacggcaatcacagtttcccggcacctgttccatcacagtcataggaaatttccggtgcagctgttctgcatctgcccagcagtctcccagatgaatgatcatatccggatgtaatcggccgactgccgtaaccatattatttacatttccgtgcgaatcactgagcaccagaattctcttcatataaaacatactccttttcgtttaaaaagcaaaaagacctttgctccggcatcctcgccaaggcaaaagtcttatctccttctcatttcagcgatgactatcccagtcgcttccactgcttactacatttgtagtaggaataaaacatgcagtgttccgcctgctcgcagcgctttggtgcagtctcaatgctgcactggcaatttacaattgcatctgccttccccttacaatttccctttaacatgacatcgtctaaaacttcatctgacatacttttttttgctccttattactaccaagttttgttcacgacggctttcattatacaatatatggtaggtaaagaccataggtcaaatctcacaaatagacctgcctgttttgtaaaaattttcacttgacgaaacaggaaaaatgcgctagagctccagcttatttattaagttcaaattatacttttccaccaattccatgcattttctgtaagaatccatatcctgaatatgtctcacacaatgggcatccaatccgagaatcgctttatttccgacttccccggcaatcttccagaaacgctctgccggataatgccttgccccttctcccatgccgagcatgttgatctccaacggaatgtccagtttcttcatttctttgcacaaccgggtcatctcccagtcatataccgaatccattccctgataattcatcagatccggatgggcaagatacgcatagcttccggtctgcatcccttcgattacgagatccacatatctgcggatacggctttcatcctccgtctctgtcccggtatacggtccgttttcttccgatcccagaaaatgctgccccatgatcatataatcacatccgaggttgcgaaacatccgcatctgttcttcgtaaaattccggaacatactctgcctcaaatcctgcatatatttttatctgatcccggtactccgcttcgagccttcggatcgtctccacatattccggtgcctgtttcatggtcatccggatattggatacatatccgtcctgataggggcacggcacatgatcggaaaatccaaaaatttcaattcccatggaaatcgctgcctcaatatattctctctccgtatcataggcatgctggcaccgccatgtatgtgcatgataatttgcttttaaaaaatccattctgttgtccttcatccgtttattcgcctatcattttaacatggaatacgttttatgacaacaaaataccgtgtgcatccacacacacggtccttatttaaacggcatgttttacctcttttaaaatatccggtttatatccaattatatgccggctctgtaaattttgggatggtgcatgtataaaatgcaggtaaaatttatataatttgaccttttcccaaacgtagcatataataggaaaaaccaatggacatgtatgattcttggggggatatccatgattacaatgttagcgaaaatctttatcaaaaaccgtccggcaaaagaacaacggcaggcatatggcaccctgtgcagtatcgttggaatctgcttaaatgtctgcctgtttgccggaaaatattttgccggaatgttaagcggttccgttgccatcacagcggatgcattcaacaacctgtccgatgccggttcctcttttattacactagccggatttctttatgccgggaaaactccggattcggagcacccgttcggacatgggaggtttgaatatgtgtcgggatttgttgtagcgattgctatcctgatgatgggatttgagcttttaaaaacttccttttccaaaattctgcatccggaagccgtagacacaagtctgctagccatgggaattctggtatgctccattctggtaaaagtctacatgtactgttacaaccattatattgggaaaaaactcgattcggatgccatgcaggcgaccgccatggattcactttccgacaccattgccacctctgtggttctggcagccatgattattatgcgcctgacatccatcaatgtcgatggatttggcggtctgctggtagccattttcatcctctatgccggaataaaagcggtcaaagacaccatggatccgcttctcggaaaagctccggatcagacatttgtccgggaaatccgtgccattgtcatgtcccatcccaaagtacacggtatccatgatctgattgttcatgactacggtcccggccgccgcatgatcaccctgcatctggaagttccgggggatgaagatgtctttcagctccatgacatgatcgatcacattgaacgggagctggatcagaaactcggatgtgaagccgtcatccacatggatccgattgaaaccaataatgccgcaattgcccagatgcagcagcaggtagaacaaaaggttcttgaaattgaccgccgtattaccatccacgatttccgcctgatcaactgcgatacccacacaagcattgcctttgacgcggtcatcccctatggtatgcggatccgtccggaagacctaaaggaaaaaattgaaaacaagctacaggaaatcgaaggaaactaccagtttatgattcatgtggatcagagttatgtacctgtataaaaataacggttcgcagatttccgcgaaccgttattactgacagctttatttattgcatgccctaatcctctgcaaaaaatgcctgcatagttacattttcctttgctacctccacaaggtttacacaactgtttccaatccggtcaatattatggagcacatcattaaacggaatggtaagtttggaatcgcactttccctttcccactctggcaatatggtttttgcgcattttttcacccagctgcatgatgtcttctttttgccgcatcagttctttgatatccatattcacatccccggaaatcgcctgaatgcagcttccgaaaatcatctggatctgttccattgcctttttcagttctttcaaagcatctttggaatacttatgttttcctttattctgttttgctacggtttccatgatttccctcgtcagctgcccgatccggtcaatatcacagagaatgtactgcataccggcactttgtgatgcctgttcctcggtcagcacacctccggaatacagtgatgcaaaataatcattgaccgaagcatacagcttctgcagtattttcgccttttcttctacaagttctgcattttctttatcgatctttccgtttctgtactgcagttttccgatcatttcatctacaagttttgcgcagtacattacttcttttgcaaccagctgcaatgctgctgccggctgtgcaatcagcttattatccagatatttcggattttcatctacttcgacttccgtttcctttccctttccatccggtacaagtttcatcacaatctttaccatcagaggaatgagcggaatccagatcagcgtcatgacaaggttaaatccggtatgggcatttgcaatctggcgtgaaatcacatcaatttcgtttcccttcggcgaaatgaactgaatcagggctgcatacggttttacaagaaacaggaataaaattgctcccgaaatattaaatacacaatgggcaaacgccgtccttctggcatctttcggttgtccgatggatgccagcacagcagtaattgttgtaccgatattgtctcccaacagaatcgggatggcacctgccagtccgatgatactggtcacaccgtccggtcctgcctgggctgcaaaattctgtaatacggcaatcgttgcactgctgctctgtacaacaagtgtcataacagcacccacgcataccccaagaatcggaatatgggatacttttccaatcatgttgacaaagaatgcactggatgccaatggtttcatgacatcgcccatcgtctcaattccaaggaataacaaaccaaatgcgaaaattgtctgtccgatatttttcaccttttccttttttgatacaaaagaaataagaaatcccgcaaaaatgaacagataaatataatccgttattttaaatgcaataatctgtgccgtcatggtcgtaccgatattggcaccgagaataatggagatcgcctgtggcagcgacatcagtcctgcgctgacaaagccgattgtcataaccgttgttgcgctgctgctctgtaacactgcggtcgtcaaagctcccgcaagcacaccaagaatcggattttttgtaagcagggcaaggattttcttcatcttttcccctgctgctttctgcaggcactcgctcatcatattcatgccgtaaataaagattgccagacctccgaccagtccgaaaataattttcatcgtctcgttcacttatggttcctccccatttcttttcataaactttacactccgtatactttttttctgagattgtaataagtttatcatcggagtgtaaaatcaaaccatcccagaatgtaaactctgtgtaaaatttccgtaatgttgtaaaattgctgtaaatttgcgtaaagtctgtaaaatccgtgtaaatcagcattttcaggctctatgactttaaacccattgtaaaaatatttccacaatgctagaataaaatagttacaaaggaaaatgttttggaaagggaaaacactatgctatcatgtccaaactgcggaggaaatctcaaatttgacattccttcccagcaactctcatgcgagcattgtcacacactgtttgatccttatgattttgacgggaaaacaagtgatgccgaagaatcaaagacattcgacggagattacgaggtcacgatctttacctgtccgcagtgtggcggtgaaattttaagtaccgacaatgcagctgccggtttctgcagtttctgcggagcctccacgattctttacagcagaatcagtcacgaaaaacggcccaattatattattccgttccagaagacaaaggaacaatgtaaggaagcgtacgcacgccgtatgaaacattccatttttgcgccaaaagaactccgcgatccttcttatatcgatagtttccgcggaatttacatgccttactgggcgttttatatctcccagaaaggttctctctcgctcgatggaaaaaagacttcccgccgcggtgattatattattaccgatcactacgcacttaccggggatctggatgcctactacaaaggtctttcctatgatgcctcatcctcttttgatgacaatatcagtgaagaactggctccttataatttaaaaggcatgaaagcctttacccccgcctatttaagcggattttacgcggacacttccgatgtggatgcaaaagtatatcagggcgatgccgaatacactgcatctgcggaaacaaccgagcgtattgcttctgacgggacatttgccggttttaccatggataccatccgtcctgaacagctccatacaaaaacagaaaccatcgacagtaccatgtttccggtatggtttctatcctaccgcaaaaaagaccgtgtcgcttatgcaacggtcaacggacagaccggactggtcgttgcggatattccgattgatccgaagcgttatctgctcggttcgctgcttctggcaattccgatctttgctcttttggcatggtcggcatttttacagccctcttccctggtaatgactaccctgcttttgtcactgctttccatcggtgtctattgttacgaatgcgtttctatccaccaaaaagataccggggcaaatgaccggggcaaaatgttcatccaatcgaagaaagcttctgctgcagacaaaccgaaaacccctgaagcccagccggagccagccgcaaaaacgaatccgcttggctggattcttccgctttgtgctgcggtactttcgtttggggtatggttcctgcatccggtatcggatctctactattacggagccgcaattctttccatggctgccatcctcgtgtcgttcatcagtattatccatgcatataatctgttgtccacccgccggctgccacaatttgacaaacagggaggtgatgaccgtgcgtaaaataaaacgtatccttacggcatttgtattttgtctgatactctccgccagcaccataccggtttgtgcatccgcagtttccgcttccaatgaggaaaccggctacgtttatgtgctggatgattctgccgattttctgacagactcccaggaaaacagtctgcaaaagcagctgtatgatctgaccgcatactgcaatgttgcttttgtaaccacaaccggacacagtaaatcttccaccgaagattttgctgcagattattttgatgatgtctttggtccgcatgccaacggtacgatcttcgtcattgaccgctgcctgaatgagatttatctctacagcgatggacaggcgcacaaaatcatcaccaattcccgcgcacgttcaattaccgataacacttatacctacgcgcgcgataaggattattatacctgtgcatacaaggtctttacccagatcgaaacgctgatgcagggcaaacggattgcagaaccgatgcgctacctctgcagtgcgctgctggccattgttgctgcactgtttctcaatctctttttcgcgctgtggagttcacgttcccacaaggcagaccgcagacaggtgatgaccggattgtatgcacagatgcagatcaataacccacgcacacaattcatccgccagtcgcgtacttacagtccggtatcttccggcagcagcggtggtggccattccggcggcggtggtggcggtggcggcggtcactccggtggtggcggcggtcacagtatataatcctgtagaaaatgcgcatttgtggtaaaacggtgctttaaaaaatgcgcatttgcaggagtttcttatattttaagcaaaactattaataagggcagtttttaaactgcccttatttgaatcatatgtcatttttaagataccttccacttgtcagataaacgcttcattatttttttgtaagaaaactatcaagttccccatatactgtattatctgaagatattaaaatttttccattatctgtatataagtagttcaaatattcatatggcaagtctatcttgttaagcttattatggcgactgtcaatattccagatttctcctgtatccctggaatataccaaagtataatctacttttttatctctgccaggtatcgcaatatccaaatctatcttatttattatttttgcaacggtcttccccgatgctacacgaaaaagtactcctctcccactaaatgttcttataaaaccatattttcctgacatctcaaacttcgaaattctttcattttttagcagattgataatttttttatccagcttcaaactatcaatatagtttccagcacaattatacttttctttttattatttttaccttttaatgatataattttatccttacatactttcacataaattaatgtttgatctgtagaatcacttacccccaaatgtttcttttattgtataaataaaaataagcgaaagtagtgcaacagtatcaggtggacttcttttagagcagcttccgcagccccttcgggtagtgattcttcatcacagaacccgcaagtttgccccagccgagactgtatccatctaccgtgatcagataccagcccttctccccttctgccggaaacgtctgcccggccagatacgcgcgtgcttcgtccacagacagattccagctgtggcatgcttcctgcggagaaattgcaagtgccagtgcgtgtgccggttccagccggttctttttaactgtgccaagatgcagacccggacgcagcacatgcagccgtctggttgccggcatatgttccggcatcagatacagctgctctccaaaaagaagcagcctcccggcatcatctgccggtatctttccaagaaactcctgtaatcctgcaagatatgcttttgcttctccctttgccagcggtttttcttctccattcgcacaatatccccggtaattttgcgaaacggttccctctttttccagaaccgcaacgaaatgtccctctccgtgcagatgatgcggaaataaccggatcgtatctcctatctccgctgccggatgttttgtccatgccgctacaccgtctgccattcccggatattttttcaccggcacaatatgaaactgcggatgctgttccagaaaacggctgatcgttccctcgttttcctccggtgcaaaggtacaggtagagtaaaccatacgtcctcccggccggagcatggtggccgcacatgcaagaatttcctgctgccgcgccgcacagacctgaacattttcaggactccactcctcacatgcctgttcatttttacgaaacattccttccccggaacacggggcatctaccatgatccggtcaaaatattccgtaaacattcccgcaagtgtctgcggactctcgtttgtcaccatcacattttttacacccatccgttccatattctcggaaagaatctttgcccgcgccggatgaatctcattgctgacaaggagcccttttccctgcatcgctgccgcaatctgtgtacttttgccccccggtgccgcacataaatccagaactttttcgcccggctgcacatccagatatgcagccggtgccatggcactcggctcctgaatatagtacacgcccgcctcgtgatacggatgttttcccggctgatcttccttttcgtaataaaacccgttcgcttcccacggcaccggctgcaggtgaaaggaagtctcctctgtaaaccggtctgtgtcggtttttgacggattgatccgcagtgcctgataacgcgcatcttcgtaactgtttagaaatgccgggtattctttctccagcatttgtttcattcgatctaaaaaaagttgtggaagcatatcatttctcctaaagttctcctaaagttttccaaaaaaacttggcaaaatatccaacaaatagtaaaatataaatatgataaaacgaaagtacatgagaacaagacaattaaaaccgggcatgaagctcgatcatccggtcgttgaccgtctgggacgtaatctcgttgccagaggcgccgagctggatgattatatgattgattccctgttgaaactgggtattatgtctgtttacatccaggagggggaagaagaggaaaacccagaacaggttcctacttctccggaagcagaaaaaaatatcgaacggctccgtaccgaagaccgcgcaaaagttactctttctgccagtatccgtgaacgtgtctctaccggtatccagtttatctacaacaatacaacctccgaggaaatggttgccaccacagagagcattgccgatgacctgatgcgttccattaaaagcaatgatgccatcgcaattgatatctccacgctcaaaaccagtgacgaatacacattcaaacacagcgtggatgtagcaaccatttccatgatcgttgccaagcagcagggactctctcccgaagaagtacgggaaatcggtgtctgtggtttgctgcacgacattggaaaaaccaaaattccaaatgctatcttaaacaaaccgggcaaactcaatgatgacgaatttgtcattatgcggcagcactcgacatacagttacaacatgatcaaggatcgtgcggaattttctccggctgtctgccttggtgttttgcaacaccatgaaaagatcaatggaagcggatacccgatgggtgtgtctgcggagaaaatctgcccctatgccaagattctgtccgtagcggatatctatgatgccctggttaccgaacgcccctataaaaaagcctattcccagagagatgccgtggaaatgattatgtccatgaccatggaactcgacataactgccatgaaaagcttccttgaaagcatgattctatatccggtagacagcatcgtggaactgagtaacggcgaacaggcgcgtgtggtcaaaaatattccgcactatattctccgtcctgtggttgtcgggcttaccagcggtaacgtttacaaccttggagaagatatcaattgtgccaatatcatcattctttaaacaacagggaacagctttcgctgttccttttttattgtgttatctcttcactttcaaaaggctgtgccgtctccggcagaaacgcatcgtaaatatccacatgatcatagatacagcgccagctgctggtggaccctgcagtcacacagatatactcttttccatccggtgtctgtgccatacttgccgcacagcttccggactgattcacaaagccagtctttgccccgataatttcactgtgtgtatccttatcttcaattctccgcaaaaaccagttggatattgtaatcccatctggatgtggtttggattttgatgtcgtataggttcgcgttccaagaacttccctgcacagatcattatccattgccgcttttaaaatcattgccatatcatacggcgtactgtaatggtcatcattgtatatgccgacacagttggtaaaatgtgtggtctccgacaatcccattttttccagttcctgattcatcatatccacaaatgcttcctgtgaaccggccacataagttgccagagaaaccgcagaatctgcccctgatggcaaaatggttccataaaacagatcccttaccgttacctgctcatccacttcgtatccggtattgctgcagtcattactataactgaaatctgtggcatcaatactgatggtaaccagctcgtccagctgctctggcttaatattttccgctgctaccagcacggtaaagattttggtcatagatgctggaatcatacgttttaatgcatcttttccagccagaatcgttccggcatccacatcaatgagaattccctgcttgctgacaacggacttcggaagcgattttgtctctgcggtctccgtagcggaataatcaaatacttcctctgtttccatcggtatttccgatgcctgctcctgctgcgtcggctcaatcatcttttgatcttttttgttctttccctttttccccggcacaactgccaataccagaacaactgctaaaattataactgctgcaacggctatgtaccatctgttttttcgtttctgcattttcttatctcctgtcctgcctgaattgctcttttgtatcatagcacttttcggctataaattgcaatccatcagatacaaacgagacgcaaaatccggaaaataccgtacgttctcattatacccggtgcctccgaatgccgggtgcaaatgtacacctccatacatcagggcatccccgtatgcacagaaatcctccgtttccccatccatctttacaaattttgccagcagatgatgtgtcacagaatccgggcggatatgtaccggagcaaccgtgttgaccagatccccaaactccagaatactgtacgttaacgcgcggttagtaaaatggtaccgtttctcttttgcaagtcctttgggataatacgcatgaaactgtgtattcggttccgcaagtttctgcatcagcatgccgactgcctgtgtctgatcttctgaaacacaggtccattctgtgagatttccgtcagcaaatgtccgcccacgataaaatgtgccctgctgcaatacactacgccacttcctgtacagtgcaatctgagccctgatctcctcaagttcctctctggtacagtcacagaaattacattcataccccagcactgcgaatgcggcaactgcaaagcgggtcgtaagcggtgtccggcgcagcgtctgatggttcggacacgcagatacatgtgcactcaccgtcgagagcggatacccgtaactgtaatttgtctgtatgtccgccctgcaacaggcatctgtgtcatcacttccccagatctgcggaaaatagcacaaaatgccgggatcaaaacggtttccgcctgctgcacacccttcaaataaaatttccggaaaacgacaggtcagttcctccatgcaccggtacagtcccagcacataacgatgtgccacctctccctgctgtgcggccggcaggctctgtgaataataatcggaaaacgtccggttcatatcccacttcacataagaaaccggtgccgaagaaaagacctttgtcatactggcaatgatatactcctgcacttctctcctgccaagatccagaattctctggtttcgtccttctgcatgtggttttccgggaatttcaatggtccagtccggatgcttccggtaaaggtcactgtccacactgaccatctccggctctacccagattccaaaagaaagccccagatctgtaatttttttggcaaggcgcgataagccgccgggcagtttttttgtattcggcacccagtctcccaatgaagaagtgtcatcgtttcgtctgccaaaccagccgtcatccaccacaaacaattcgattccggcatcttttcccgcctttgccagctttaagagcctgctctcactgatatcaaaatagcaggcctcccagctgtttaaaagtaccgggcgcggcctatttttccaatatccgcgcacgatatgctcccggataaacgcatgcatccgccggctcatgcctccccatccatccggtgcataggtcataaaggcctccggtgcctgaaactgtgctcccggctccagtttccacgaaaattcccgtggattgatccccgtaagaagccggagttttccaaaactgctgacctccgcagtctcacagtgatttccactgtagatcagatgaaatccgtaacagtctccctgatcttctcccgttttcggacggctcagcatcacaaacgaatttgcccggctcgacgtggttccggtaaaagaatcattgacaattctgccaccggtcagcgtctggtcacagcggtgcatctcccgcgcccatgcgccgcgaaatgtcgtaaaaatataatcactgtcatcaaaatccagctgcagactcatcagacgggtaagctgtacatcctgactgctggcattgacgatcttcgcactccgtccgatcacatctgccgcctcatagacatagtagtagagcagcagcttcagatcatactgccggtccaccattgtcacacacagctgctgcacttctcccacacttccataggaacccggaagtccatccagcgcatcttttttcccggtaataacggcatcttcatagcggaaatccagagtctttgccccatcataaagaatagcctcaacaaacggctcacggatatcgccctttccgtacgaagacatttccagccgcacatcctccagcgaaaaaccggcatgctctttttcacagatattcacatttcccggtgcaaacacatgcttttccacaagaatttcaagatcatccggatgctcgatgtgaatagttctcccgtaatacagatgctccggatgtccccccggcagaatggaaaatgcatatgttgtatgtgccgtatccagtacgaatgcctgtccaattttacgaatcatagctgtcatcctttcttttagcagttctcctgatttttaattgctgcattaatctcctgcagctttttctctgtcaaaatatattttttccgaaataccaataccgcgatgaaaagaccgatcatcggaattcccgccatcgtcagccgcagtcccagcaccgaagaatccgctgcacgcgcaacaaccgccgcacttgtatcctgcttgaggttacagagagacagacagatcgctgcgatcagcacggcaactcccgaagccagtttcacaacaaacgtctgcatggaaaaaatcacactttcatcacggcggtgatttttcatttccccataatctaccgtatttgccagaaatactgtggtaagcacggtcagcatgccaaatgccgcaaagatcaaaaatcccggcaccaccagggctccaagcacagtatgaccgccaatcatcagcacaagcagaatcgcataccctgcgattgccattccaaagctcaggtagaacacacggatactgctcataaacttccgcagcagtggaaacaataccatcatggacaaaatctgtaccgctccgccaaatgtactaaaaagtgtatagctgttataccagctctccccactcacatcatacttgaaaaaatacagcagcagattggacgtaatatacaaagagcagttaatcagtacaatggtgatgacaaccgtcattgcctgatcgttgtgaatcagcgccgaaaacatctgccgtacggtcggcgtttccatatgaaccgtggatttttcccggatcgtcagacaggtgatcgtaataaacagcacaaacaataccgcaacaataagtgcaaaccagcggaaacccgtgcgctcatttccctgtcccagcatatacacacatttcatcgtaataatcgtaacgagagcggaaccgacacccgaacaggaacgcgccatagttgttaaattttcgcgctcttttccgccttctgtaaatgccggaatcatcgaccagaaaggaatgtccatcatggtataggtgactccccacacaatataggtaatggctgcatatgccacaatcccacttccattccatgccggcggtgcggcaaacatcagatacagcacgatcgcattgcacagggttccaaccagaagccatggacggaattttccccagcgtgttctggtttttgcgacaatcactcccataatcggatcgttaaatgcatcaaacacccgcgctgccatgagaataattcccattgccatcgcacttactccgagaacatcctggtaataatacagaatatagctcgccgaaagcatatataccatatcttttccgaccgcccccaggccgaatgccgttttttcttttgctgataatttcattgtatttcccccttactcttcccgtgccacctgaaaatgttcacagattttccccgtctgcgcattttcaattgtcaaaattccttctcctgcctgtccggtcgtctttacataagtaccgcccatacctccctgtaaacatatggtctttggaccgatcagttccagaacacctttcacttcaaactgcaccggttcattgaaaaatcccagcacatttccattttcatccagtgcccggatacgaaccgccgccatatcataggttctgccttcggtcaggttatgtgcacttaccttcacctccagatgtgcctgctgcatcggctccttgatcacggtctttaccacttttccgtccctgacagcctcaaacttatagaccgtggaagtcgtcccccagtccccgacataacgtgtgtaaagcgcaaccgcatcctttggtttcatgtgatagcagaccatcagccgcaaagccagaaggtagaactttgccggaagattgttcagcccgtaatacgccgtcatgttaagcagctgccccatcagtctggcctgtttcggtttcattggctcattttcgacaatcgcatttccgataaagtcattcacaggaatcggtccatgcgccagtgcacgatatggggagtcctcccgatgatactctttgattaatttagagtttttgtacatccgcacggcatccgcatttgtaatcatccagtttccgctgcggtttccgcccggatgctctccgatatccatcgaagaactcagttctaaaaccggtgtatcttcctgctgactgctatacaccgccgccgcaagtttcgggttgcggaacatatccatcacgccatggtaacagatccggtcaccgctgccaaaatccttgtgcgtattatagtcaaacatacaccagccaaaacttcctgcaatatccggctcctgtgccaccgcatttaatacatttgcatgacggattgcatgctccgtccggtgttcctcatcgtcaaacggcttggtcggaaacatatgcccgttatactcactgatcagatacggttttttcatatccggtgtaacttttcgtttcggattacaccccggatgtctgccatcgtgaagaaaatcgttgtacgtataaacatcctccagaagatggcttttctttagcatccgcactccgccggttgcacgtgtatcgtccagttcatgtgccacccggtttgtttccctgtaaaaaacatcgtcatcctgcgactcattaatccgcacaccccagagaataatggaaggatgattgcggtactgcacgatcatttcctttaaattctgcaccgcctgccgcttccattcttcatccccgatgtgctgccaccccggaaactcggtaaacacaagcaggccaatttcatcacaacgacggataaaatcctgcgactgcggataatgggaagtgcgcacagcattcacgccaagttcttttttgagaatatcggcatcgaaaatctgcatggatgccggcgctgcatatcccacatacggataactctgatgacggtttaaccctcgaagccgcagtttctttccgttcagataaaaaccatcttttcggaatccggcctcccgaaaccctgtgatatccacacgcgcatctatcatttccccatttttccacaaactcgtacggatttcatacaaatatggattttccggttcccacaaacggatctcctgcaccggaaaaacggtttgcacatttgtctgttttaccggcttttttcccaggggactatatgcaccctcgccttttttgcggatttcctgctgcaacgttatcccatccgaaatattctgtaccgtaatctctgtagtcacctgcagaggatgtatctgtggcttgacaaatacatctgagagatgtgtcttatttctcacctgcacataaacctcacgatacatcccgccaaaagtcatgtaatctatggcatatccgaacggcggaatattcaaattttcccggctgtcgacacgcaccgcaagtacattgtcctccccatatttcaggtattttgcaatttccacaaaaaatgccgtataaccgcaatggtgcgctttcacttctgtcccattgacataaacaaccgcatcatgcgccactccctcaaaggtcagttccacacttttcccctgccacgcttccggcgccataaaatgtctgcgatatccacacagcatctgatacgcatgctcatcaaagtaatgatacggaagctctttgcaggtatgcggcagccgcacatcctccatctcattttccggatatactgcctctttcatggcttcttcccatgtttcggcaaatttccagtcattgttccaatacaacctctccatgcttctttatgctcccctttcgttttacctctccgaagcaattccatacatcagaatcccgacaacctcctgcaatgcctgcgcataagtaatttcattctgcagcaggatatcgcgctggaaaaactgctctaacgatgcttccagcatcatctttaaaatcggaatccggaccggacggatcacaccttcctgcatgccctgttccaacagggcaatggtcgtttcccagcctgtttcgagccgtacttccacctgatgataaatctccggatatttttcttttaactgatataactgtcgaaaatccacatcctgataacattccggcatcacaccaaggattgtgtgaatcttttgcagggtgtccatctccggattctctacgatcttctgctcactgtccttgatccggtcaaacaaatagtccaccgtttccagaaacaaagcctccttatcacgaaacacctgataaatcgtttttttactgatccctaaaatctttgcaatatcatccatcgtaaatttcaaacccttttgattgaatgcctgcaaagttccctgcataatgttctctttcagttctttattcattcttttcatcctttctgccggaaggaaactattttcttcatttcagtttccattatagtagcatgttctctctcttccttcaagaaactaaatgcccaaaaatcgtttccgatttttgggcacattttttacgctgcgttttatccccgcatcaattccctgcgcaccgtttttctcacaaaataaaaacagatgacctgcatcacaatcgtgatgatccaggatgccggataagaaataaacaggaagtacaacgatctgtgatgtgggaaaaatccaaaaatccagagaattctcgttccgaccgtaccgatcaccgacaggatcatcggcactgccgaatgtcccatcccccgcagtgctccgggaaacaaatccataatgccacacagaaaatacggcactgttgtaatggcaagaatctccatgccgctctcaatcacatccttttctctcgtatatatactaagtacctgcggtccgaaaaaccatgcgccacatcccagcagcagggaaacactgaccgtaagaatcagacagtcgatcagcacacgatccatacgtttatattttcccacaccataattctgactcgtaaaactcatacatgcctgtgtaatggaatttaccgacatatacaaaaatcccaaaatattatttgccgctgtataccccgccatcgccgtatctccgaaggaattcacggaagactgcagcagcgcgtttgaaaagttaataaccgtactttgaatcccggcaggaattcccacctgaaaaatctgcagcagataaaccttttttattttcagcttcgaaaagcgcagctgatagcagctgtcggtgcggtacaggcataacaaaaccagaatgcaggagatcatctgtgccgtaatcgtcgcagtagctacgcctgccacccccagatgaaaaccgatcacaagaatcagatccagcagtgcattggcacatccggaaatcaccagaaacaacaacggccgcttggtatctcccaccgcacgcagaatcgctgccccataattatagagcataaaaaacggcatccccagaaaataaatccgcatgtaaagggttgactgtgcaatgacattgtccggcgttcccataagaagcagcgcaccttttgcactgattaccccgattcctgccatgagaattccgctgatcagtgccagcagaatggcggtatgtaccgtgtctgacatttctttttccctgccggacgcaaaaaaacgtgccgcaagcacgttagcccccagcgaaattccgataaacagattggtgaacacgttgatgagtgccgtggtcgatcccactgccgccagtgcctgttttcccgtaaaatgccccacaacaatgatatccaccgcattgaacatcagctgtaaaattccagacagcatgagtgggagtgcaaacgagatcagtttatccatgatcgaaccattgcacatatctatttcatatttgtttgttttcaaattttctctacccccttttcggttctgttatccctctgagccataaaatacgccgctactggcggcgtatttgtttgtccttatacattctctgatctgcgatctcgatcagttccattatattttcatattttcccacggcatatcccacggaggcagataccggaatctcactgtttttctgaatcggcttcatcacctgcctccacttttcaatgacatcttctgaaatctcctgtgtcccatccggaataatcataagaaattcatccccaccgtaacggtaagcattggtttcctcactcgtcactgctgcccgaatggatcccgcaattttggcaatcagctggtctccgtacaaatggccaaacgtatcgtttacatatttcaactggttgacatcccaataaataaccgcaaccgggcgttcttttggctccatatgttccactgtttcaagcagtttatttttgctgtaaagtcccgtcatatcatccatggaagccgcctgtaccatacgcattgcattttccatggacttgcgcacaatactgtttacactgttacttacataataaaatgcaaccgccatcagcgatcgcggcatcacataataaagtgccagcgtaaccataggattttcgtttactttgttgagcaaaaacacaccatccttctgcagatgatccagtgatgtcaccgtcagcagtgccatgtttgcatcacataccccaaaataatagcccacataagtactgatcgtaatcacaaccactgtaaatataaaggcataaaccgacagtctctttgaagtatacatacttgaaatgataatcgggatcatcataataatgatcatatggtaggtaagggatgcactcgcgaccatgacaatcagcccgatggccgtaacgctgagatacttggtaaatgggtgctcaagccccatcttcacaagcagcaatccataaatcaacgccagcacacatgccaccacatagcctctgataaaaatcgcctgatccacgataaaaatatgcaggcagttcagaatcatcacaaacgaatagaataaaatgcagattcccaccacacggaacgcaaaaatattctgtgtcacatcctcctgctcgtaaaaagcatttttatttgtaattttagataacagtgccttgcaggtgctcatccatatatcctccagctttgtctgcctttagtataacatattcctgcatgagtttcactactttgatgaacttataaattcatcaggaaaattttccataactttttgtcagtgttctgccattttttctatcgtgccatgcataacggaatcagtccctgcaaatgaaacttcgtctatgattttacataccacatcaataacctttgtaagacttacttcttcatcacgacgtaattttgtcatcgtgttaggagcaatttctgcctttttacgcaaatcagatttgctcatttttttatccactaataatttccataatttgttatatgacacagccatagtattcgctcctacctattcacataaatctttttctgcttcatatctacctttgcaacagcaccatactgtaacgcacatcgtggcatagcatgtccgaaattcacattataaacaatcggaagtttctcattgtctatcactctaataagaatatctttatattcctgataataagcttcatcctgtggttttccaactaatacaccatttaccacgtcgaatactcccttttctttcagtaataacacttctctttcaaacaattcaggagtcggtttttcttcgcaggtttctataaatagaattttcccaatccactcttccttatttggaaacagatcatatctttcacaaacttccttttcatcttcatatctgctattggtcaatacatcataaaggctttccaaacatccgcctaataatcctccttggaaaatttcacttccctggagaaattcaaacccacgttcttccttatgagcttttctttctgtccctattgcggctcttgaaaaatcttctctttcttcataccaaatatcactggatataatttcatcagattcattaccttccaaataactctcaaatgcccttttggtatatggtaacatctcatctgcaatttctcccaaatcacaaataaagtttggtccgtaataagtagacaagcccagtttataaaacatcaaatgattgatcgtagtatctgagaatcctgtaaataattttggatgctcctctaccgcttttataaactcttcatcttccatcagataaggcaaaagtctgtatgtatcatcaccaccaattgcacaaataatccctgcaatagaattatccagaaatgcatcttttaggtctttcgcccttgcttgcgggtgagtttgcaaatattcaatacccttcaaagcatttggcataaataccggctccaaaccatattcttttaatctctttacgccaatctcaatattatgactgcagaattcttcaccaagcattccacttgacaaacttacaatcgctactttgtcaccttttcttaattttcttgcatattgcataactacaatccttccttagataaaacaatattaatttttatccgcacgctgcttccccttaaattccttctctatataacaatgttcctgtttggcaatcaacttaaaactgtaaattggacattcagattccagttcgttacagctgctttcaaagtccagttcgataatatatggcatccaatctataattcgcagaaaatcttcacagccaaaattactatcataaaaattcaatatcgtactaagggcagtaccatgggttcctataacaatatctttatccgtattatctgataaaatctcattcagtgcctctatgttacgattttgcaccatagcaatggactctccaccctcttcatgataattatgatcagcccatcgtttctggaacattccgtgattgtttccatcaggtccttttttgcgctccctcaatctctcatctgttataatctcttttgtgaaaaaatctgctgcctctgcaatggtatccatactacgtttatacggactacaataaaacgcatctattttcttgtccttcaaaaattccagcacaattgcagaatctttcttaccctcttccgtcaaaggtcttgtcctgtcttcttcccattcgtgttccggctgtgcgtgacgcacgaaataaactcttgtcattttatcagctccatttcatcttccatttttacaaatccatacatttcatataacggtcgtcccatctctgtcgcttccaacgcaatctgtaacacaccctgttttttcgcatccttaaccagtaaatc

SEQ ID NO: 1020 - DNA, 21014 bp, Unknown
  gut microbiota DNA sequence
taaaaccagattccttaaatgagggaaaatccctgtcgaagaatggaagtccagttacttttctgatagagaaagcggactatgattacagtctgcttttcttcatcaatggtataaaaggcaaggtaattattgattatcgcaaaacgaatgccccagcttgccagtacaggatcatctaccagacaaaacttctgtggcaggtcggctagtgagcctatctgttcagtcgcagcatctaacagattatctgcggcatcgggagttctgagggtaaattggatgtaatccgcagcacgcataatatcgtgttctgcggtggaagtgatatgaacctgatagctcatcggttgcggcggctcctgatatcagccatagcttcggaaaatggtctggtgttgcctgtggcaatatcgtccattccttccttgatctggctgtaaagttcaaagcggctggtcagttcttcgtaggtttcaatgctcatgacggcaaggtcgccttttccattctttgtgatgaaaactggttcaggataattatgacaaaatgtagaaatttcattgtaattattccttaaatcagcacttgatttgattgctggcataaaaacacctcctcattccataacaaaattatacacaaattttgttatggagtcaatggatataccattagtgttagcaggataaacacaactattcatatgtatctgaccgtgaggtcgggaacagacccgttgggtgatgttcccggtgggctttcactgctgcatacatagcggatctatactgtcctttatattgttccaaagtccatgtaccactgaaacgtttatccttatcctcctacttcggcttctccctctcaggatttcttaccggctgtctgtctgagttctcctctttctgcgattcatcggcatattcaagctcatttgtctgctccttgtcaatttttgctctgcctcatcctgcatagaaaatcttctgtcagtttcgcatctccacccggatgattatgattttgaggttaaagcttacgcctccacaaacacggtttgtacgattctgtccattgtgcttgccgtctgtgcacttgttttgggcataggattcttaccttctcttgtagtgtgccggatttggattgtaaatcagtctgtatattgtaaggaagcgttaaagtattcaaaggcaggaactaagatttcatgatggaaacgcaggaggacaggcaatgggaagttatttggtgattattgctgtgctgattatctttttctgtatcaggagaagaaggcgaacagcagcggttgcgtggcagatactaaatggatgtatcgcatttttatcgtggaagatgatgaaatcattgcaagaacagtaaaaagtcatctggaaacgatgtcggaagaattgagaaagagtacgatattccattagaagaagatttaagaaagaatttttcgagaatccgaagacagaccggttacggaagtttttacaaacttttacttacgggagtggagaggataaagaacggacatactaacaaaaaagttggaggtatgtcatgaaacccaaaaattatacggataaatcagcgatgcttgtaggaacggatgcagatccggttaccgcaggaccaaaatattttgcggagaacacaccggaacaggaaaaagaaaatgcagaaatccggcagagcagtatgtacaacgacaaaaaccgcgcacgcatagataacaaccagttttttgaaacgagaagtaatcctttgagcagcaaagggaattgaggatttgcttgacaaaggttctgtccgaacatcataatgaatgatagagatatcatgtaaaacaggacggagcatagtatgaatcagatttgcagggacattttccgggcgattcatgagggaaagtggctgaaaatcgaatatcggaacaaagcggatcagattacaaaatactggattggaatccgtgatcttgatccggcaaaacgtaccctcaaagtagatggtctgcacctcggaatgtatacgctgggggaatatgacaaaatttttgtggattccattctgtccacggaagtcattgaaggaacgtactgtccggaaaacaggcagctgatcgaagatattgagatgcatccggagcgctataaaactattttttccagctctgcaaatctgaaaatactaaattatctggaactgtgtaaccgcatggatacgacaccttacatcaccgattatgatctgatccattatatcgatggggatcgtgtgaaaaacggacggtatgcacttaacgatcagcagtttcaggaggtcgtgtcaaatttccagtattccctgtctcacgaaaagaaaaagagcaccaatttaagaattaagaaactggcactcaatgtattgagtattcatacggcgaaggggttgtacgttctggcataccggaacctgaaccttgatgtgaaaaacagagtgtttcagccggatgaagatatcacagtctgcacacagtttggtattgacggacagacggaaaatgcgcgtaaatttctggatgcggacgagtacgaactgctggaagattttgaaaacaatctggaaaaaatcaaagatgcgattaccggtcatggcgggcaaaagccggtcgtagatgatatgccgtatgtgctggggcttgggatggatgtagtgctgaatctgcatgacgagtacaaagccatacttgatatgtttgaaaagcagcaggttacttatccagtcaaagccttcttcggggaattgttagaacggccgcgccgcaccaaggcgtatccgattgcactgatcaatcagaacatcaatctggatcagctgttggcaatcaacaacgccatgaaatatccgcttgcctacatacagggaccaccgggcacgggaaaaacaaatacgatcatcaacacgatagtaacggcgttttttaacaatacgaccgttttatttgcgtcctacaataacgttccaatcgacaatgtatttgaaaaactgacacatcttgagtaccatggacagaccattccgtttccggtactgcggcttgggaatatagacaaagttaaagctgcaatcagctacatcaaccgcctgcgcaatcaggtgcagaccgtaaaaatatttacgtccacgctcgataagcgcaaggatgaccggattgaccgtgcaaaacgtctttctgcgagactgaaagagtatgaggaaattctggatttaaaggagcggaaagagacactttcgcatctgatggaatatcaggaacatatcaaaaatgccatgaacctgctcccgtttcagatggacctgcagggataccagatgcagaggctcgatcagagaatccaccagattggcgaaatttccgattcggatgctctgcagcttctcgaccgcaacgaagaagaattttatcagtatttattttatacgtctgcgcgttatatcaagacacttgaggagccaaaatatcaggaactgcgggagattttagattccggtgaaaatccggcggcacaggcgcttgcattcaacaaatacatgcagaaatccgaaaatgtaaagaagctgcagcgtgtttttccggttattatcactacctgcatatcggcacataagatcggggaaccggagccgctgtttgacatgaccattatggacgaggccagccagtgcaatgttgcgatctctcttgtcccgattatccgtggagagaaactgatgcttgtgggagatccgcagcagctgaatccggttattctgctcggagaactgatcaaccgcaagctgcgacggcggtatcatgtggcagaggaatatgattacagaaagaattcgatttacaaaacgtatctggcatgtgatgcggtgagtgatgaagtgcttttgcgcagccattaccgctgcaacagagaaattattggatttaacaataaaaaatattacaattccaaactgcagatctgttcaaaaagcaaagagccggagccacttgtctatgtagatgtaaaaagtgaccgtgccgagatcaaaaatacatctccggcggaagcagacgaggtcattgcatacgcgaagcagaacacggacaaaagtatcgcggtgatcacaccgtttgtaaaccagcgggcactgatcgagcaggcgatcaaagaaaaccacctcgaaaatttagtctgtggaacggtgcatgcttttcagggagatgaaaaggatgtggtgcttttttccacggcactgtccgaccgcaccaatgtcggtacctatcagtggctgaaaaacaataaggaactgatcaatgttgcaacctcacgtgcgaaagacaagcttgttctgctcgcagacagcaaagaactggagcgtctgcatgcaggacaggcagacgatgatctttatgaacttgcgcagtacatcaaaaccaacgggaagtcagagattacggaaaaacatatcagttcccgtgcacttggcatccagccgttttctaccgctaccgaaaatgcgtttctcgaaaacctgacgcatgcgctcgaaaatatctggctttcccagagtaagtatgtgatccacaaagaagttaccatatcgcaggtgtttcaggacaacatgacatatgatgatctgttttatatggggcgctttgattttgttgtgtacgaaaaacagggaaaaaaggaactgccggttctggcaatcgaacttgacgggaaagagcatttcgaggatgcggtggtgcaggagcgcgaccggaagaaaaatgccatctgtcaggcacacaatatggagattatacgggtggagaattcttatgccagaaggtataatcatattaagggaattctgatggattatttttcgagggtgcattaaaaatgatttatgttaatgctttgtggaatattcatatatggaaaatgtgtgtagttctggagcttaaaagttaatttatgctatacttaaaaagatgcggatattaggagaatagtatgttttttattttgggaatcacagatggcaggaaagattttgaatttacccagaccatgatctgtaatatatgcggaaaatatggaaggtatcaggtttttatgacctatacagtgctttcgctttttttcataccttgtttcaaatggaataagcattattatgtgcagacgagctgttgtggcactttatacgaacttgatccgaaaattggaaaacagattgcgagaggtgagcaggtggagattctgccacaacatctgtcgcaggtgcgtaagggtggcagttggaatcgatacaaacgctgtgcacagtgcgggtatgagacggcagaagattttgaattctgtccgaagtgtggaaaacgattttagaagggcatgacagaaagggtttggtaaagatggcagatagaacaaaggctgagcctttattagatcgacatgtagaaatctatgaaagtatgacagagacccttatttttggaaaaaataaatttgatcgtatggatatggcatttgtttcaaagatttcttctatgaattatggaacacatcatcgtgtaatactgataggatttcaaaagcagaaaactgaaagaatattgcagaacattcagcggatattgaaggatgcatatggaattatgctaactacagtatggcaaaatcttattataggaattttacctgaatcacagattgatgttggcagcataaaagaggtttatcacggaatagagaaagaaactggagaattgaaaattgctgtaagtacaattaaatgtcggttagaggagagtaatcaaggatttcaggaggcagtccgaacctatgacatgattgatactatgcgtaaatacagcgaaaaaatcatgttgtatgaggatcttggaatttttggattgttatatgatttaaaagaaccaacggtatttgaagcatattataaaggggtattccaggaactatggcattatgatgagattcatgagacacatttgtttgaaacattagaatgttattttcgaaatgaatgtgataaacaaaaaacggccaaagagttatttattcatgaaaatacgctccgatatcgcattcatcagattgaggaaactatggataaggatcttaaaaatgtaaatgtaattaccgatattgttacagctcttaaggtgaggaggatgatgcagattctggataatgtataaatcatattgtattcttctataatagattcggatttttttgttttacagaacattgtatgtgatatgtgaagttgctataattgcgttaaacaaagcaaaggcgcttggttgaatcgcttggattcagtcaggcgccttttgtagttatttacaagtataggaggaatcaaacatgggattaacttatgaacagagtctggagcattttttgaaaacatttcaaaagtcaaaagaaatgagcgatgaagcggcaaaatatattccgggatcatatagcagaagaagttttaattatggtcctcatgctatttatgtgaacaatgcaaaaggagcatatgtttacacggttgatgggaaaaaattactggatttcaataataattttacggtaagtgttcttggatatcagaatgaggctgtggatcaggcattgattcaaactatgaagaaagggttttctattggaaatcccacagaagaagaaggcgagttggcgcgcatgttatgtgagagaattgattcttttgaaaaagtgaaatttttctgttctgcatctgaggcatgtgtgggtgcacttcgaattgcaagagggtatacaggaaagacaaaagttgcaaagatggaaggcggttatcatggatttttagatgatttttcattctccgcacatccaaatgcgtcaaaagcggatgacgatctggaacatattgttccacagccagagtcagcgggcatacctgccaatcgagcagaggatgttgtgcttttaacacaaaataatattgaagtgagcgaaaaattgattcgggaacatgcggatgaattagcctgtgttgtaatggaactgcagtctgggtccggcggaattgtaacattggataaagcatttgttaaacgtatacgcgagattaccaaagaacttggtattgttttgatttttgatgagacaattactattcgtgcatataaagggggattacaaagttggtatggtgtgaaaccagacctgacaatttcaggaaaaacattgggtggcggcattccactgggtgtcgtaggaggttccaatgaagttatggatgttgtcacaaaagatattgtgcagatgtcaggaacacatcatggacaccgtttggcatgtgctgcgggaattgcaattctaaagcaattggatgatgtggcctataaacgtttgacttggtctgcccagtgttgtagcgacgggggttggtgtgattgtagcaaccagttgtctgctttcacttgggcagggagcaggcactattggaacaccatttattctttcaatggtgttggcttgtatgttgaattgttttgcagcttttggtatggcagaacttaatgcacttatgccgaatctgacgggcggacttgcgcagtatacattggcatgtgtgggaccatttattacaatattgattatggtgggcggctatttgttcggaaatactattgtggccagtgtggaatgtgctatgtttggaaatactctcctggagattttcccacattctccgattccgtcagttgcctattgcattgtagtcctgcttgttttgattgtcgttaatttgaaaggcgtggatctgtttgcaaaagtgcagaatgttgtggcatatgggttgattggttcacttgtaatactgggagtcatcggtgcagtaggagcaggaaccggaaaggtagtcgatcagccagcagttgtaaaaggagattttaacagtgtgatcagtatgtgtgggcttgcctttttcctgtttattgccagtgaatttgtaatccccatttctcgcgatgtaaagaatgcaaagaggaatgttccttttggaatgatcttgagtcttttaattattttaggaatgcagtcacttcttgttttgggattttggcattatacaccgtggagcaaacttgcagcttctacatcgccgcatatactgtatgggacattattgcttggcaatgttggaaaagtatggatgtccattgtagctattctggcagtaatcagtactgttaactcaaatattgcaggtctttcccatattgctgcgggtatggcgaagataggtctattgccggaattttttatgaaacgtaataaaaaagatgtaccttacatttctgtattgattattggtggagcgatgctggtgattaatgcaaccggactttcaacaacgggtaaattatcctttatgattttaagtgcaagtgtgatcctgatgattgcttatattctggtacagattgatgtgttaattctgcgcaaacgcttgccgaaagcacctcgtaattttaaggtgccgggtggtccggtaattccggtaattggtatgattggtacgggatggatggtatggcatattgcagaggacaatgctacaaggtttggcatataccgtttatgtctgattatgtttgtcgtactggcgtgttatgcaattccgtggttaaagctaaaaaaacaggcatttttcaaatatgtgccactggaaaaagtgatggcaatggagaatgatttgtatcaggaatatcatcataaaacctgattattcataagaaaaatataaaaatatggtactatatatagaaaattacaaaaatcagtgctaaaatatacacagttcatccgtgcagaaatgcggccttcgggctttcacatgacacttttttcgatagcgtaggcttagcggtgttatcatgttgaagcggatgaattttttatgtttacagaaatgtgtcagtaaggagcagaacatgaacatagcagtttactgtggatctgattttggaaatcaggatgtatataaaagagcagctaccgagcttgggaaatggatcggaaaaaacaatcatacactggtgtatggcggaggagaatccgggttgatgggtgctgttgcaaaagaagtacatgaagcgggcagtacagttatcggggtaattccgggcaatgtggagtttatcaaggcgcgcccgcagccgtatgtaacgaaactcattaccgcggaaaatatgagtgagcgaaagcaacagatgatggaactggcggatgtgtttcttgcgcttcccggcggtatcggaacattggatgaaatctccgaggtaatcacactcacaaagatcggggtatttcaaaaaccatgtattctgtttaaccgaaacagcttttatgagcctctgagaacgatgtttacacagatggagcaggcgggattctggtggaaagaatctatgcgccatgtactgttttcggatgatctggaagagattagcgcatttattgaaacatgggatgacgtaaagtaacaggtggttttgactgttaagcagtgtaatgatgtaaccggaaagcacagagcgtcatgacagtgaaatcaattaattagggattaaggagaaactggtgaaaaaacaaaaaggaatgatcatcactgcggccgtgttacttgcagccgccgcagtcgtaaccggaagccgtctgatccggcatccggaaaaatcaaacacaaaaaagtctgaggttgcggatcaggagaacagtgaaaaagaacaggatcacaggacctcagggacagaactgagtgagaaaaaacaaaacatgaacaaaagtatcacagaggaagcgttctatatttccaaaatcccggacgatatttttgagaagatgcagggaaaatcatacaaggcagattgtaccgtaccgcgggaagatctccgctatcttcatgtgctccacatggggtttgacggtcagacaaaagagggagaacttgtggtaaataaagccattgcagaggatgtccttgccattttcaggcagttgtatgaggcagaatatcccattgaaaaagtccggctggtggatgaatacgatgcggatgatgaggcatccatgagcgataacaattcctctgcgtttaatttccgtttcatttcccatacgacaacaatctcaaaacacggtctgggcatggcagtcgacatcaatacgctttataacccctatgtaaaaaccgtcaacggaaagctgtcgattgagcctgcaaacgcagaagcatatgttgaccggagtggggattttccgcataagatcgatcacgatgatctgtgttacaagctttttacccgatatggatttacctggggtggggactggacacattcgaaggattatcagcattttgaaaaagactgatgaaaagttgtggggacatatagagaaaaagatgtaatgtatggtccataagaacaaacgtggaggtcaatcagaaaagcagatgatggaaaatttttctcttgacatattttgtcaggagtctataataggcaacataaagaaaatattgttcaccgaaattcgttgacgagaacagcatcgtatcttatcgttattttcagagagcctgtgggtggtgcgaacaggtagtagccggatatggatgatcctctctaagaagcgggctgaaagcagataactgtgagtaaacttcgccggtttcctccgttatgggatagcatatgttggtatgtgaagtgtcacagagtttttctgtggaatcagggtggtaacgcggattttattcgtccctttccagagtagtatctgggaaggggcttttttaatgtctgaattcgtttttcagtgaacagaccaaggaggaaaagtttatgaaagcactacaaaaactcagcaaatggttatcggactacacatcaattgtggtaattgcaattgcggtagtaacatttatcgttccgggaatgatgggatgggtaaaccatcagttatttaccgatccggtttccaataagtttacaagtcagtcgatcatcatcggtattattatgttcagtatgggtctgacactgacaacgcaggattttaagattctggcacagagaccattcgatatctgtgttggtgcattggcacagtatctgattatgccgtttctggcattcgcactgacgaaagtgctgcatcttcctgccggcattgcactgggactcattctggtaggttgttgtccgggtggtgtgtcatccaatatcatgtcgtatctctgtggtggagatgtggcattttccgtgggaatgacaaccgtatccacgattctttccccgatcatgacaccacttatggtttctcttctggcaagcggaaccaatatttccatcaaggcactgccaatgcttgtttccattgtggaaacggttattcttccggtagcactgggcttccttttaaactatctgctggggaaaaagaaaatgttcagtgagttacagaaaattatgccgggtgtggcagtactggggctggcgtgtgttgtcggtggtgtggtatcttcccagggcgcgaagttcttccagtccggagctgtaatctttgtagctgtttttcttcacaatggacttggttatctgcttggttatggagcaggaaaacttgttggcatgaataccgccaaaaagagaaccattgccatcgaagttggcatgcagaatgcgggactggcaacaaaccttgccacaacgaccgcacagttttccgcaacaccggagtctgcgatcatctgcgcagtttcctgcacctggcattctatttccggaacactgcttgccggcatgtttgcagcttatgataaacacaaacagaaaaatgcataagtttttctattgacatagacatgggaatgatgtaacataacggtgttatctaacataacaacgttatgttgcatttttatttacagggagcgtaccatggcaggaaagaagatacatgacagcgagacaaagatacacctgatccaatgtgccaaaaaagaatttatggaaaaagggtttgcgggggcatccctccgcggaatctgccagaaggcgggtgtgaccacaggagcactgtattttttctttcaggataaggacgatctgttctgtgaagtagtgggaaattttatggatcggctcaatgagattctgcgagagcatttttcttttgaagtcagggagatggagagcggcaaagcaaaagagcatgatgacagcagcgattttgaagcagtcgcacaggttgtccatgaactgtacacctaccgggatgaagtgcttttagtgctgacaaaagcgcagggatcaagcatggaacgtatgccggatcggttggtcgaccagatggatgagcacaatgcatttatctgtgaagcgatgtgcaaagcttaccatgtgccgatggtggaacaaagcgttgtacactggatgtcccattcacagatcgatatgtttatatttatggtaacgcacattgatgacgaggaagaagcactgcggtttgcggaaaaaggtgtaaaatatctgctggcaggctggtacggactcgtcagaccgtaggctgtccgcatgttttgacggaaggtcgggaaaagaagcacagattgtccgcgtttggacaaaaggtttagaaaagaagcacaggtctttcgctttttgcgggagacctaaaaaaagaaccaagggttagatgaaactaatattagtatgaaaagtaaaaccaaaaagaaagggagtttctatgtcagaagaagaaaagaagtttttggaaattgtagatttaaagaaaggattcggaagcggacagacacgtcaggaagtactccgcggcatgaatttttccgttgcaaaaggggagttctgtgtgctgttaggaccatccggttccggaaaatccacactgctcaatatcatcggaggcattgataacgccgattccggttacatcaatatcaacggcgataagttagaggatatgagtgagaaaaaactgacacagtaccgtagaaaacatctcggctatgtattccagatgtataatctgatcggtaatttaaatgtaaaagaaaatattgaagtgggggcatatctgtcggataacgcccttgatattgacgatctgttacatacgctcggactttacgagcaccgctacaaactgccgaaccagttgtccggcggccagcagcagcgtgtttccatcggccgtgcgattgtaaaaaatccggatattctgctctgcgatgagccaacgggagcacttgactacaatacctccaaggagatcttaaagctgattgaggaggtcaacaaaaaatacggaaataccatcattatggttacacataacgaggcgatcaaaaatatggcagaccatgtgatcaagctccgtgacggtgcggtgcgccacaacgacatcaatacaaacaaggtatccgcggaagatctggaatggtaagggggctgctatgaaaaagaaaaaaatcaaaaatcccctgatcaggagaataccgaaggaactgatcggggactggaaaaaatatctggttgtattcctgtttcttgtgctcacgatcggctttgtgtccggtatgtatgtggcaaacgagagtatgattacttcagcaaacgaaggcgtgacaaaatacaaacaggaagacggtcattttgagctaaaaaaacaggcagatgccaccttgctttcggcaattgagaccggtgaaaaagcggattttaaggcaacaaagacaacattgtatgaaaactttttccgaaatgaggaagaagattataataacgacgggaaaaaggatggaacgatccgcgtatttgcaaagacaaaggatatcaacctggcatgtatgctgcagggaagttttccacagaaggcggatgaaattgccattgaccgtatgcacgccgacaatgtcggaataaaggtgggagataccgtcacagtttccggagagacttataaggttgtgggactgcttgcgtatgtcaattactccaccttacatgaaaagaccacagatctgatgtttgatgcactgaaatttgatgtggcaatggtgacacaggacggttttgaccggctgcacaagagtattcactatacttatgcatggaaatatgaaacggagcctgcggatgaggccggggaaaaaacacgctctgataattttatgcgtgcattgctcacacaggtggttgttgcggacaatgagctcgaagattacacaccgaaatacggaaatccggcgatcaattttgcaaccgatgatatgggatcggacaaagccatgggaggtgtgctgctggatatccttgtggtaatcatcgcatttatctttgccgtgacgatcagcaatacgattgcaaaagagtcctccgcgatcggaacgctgcgcgcgtccggttacacgaaaagagagctggtgcagcactatctgtctatgccggttattgtaacactgctggctgcgattgtcggaaatatactcggctatacggtgtttaaaaatattgttgtgtcgatgtattacaacagttacagtctgccaacgtattacacgatctggaatccggatgcattctttaagactacggtggttccggtgatcctgatgctggttgtcaacctgattgtgatcgtgcgcatgatgcagcatacaccactgcagtttttacgtcatgatttaaaaaaggcaaagaacaaaaaagccatgcgtctgccgagatggagctttttaagccgtttccgtctgcgtatcatgttccagaatgttgcaaactatctgatcttgtttgtcggtattttctttatcatgatcatgctggccatggcagtgggcatgccggatacgctcgattattacaagagcaacacggatggcatgatgtttgcaaaataccagtatgtgcttaaatcctatgaggatgacgataataaactgattacgacagaaaataaagatgcggagaagtttgacatgacctcactcgtaaaaaagagtgatgtgcttgatgaggagatctcggtatatggaatcgcggacaacagcaactatgtaaagatcaaaaagttaagttcgctcaagaaaaatgaagtttatatttccacttcgtttgctgacaagtatggacttaccgttggcgataccgtatcgctggatgaaaagtatgaaaacaaatcttacaagtttaaagttgcgggattttatgacaagtcccaaagtcttgcgctctttatgtcgattgacaattacggaaaagtatttgacttaaaggaaaatgaattcagtggatttttatccgacagcaggattacagatattgatgaggaaaatattgcaacgaccattacgataagagatattacaaagatggcagatcagcttgaccattcgatgggatcgtacatgaattatttccagattctttgtattcttctggctgcggttatgatctatcttctgacgaaactgattattgagaagaatgaaaatgcgatttccatgacaaaaatccttggatacgaaaacaaagagatcgcgagtctgtatctgctttcgacgagtattgtggttgtaatcgcggatctcatcagtgtgattcttggaacacttgttatggccgcggcatggcggatgatgctcttttcctacagcggctggttcgcttttcgcgtaacaccgattggttatgcaaaaatgtttggatttgtgctgatcggatatctgattgttatggtatttgatttccagagaatcaagaagattccgatggatcaggctttgaaaaatgtagagtaaacaaagaaaataaaaagaactggtactttggagaggtacataaaacgccccggtagttgtagctgccggggcgttaatttatgtaatgtgggattacgcctgctcaccaagagaggtattacgcagtaccgcaagaatgatgatagcatatactccgccgatcagagcggtaattaactgtgtgacagaaaattgaagctgcaggacatgtaacattggctgcatttttgccgggagcatattcggcagaatgataagagaaatcaaaattcccataaacagagcctttaatacagcgccaattacaatggatacgggtaaaccggcttttttaccgaatttactgcggagcagggcaactgccagaacgagaatgatatttccaatcataatacatgggaacattgcaggaatggctgccataatcgggcttccggtgatgaaaaaggaagtgattggagtgatcacgcttaaaatgatgccacaggccagaccagcgtataccgtggttaaaatcagagcggcattgatgatcgggcctgtgatgtatacattcaggtttttgaaaaactggcttacaatgcagattgcgagtaaaattgctgtaacagtgatttgtcttgtttttaatttcataaatttatcctcctaaaattcgtatcatggtaatgatactcttaaaggcaccgaaatgcaatgacacggggattttatcttgtgttaccataaaaaatgaggtagagtaaagacagtgaaaagatattttgctcctacagggggataaaaactgtcgaatgtttagaaagaggagtgtatatgaaaaaggggatagtatttctaattgtatttttgatggtcatcagtttcccgatatgcggatatgcgaaggggaaggagaaaatttatctggactcttcctggaaatatgcggatcatgccagaattatatcgggctatgccgttatgtacaaggcgaaaaagaaccggaaggacattgtgattgcagtcaatgcgggacatgggacgaaaggcggttcatcggtcaaaacgctgtgtcatccggatggctctgcaaaggtgaccggaggaacgacagcggcaggctctgtgaaagcagtggcggtttcagatggaatggcatttcgggacggaacggcagaacgtgatgtgacgcttcgtatggcacggattctgaaaaagaaactgctggcagaggggtatgatgtgctcatggttcgggatggaaaggatgtgcaattggataatgtggcgcgcacggttatatgtaataatgtagcagattgtcatattgcactgcattgggacagtgacggactttcctatgacaaaggatgtttttatgcttctgttccgaaacagctgaaaaaccgaaaaccggttgcttcttattggaaagaacatgatgctctgggaaaagctttgattaagggattgcgttctaaaaaagtgaaaataagcgggacaggagctgcggagattgacttgacgcagacttcatacagtacaattccttctgttgatattgaactgggcaaccagtgctcggatcacagtgacaaaaaaatggaaaaattagcagccggattactgcggggaatcaatagctatgcgaaaaaatacattcatgtagcgcctttaagcagtctgtgagatttatatgaaataaaaaatggaggtagcatatggaaacatggtattatgaagtggtcagcattgatggagattatgcaaatttaaagcggacagatatcgaaagtgatgatttaaaacttgtggcgcgggcattgcttccaccggaaattatggagggaagcagactcaaatatgagctgatgcagtatgaaatcatagcgtagctatttggaaaagaggtttacacaatggacgtaagaaaaatgagaaatgaaaaactgggagcgcgtgttgtggcggcactggaatcccgaaacatggaagcatactatgtagagacaaaagaggaagcggtaaagaaagcactcgaactgattccaaagggcagcagtatcaacatgggcggggccgcttcagtaaaggagtgtggtctttacgatgccatttccaacggggagtatgaattttatgaccgggataaagtaaaaaccccggaggaaaaagaggagattgcgcggaaagcattcagctcggattattttttgggcagtgtcaatgccatgagcgaggatggcgtgtttatcaatattgacggaaatgccaatcgtgtggctgcgtatgcctatggaccaaagcatgttctgctgattgtgggtatgaacaaagtcgtaaaatccgaggaagacgccctgcaccgtgcgcggaatgaggcggcaccgattaatgcacagcgatttggcattgacacaccatgttccaaaaacggaagctgttttgactgtaaaagtccacagtgcatctgctgtcagattctgacaacccgattcagcagggtcaaaggacggtttcagattattctggtggatgaaaatctgggcttttaagaagaaagacgggttttcttgtgatgattatgggtatatagcattggcagtggtggcactgattcagctgatccggcaggtttgtaagaaaaatgaataataaaggataaaaagttctgggaaacagatgttttccagagcttttttatttccggaaatattacctcgcaaaattttcaaaggcctttatgaaacccaagaaatggcatttctggaaatcagtattgcggtcacgtatgcgtgatagtttatgctgaaaagtacggggaaaggtaaaggccgtaatgaaaaaagtaaacgaagtgagccggctggcaggagtgagcaagagaactttgcagttttatgatgatgaaggactattgcctgcccagcggtcgaaagacaattatcgactgtacgatgacgctgcactggaacgtctttgggagattctggtgtatcgggcaatggggcttgatctgaaggaaatcaaagatcttctgacgctttcggagaaacaaaaaaatcagtatctggaaaagaaaatccgagggctcaggcaacagatcagacagctgaacgggcagatggaatttatttcatatgtgcagcaaaatggaatgttaccggttccgacagaggaaaacactgtggaaaagacctatatggatcatatagcagtgttgagaaaaatgaagcaggatcaaaaaagggaggatgaggagaaatgaaaaagatctcacaaatgagaaatgaaaatgggggaatagtgtgcaaatgaaagaaaaagtaaaaaaagaaaagaaactaaggacaccaatacaattaaatttgaaagtgaatattgggataatcgtgactatagttgtggcaatttttattgcgattccacttttaaaggggaaggaagcttcgaaaagggaagccctgcagattatcaccgaatcaaatttacataagattattgaagtgagccagttatccacctatgaatgtgtatataatgatgtctgtaccgttatggataaagaggattcttcaaaaatagcgtattattgtaaatacaatggaagggtgaaggcaggaattgatttttccaaagttgatattgctgtaaaggagcaggaagatgggttattgttgataaccgttacattgccagaagttacactgggagagccggaagtggatattacttctttgaagtatatgtttatggaagattctgcagacaataacaccgtttcaggagaggcatatgatgcctgtattcaggatataaagaaaaagagtcaatcggaagaactgatttatgatacggctcaggagaacgcagtgaatattgtaaagggactggtggaaccttttataaaaagtgtggagacatctgaaaaacaatatgaggtaaagattgtaacaacaggggagtatacaaaatgaaaaagacagtgaaagtattagcaattattacaatgctgggactgttctgcagctgtggtgcagaaaaaaatatggcagatattacacagatgcaaccagaattgtcacagatgaaagcaatcagtgaactggcaacaatggaatgttattatcataatgtggcggagtattataaggaggatgccactgggtatcttctgtggaagaaagacaggaggttctggatcagttatgacggaattgttacgcttggaattgatacctcagagcttgggctggaagtaaagggagaaaaggtaaaaatcacgattccggaagcaaaagtgttaagctcgaagccggatccggatagtattacggctgactcttattattatgataagaattccgcaaaagcaagtgcggacgatcagacggaggcatacaaacaggcagaagaagagatggaaaagaaagcggcaaatgattctgcactactggtacaggcacagcagcgcgtgcagtctcttctcgaagattacgtgaaaaatatgggggaggttctgggaaaagaatatacgattacatgggatatcaaagaaaatcatgtgaagccggatacggcagaatcgacagaatagtaagctttttacgatggcttggaacaatgtattctaagccatcgattttttatgcagatatgcgttacggttggtaaaaaattaacatttgcctgattaaacaacagaaaaattgatagaaacgatcaagatagactcttgaaaaaagtaaatttcctcataaaaatgtaaaaaataaatataattcgctcataaaaatgtaatattgaagaaaaaatcgctcataaaaatgtaattgagatcaactttattacagagccatcttataaagttattgttgaggaagggttttcagcagaacatattatcaagctgatcagcaggattgatccgacgaaacattttgaagaaaacgaattggtagattatgaaaatgatattgtaaagtatgcacaagggctggataaggcgaaaattctgcgtgtataccggtcaattccggaacagcttgctaaagaaaataaaaaatttcaatattcgaaagtctctaagggcggaagatctaaggattatatgg

SEQ ID NO: 1021 - DNA, 2369 bp, Unknown
  gut microbiota DNA sequence
aatatagttgatatacacaatcgaatatgctaacgtgaaaatgtaacaagtaattcaacattcaaacacaggagggtaaatatggtaaaaacaaaaaaacttcaaaaaaatcttggaaaagggttattggcaggcgcattggagaaaccagaggtgcctgatacaataaaatttaaaaagcattttaagaaactcgtcagcgttgctctttccgctgtcatggttatgggtatgtctgtaacagcttttgccgctgaaccgcagactagcgaaattgaaaagactatttcagcaaatggttatgattttacagttacagaacacactgcaccagattattccgtaagtcgtacttacactaaaagtatgatgacacgttctgctacaactgaagatgaaacaagagcaatgcttcttgctcttggcatgaacgaagatgaaatcaatgctattcctgcggacacgctacaagatttcgcaaatggcaaagaggtaacagtcgttacttcttatacaaaacgtaatgaaaccgccaacactactgttgggttgcccgaagaaaccgctttaacatctgccgccgctcttagcgaagaacaggaaaattatatacttgaaaatcagcaaggaatcgctacttgcggagaaaagccgaataactcaactactgctggagtatttgaagatagctatatgaaaatcactcattccgctataaatcaaggaaacggttcttacaaatttacagtaaacgccacatggcttacaatgcctttcttccgaggatatgactctatcggttcatgtgcaatgaatggaactgtaaccccaaatacaagttccggaaaatattggtatacaacaaaaacatattacttaggaaaagtaacttccactccgtctggcaatattacgattacaaataagagtaacgctgtaaacggaaattggtatggctctgctggtatttttaatcttccgaatgacccaggtagttctaatggaacgaccgttttacacacagacctaaaagcatattatgaatacaaaggtcacgtttcaaagcctaaagcggaaagctactttaataccgttggaacttatagtcacgccaccgtaggaataagctttagtccttctatttcgattgataccacaggaactgcttctgcttctattggattgtcactatttgccgacaaagatgtaagaaatgcagaaagagaaattcactaccgtccataattaaaaaaagtggggagaacctccccacttttttatttctttttattattaaaatatactataagaccacttgcaacagcaatacttactatcgctcctaactcaggataaccaccaaaaaattctattcccaataccatagaaaccaaaccaacaacaagcgttaaaaccagtgtaaaaataactttccccatttttatttctcctttcttatcaccgtgattaaatatactctaactgtttgccatttccatgcagaagctctttctcaatttcttcttttccacgaataacacaagcataggttagaacttttggattgtccgttgcaatttccacctctttcccgatacatttcagaatacaataataactttcgttaaaatcttcaataaagaaaccagaggtgcctgacacaataaaattgattgctccgaaaaataatcgtttaccagttcctgtggatctccaaactgtgaaacaagctgttcataatcgagagaatcctgttgcgctgcataagaaatgacagcgtctttcaaatcagaaataaatcttgtgtctgcggcatggtagtgcttaaactgtttctgcacagcctttatatattcatccgtaattttatccttggtcattgtatcccccttttttctactgtgtaaccgtatatttcaatacctgttggatcgcattggcagtcgcgtaataatcctccaaaagttgttgcagatgcgtgcggccactgtcttccaggtgataataaacattcacctgacggcgtcccacctgttttttgtagtctgaaatatatccggcatctattaatttgtagagagcaggatacaaagaaccaactggaatattcaggtatccattggtctgttcccggatcagggtggatatttcataaccataatagtcctgctggctaagcagatgcaaaattaacaattcgacggaaccgcgccggaagttacttttgttgttcataggcttttccttattttgagtgtattgtaaattaaataagataataagtcaatatatagaaaaactaaaatatagttgatatacacaatcgaatatgctaacgtgaaaatgtaacaagtaattcaacattcaaa

SEQ ID NO: 1022 - DNA, 9163 bp, Unknown
  gut microbiota DNA sequence
tgaagtgccggcataagggcaatgtttggagtaacatgtccggcagttccgccaccggtcataacaattttttttgatttagccattcgatatttcctcttttctttacttaagtcaactctatatgatctatatagaaatgtcaagcaacatgggcagtaacgacatatgtcgaaacttgcgaccgaaaggatattccggtgatgacgttctttcattataataagatttatacagtaagaaatgattttatataatatgaaaggatgggagcagatatgacaatactgatgtggatcagcaggtggcaaaatgaaatggagttaatgattatgggtttgcagatcatactttttttatttttaacaattggggtattttgtattgtgcggcaacagaaaaaagcaaaccggtgcagaagacgcctggaattgtacttaaaaaaacacatggacaagccgaaaaagaaagaagaaaaaagtgtatcaccggagaacgtgcaaaataaaaatttacatgaggatgaggaagaaaaccgcataatttcaactgttttgcaggaaattttcccatagtggaatgttttttatcaaaaacaatacataaattgacacaggaatataaaatatgtaacattttcaaaaccggcatgggtgtgcagtgaaaacgcacacccattttttaaacggaatatgagtaaaagtggagagcaccacccatttttttactaaaatttgacaaacaggaatttctgtgctacaatgagccacgtaacaaacttgtaacaaatgaaataaagtgtttaaaaacgcaacataagtgtaatacttattgcataaaatgttacgaatccacggttgagatgtggatgaaacaaactacggaggttcatcaatgaaagcaagcaaaaaggtgatggaaagtgtaatcgtgtcgggactggcactcacacttgcggtcactgcagttaccggtaatggagtgaatattgcagcaaaggatgcagcagacacacagtttgtcaataacggaattgccggagtggcatctgccatgaatgaatatgaattggagtcggcagactatctggacagatatatttctgttgaaaagacaaatgcggctttggttgcggcaacagcagatggaacggttatatccggaaatgatacaaaaaaagaagaaaccacagaaaaggaaactgtttccgaagaggaacaggagtggcagaataagctgatggcgaaggtagatgatttcctatacgtccgtgaaaaggcagattctgattccgaaattgtcggaaagatgtacaaaggggatcgcgcagttgtgaaagaagcaggcgatacctggacaaagattgagtccggcaatgtaacaggatatgtcaagaatgaatattgtgtgacaggaacagatgcattaaattatgcaaagaagcactgtgatacggttgcgaaggtttccattgacggtcttcgtattcgtaaagcgccagacacagatgcggaggtagtgaaaaccgttgcatcgggtgagcacatggatgtgaatacaaaagccgaagaaacagacggatggattgccgtcaaagttggttcagatacctgttatgtgagtgacgattatgtgaccgtcacactggatacaggcaaagcagtcaccattgaggaagaacaggcagcaatcaaggctgcagaagagaaaaaggcagcggaagaagcgaagaagaatgcttctgtttctgctgaaaagaaatcatcatccggtcagtcggcatcttcccagacaacacagaatgcgtcgattgccgcaagtgcggatgaagagacacttctggcagcacttgtacagtgtgaggccggaggaaccagcgtacagtgtatgacagcggttggagcggttgttgttaatcgtgtcagaagcggcggatttgcaaattctatctacggagttatctatcagagaggtcagtttggaccggcatcttccggcagacttgaagcaagacttgccagcggtgtcagcgcaagcgccagacaggcagcgagagccgcattaaacggcagtgatccgacaggtggagcaaaatacttcaaactggcatccagcggtcatgcgggaacggttgtaggaccgattgtattttattaaacttaaaaatccaggagctttgtcgaaaggcagagctccttttttgatcggtcaattttccataccattgttgtaaaattccggcaaatggagtaaaatgttttcaacgtacacttaaggaggaagagcaatgacattaaagggacgtaatttgttaaaaatgatggattttacaccggaggagatcctgtatcttgtggatctgtccgcagagctgaaagagaagaaacatcagggaatcatgcatgacagtctggttggaaaaaatattgcactgattttcgagaagacaagtacaagaacccgatgctctttcgaggtagccgcacatgatctgggtatgcatgtgacatatcttgatccgagcggttcccagattggaaaaaaggaaagtattccggataccgcacgtgttctgggacgtatgtttgatggaatcgaatatcgtggatacggacaggaaatcgtggaagaactggcaaaatatgcaggggttccggtgtggaacggactgaccaatgaatcccatccgacacagatgattgccgatatgcttaccatcaaggagcatcttggaaaacttaagggtgtgaagtttgtatacatgggggatgcccgttacaatatgggcaattccctgatggttacctgtgcaaagcttggtatgcattttgttgcctgcaccaatccaaaatattatccggacaagaagcttgtggattattgtgtggacgtggcatctacgacaggagcaaccatcacactgacagacagtgttgcggaagcaaccagggatgctgatgtcatttatacagatgtatgggtatccatgggtgaaccggaagaagtatgggcagagcgtatcaatgacctgaaaccgtatcaggtcaatgcagatgcattcaaaaatgcaaaggacagcgcgatctttatgcattgcctgccggcattccatgatttaaagactacgatcggaaaacaggtttatgaaaagtttggattatccgagctggaagtgaccgatgaggtatttgaaagtgagcgctccgttgtcttcgatgaagctgagaaccgtatgcattccatcaaggcgatcatgaaggcaacgttatctgactaagaaaaaacgtttacatatttttgtgaatggaaagtatgattatgaaagcagaaattttaagactgctccgtgagacggacggatatgtgtccggtcaggagctgtgcaatcagtttggcgtatcccgaaccgctgtctggaaggcaattaaccagctgaaagaggccggttatgagattgaggcggtgcagaataagggatatcatctggtatctgtgccggaccgtatggacgaagtggagctggcaagcatccgaaagaccgaatgggcaggcgcggaaacgtattattttgataagattgattccacgaacacgaaagcaaaagaactggcagaagaaggacatccatccggaacttttgtggtagcggaccagcagactgcgggaaaaggacgtcgcggacggtcatgggattcccttccgggaacgggaatttacatgacactcatgctcaaaccggacatcaatccgaaccatgcatccatgctgaccctcgtgacagcgatggcagtggcaaatgcaatgcaccgggtgacgggagcagaggctttgatcaaatggccgaatgatattgtcataaatggtaagaagatctgtggtattcttacggaaatgagtgcacagtttgactatatcaaccatatagtgatcggaatcggaattaatgtgcacaatgaaagcttcccggaagaactgcaggatcatgcaggttccctgctgctggagtgcggaaaacgtgtgcaccgtgcagatctgatagaggcatttctggaagaatttgagcggttatatgccatctatctgcaaaccgaggatctgtcagcattacaggaagagtacgatcagctgcttgtgaaccgtggccggcaggtgcgtgtactggatccgaaggagccatttgagggaaaggctatgggaattacaaaaaagggagaactgatcgtagacacctgggagtcaagaaaactggtgtcttccggagaagtctccgtgagaggaatctatggatatgtctaaagaggcaaatgaggtagtattgtgcgtatccaacgcataccagaaaaaattttatttgaatgaaaacttcaacggacttccgcagtccatccgtgacgagttaaaaatcatgtgcgtcatttacaccgaggatatcggcggagtattggagctggtatatgatgaagcgggaaatctggaacttcgcacttcctgtaaagagggcgatttctgctatgatgagatcggaagcgtgctgaaaatcaagcagctgcgcaacgaaaaaagggaattgctggaagcacttgagatgtattacaaagttctgtatctgggcgaaggcttagaggcactggacgaggaggaagacaaatgatattaaccatagatgttggaaatacgaatattacctgcggggtgtttcagggcgatgagatcgccgcaagttttcgtattacgacaaaaatgccacggacatcggatgagtacggcatgatgcttttgaatctgctggagcagaacgatattcatccgacagaaattaaggatgccatcatctgttccgttgtgccgaatgtgatgcattccctgaggggcggacttgtcaaatatttccatatcacaccgatcgtggtggaggcgggcatcaaaacgggaatccgcatcgtgacaccgaatccgcagcagattggagctgaccgtattgtggatgcagtcggggcatatgaaatatacggaggtccggtgcttgtcattgatttcggtaccgccacaacctatgattatgtggatgaaagcggagcctttcagggagggatcacagcacccggaatccggatttcggcaaaagccttgtgggaagatgctgcaaaacttccggagatcgagatcaaaaagccagcatcaattctcggaaaagacacgatcacaagtatgcaggcagggcttgtgtacggacagatcggacagaccgaatatattattaaccgcgtgaaagcggaagtcggactcgaaaatatcaaaaccgttgtaaccggaggacttggccgcatcattgccaatgagacggatgctgtggatatttacgatccgaacctgacgttaaaaggtatcaatcttgtgtataaaaaacagaatcggaaaataaaatagttatgatcagatcacttcagatcggcagtgtgacactgccaaacaatttaatattagctcctatggcaggcgtaaccgacctgccatttcgcttgttgtgcaaagagcagggggcagggcttctgtgcatggaaatggtaagtgccaaagcaattctctataaaaaccgtaatacacagacacttctgacgattgatccgcgggaaaacccggtgtctttgcagttgtttggatcagatccggatattattgcagagattgcacatcagattgaggatcgcccatttgatattcttgacctgaatatgggctgcccagtgccaaagattgtgaataacggggaaggctcggcactcatgaaaaatccaaaacttgcaggcgagatcattgaaaagacggtaaaagcgatcaaaaaaccggttacggtaaaaatccgcaaagggtttgatgatgatcatatcaatgcggtggagatggcaaagattgcggaagcctccggtgcggcagcagttgccgtgcatggacggaccagggagcagttctattccggcaaggcagactgggacattatccgtcaggtaaaagaagccgtaaagattccggtcattggaaacggagatctgcttacggcggaggatgtgattgccatggaagaacagaccggatgtgatggcttcatgatcgcaaggggcgcacagggaaatccgtggattttccggcagatcctgcattattttgaaacgggggagcatctgccgaagccgccggcatcggaggtggcacagatgattctgcgtcatgcccggatgatgctggagtttaaaggagagtatatcggtatccgtgagatccgcaagcatgcagcatggtataccgccggatatccgcatggggcacggctgcgtgtggcaatcaaccaggtggaaaattacgaacagctggaggcactattgatggagtatttcgtctgatgcatagaaagctgtgtcgatgttcatggaattgctgtccaagtgctgggtggacacggtgttgggcgggcggcaactttaaggatgagcgacagtccggtttgaaggagaatatcttgacagaatgtggacaattcgctataatacctaggttattgtggattatttatgcgcttttttcaaaaagctgcatataaaaaatatagaatcaggggtaaatcaaatggataagaaaaatatcttgacctatgaaggtctgaaaaagctcgaagacgaactgcagaatctcaaagttgtaaagcgtaaggaagttgctcagaagatcaaagaagcccgtgagcagggtgacttgtccgagaacgcagaatacgatgcagcaaaggacgagcagagagacatcgaggcgcgtatcgaggagatcgaaaagatcttaaagaatgccgaagtcgttgttgaggaagaggtcgatctggagaagatcagcatcggatgtaaggtaaagattctcgactgcgagttcaacgatgagttagagtacaagattgttggttccacagaggcaaacagcttaaagggaaagatcagtaatgaatcaccggtaggccgcgcactgttaggtaaaaaagtaggcgataccattaccgtagagacacaggctggagagttatcctacaaggtactcgagatccagagatcaaccgtagattaagagaggaaatgaaaatggcaggacagaataacggaaagcagggcggacagcagcaggatgtcaaccagctgttaaaggtgcgccgtgaaaagcttgcaaatctgcaggaagcgggacaggatccgtttcagattaccaaatatgacgtaacccatcacacatcagatgtgaaggatctttacaatgcacacgaagagaaactcctggcaggcagaccggcagttaataccgatggtatggacgaggcagctgcaagagaggcagtcaaagcagattatgaggagagaagaagcatcatggatgccgatccggtccacgtatccatcgcaggacgtatgatgttcaagcgcgtcatgggaaaagcatctttcgcaaacattcaggatctcaagggaagcatccagatctatgttgcgcgtgacgcaatcggagaagatctgtatgcaaccttcaagaaatccgatatcggagatatctggggtgttaagggatacgcattccgcacaaagacaggagaaatctccatccatgcggaggagatgactctgctttccaagtctttacagattcttccggagaaattccatggactgaccgacacggacatgcgctaccgtcagagatacattgatctgatcatgaatcaggagagcaaggaagtatttgtaaagcgttccaagattttaaaggagatccgtaacttcttagcagaccgtgatttcatggaagtagagactccgatgcttgttgcaaacgcaggcggtgcggcagcaagaccatttgagacacattacaatgcattaaatgaggatgtaaagcttcgtatttccctggaactttacttaaagagactgatcgttggtggcttggagcgtgtatacgagatcggccgtgtattccgtaacgagggtgttgatacccgtcacaatccggaatttaccctgatggagctgtatcaggcatacaccgattacgagggcatgatggaactgaccgaatccatgttccgttacctcgctgaaaaagtatgcggatctaccaagatctcttacaacggcgtggaaattgaccttggaaagccattcgcacgtctgacaatgaacgatgcgatcaagaaatataccggaattgattttgatcaggtaccggatgatgcagcagcaaagaaacttgcagacgagcatcatattgcatacgaagagcgtcacaagaagggggatatcatcaacctcttcttcgaggaatactgcgagaaggaactgatccagccgacctttatcatggatcacccgatcgagatttctccactgaccaagaagaaaccaagcgatcctacaaaggtagagcgtttcgaattattctgcaatacatgggagatgtgtaacgcatactccgagttaaatgatccgattgatcagcgtgagcgtttcgctgcacaggatgccaatgccgcagccggtgatgacgaagcagaacacaccgatgaagatttcctgaacgcactggagattggtatgccgcctacaggtggtatcggatacggaattgaccgtctggtaatgttactgacagacagtcaggctatccgtgatgtactgctgttcccgacaatgaagagcattggtggcgtaaaggctgaaaatggtgtaagttctaagtcttcagaagaggtaaaagctgagccagagaagattgatttctctaatgtaaagattgaacctttatttgaggaagaagtagactttgatacattcagcaagtcagatttcagagctgttaaggtaaaagagtgtgtagcagttcctaagtcaaagaaattattacagtttactttagatgacggaacaggcacagaccgcactattttaagcggaatccacgcttattatgagccagaagagcttgttggaaagacacttattgccatcacaaatcttccacctagaaagatgatgggaattgaatcttgtggtatgttactttcagcagtaaacaatcttaaggattcagaggatgaagaacttcatcttcttatggttgataaccacattccagc

SEQ ID NO: 1023 - DNA, 24379 bp, Unknown
  gut microbiota DNA sequence
aacgccctcgttgtggtggataataccctttgaaacatcaagcgttgtatcgtctatgatgttctgcatcacagtagagagcgttatgggaatatcgtctggtctgttataacccagagccatcgtgagatttgcctgtgcgtcggcatcaatcagcaggacttttttactctgctgcactagacttacacccagattgaccgctgtggttgtttttccgacaccgcctttctggttagtcagagcaatcactttgcaatttgacatagatgcgtcctcctttcgcatagatttagccactttgtcaaggtggctatgtaaaacagtaccagagaacgcaaaaaagccgcctactcttaaaatcaataagaataaacggctttctaatctgccttagacatattcaattttcattctcttggacggtgcatttatgactttaaaaataagctcgtcaatacaatccgtatatctgccttgctgaatgagctgattttttaactctacagggctatgtatcaaaagttttctttcgtggctatccaaatacagatgattaaatttctctctcataagcacacctccacttctttagcttcattatattggaaagcatgggaaaggacaaatctgcaaaaagggacaaaaataagcgtaccactatttctaatgatacgcttatcgtatttaactattaatcaaggtctatgaatacccttacagtggtatctctccactgatttttcttacatacggtccgttaaccttgcgatagtagcctataaaaaatgattaaaccccatcacttatacataaaaatatcttcagaacctactatatttgctcattaaactttctattttctccccgtcaagaaaaataagattgttttttaaaggatattcttgtataccttcaattattttctcaactgcattcaatgtaaatttccctgaaatggcaataataacttttgatattcttactttattccgtgaatacacatcatagaatggcattgaaaaagcatcttttgcctgcgtaattaattcatttatatccccattcgcacctcctgatacatctccgaattttacctgcactccataatactcatactcgtcaaattctgttcttctagcaaaagtaacatcttttccaaattctttgttaccatgattatactttacattcacaaatcctaactttctaaaaagcggcaataatattttaattgtaaactcactttctttttcacaatcatcaatttgctgaaatggcgaacctaatgcaatatctgtagctccctctatttctccatacaattgctctatatccattaatagattatctatagaatctgcaattatatttgtacaatattttagacaaatataagcaccgtcatcatcataataatctaacgaaatatctcctatttccctagaacgttcttcaataatacctttttttgtttccattaacaactttaatccgacaacaccatcccaatatttccttgtaatcaattcttcataccaaacatgaaattttttctcacctatacgcttaaaatgtgctggaattttaattactactgccgcatcagattgtgattcacagatttcaatatcaaaatcatatgggatactggctatatctgttctttttaatacagcaacgggaacaactgcactttctccatcctctgaatattcttctccttcaattacaaacgaagctaatccagccacctcatcataaaactcaacttgagacatacttcctcctaatttctattctccttagaaaaagcaaactaatatttgatatttctaataattcactataacactaggaaaaatggtatcgctatcttatttctcttctgctttttgcaataccactttacacaaatcattatcctctacctcaagtcctgttttaaatgttactttcttcattcgtattgcataattaaaatcaataataagattactttcttcaatcggtttctttgcatctttgattccaattggcattaataaatatccagaatcttctcttgtaagatactgaaataaatctctattctttgaaccattcaattcgtccatccattgatacctactaaaagacgcaaggagtaattcttctggttgcactccagacgccactgctcgattaattgactcctctgtgttcggtccgatatgaacaaaataacctttaccaaaacttctttctttatcagtatagacccaacaatcttgcggaaatggaggtgtaacgtaatcaacttttataaagtcatcggcaaaattatccttagcagtctttttccaatctgtaaatatagatttcgcagctgcataattacgatataataaccccaatactggaacagctccgggataaaacaaatataacatacctctccattcagcagcattccatttatctaaatcaattggagttgaaaaaaacattgtcttttgctcttttttaggaagaggtctcaaatttccaagaggcggtttttgcgtcttagaaacacctcttaaacgccaatatagtttttcgaacccttcttttttcccaacattataataggtaaaggactttaatggagttaatatgtactgttcttcttcctcctcgaaaaaaactgggataaactttgtgttaattgtagacgcatcataaatatgctgatatactatgttaacttcccaagatataccttttcctttattgtccgaataacatttttcgtaatatgacttactgtttgcaactaaaacgaaatcagaattgttaatctgattttccatccaacgtggccatccctctgctggagcctcctcatacaaatcaatatttgcatcaattccctcagaccgtaaacgatttgcaaattctaaaattttattttcatattctacattttgatggctatatgaaataaatacttttggatgttctgacataatacaccgccccttttctatatcgcaattaaatcattttataatatttcaacgcatcctttatcgcttccactttctccgccgtcggatgcttcctcggctgtttcaattcttctaccgcattaggagcatcatacatcggcaatcctaaatctctctttacctctgcgatatatgcggtatgtactttgaagccgtatttagcttctatgtactcctttatcattttgtaggtcactcgttccttgggcttgtactcttcggctcttttaacgatattatcaagcggaactttgccctcaccctcgccaaactcgacttttacgttgatatgtccgtctggctttttgtgggaaagcagtacaaccgtctccacatgcaccgtattcggaaacatatccacacactgcaccttatccacgacatacccccgcgccagcagcacctccagatcccgcgccagactcgtcggcttacacgaaatataaatcatatgatccacaccataattgataatcttttccagcgccttcggatgaataccatcccttggcggatcaagcacaatataatccggccgttcctcaatcgtatcgagcacctttaagacatcacccgccaaaaattcacagttgtccagatgattgagtgccgcattctcttttgccgcctctaccgcttcctcgatgatctccacgcccacaacttttttgcagaccggagcgagcatctgtgcgatcgtaccggtaccgctgtacagatcataaacggtcttgtctgccagcatgtccggattatccccgaggataaattcgcgggctgtggaataaagcacttctgctccgagagagtttgtctggaaaaaagaaaacggtgaaatctgaaaacgcagtcccaacagctcctcataaaaataatcctgtccgaaaagtacttccgttccttcgttttttacgacatccgccacgctgtcattttttgtgtgaagtactccttttaaggttccttccagggaaagtgccagaagtacatctttccatccggctaaaagctgcttttcttttttttcgtttaccgttccggcatgtggacatctgccctgcttttccagcaatgcagcctctatctttgcacgctcgtccggctcctgctcctgtacatttctccaatcctgcgtcgtagtgatcagatcaactaaaatctctccggtctttactgcctttcgcacaagaagatggcgcagatacccggtatgacgcagtctgtgatagaagaagatttcctgctccctgaaataagcgagcgttgccatgagaatcgcacggaaatcgccatccacgatccggcagtcctctaccgttacaatatcgtaaaaactgccgcgcttgtgcattccaagtgccagcggtccgtccttgtattcatctccaaatgaaaattccattttgttacggtaagcaagcacacgcggactgtgtctgattggcaaaaactcataagcacaggcatccccgatcgcctgctctatcatgccgcgtacctgtgtctccttgatctttaactgttcttcataaggcagactctgatacgtacatcctccgcactgtccgaaatgccggcaggtatctgcggtctcccgtggcgatttcttcacggtttccagaagccgtccttccgcttttccttttcgtaccttatttactgcaaaggaaacacgctgtcccggaatggtattcttgacgatgacgcgttctccctcgtctgtcatcacaatccctttgttcgggaattctacggttgttacgtttccttctgcaatctgcccttttttcattcttttactcctcatgcatcattctgaatcttatttcttacagaaaaagggactacacaactgcagtcccttctttcttcgttcggttttctttttctgtgcaccgctcaaactgcctgaaagttctcacgcttccgacaatgattagtcctctgtcttgtctgcggaagcatccttagactctgcagccggctcatcatcctcatcctcgaagaagtcattgtcgaactcatcttcaaaatcgtcctcaaaatcatccagataatccggtgtaaagaaacgataaattccatagattgctgctgcaactgcgacaacgattccaatcacggcgaatacaatcacgaatttggaaggtttcttctcctcttcttcctgtctcttcaaaaacttattaagctttgctgcatccaaaacatcccccactttggtagatgctaaaatatcttctactttactcatgatggcacttctccttcctgcatttttaattacatccattatagcatatctttccctgttttcctatgaaaaatttgtgtttataaaaaatttatcatatcttttttaattttgcaaaacttgcaaacatcttctttgttccgactttgtcgaaatctacggtcacttcatagtccctgcccccggaaacaattgccatgacttctccatcgccaaatttgatgtggcggacacgatctcccacctgataggacaatgctccacccgcggaaccaaaatcacgctggttttccacctttgtatataccggttttgtggctttggaggaacggaaggtcgatccatatccctctcccacttcttttccatatccgcttccaccataactcggcaccgtccggaatgccttacgcgccttctgaaatgtagactgttcgatgggttcttcctttgtctttggctcataaatctttccggaaagaagttccggcggaatttccctgacaaaccgggatacttttccatactgtgtctgcccccgcaccatgcgcacacgcgcggaagtgattgtcagatttttctttgcacgggtaattcccacatatgccagacgccgttcttcctcgatctcggcctgggagttatcactcgtaatagacatataactcggaaacagtccgtcctcaagtcctgccagatagacattcggaaattcaagtcctttcgcactatgtaaagtcataagtaccacatagtcactgttttcgtcaaaactgtcaatatccgcaaccagagcgacattttccagaaagccgtttaaggtcggagcttcttccacctccgcataatccacagctttgctgatcaattcgtcaatattttcgattcttgcctctgcctcatccgttccctctgcttcgagttctctgacataaccggtcgtttcaataacttcctgcagcagatctgccacggaaagcagctttgcctttgctttcatagactggataaacaacacaaacggccggatctttgctgccgctttgcccagccccggtacctgttctgccacacagagcgcatcataaaaactgatctcctgctcctgggcatacaatgccactttgttgatcgatgccgcaccaattccacgttttgggatattgatgatacgccgcaccgccagatcatcctgcccattgtcgatggtctttaaatatgccagcagatccttcacttccttacgggcgtagaaatttacgcctccaaaaattttatatggaatatttgctgtaataaaacgttcctcaaagagacgagactgtgcattggtacgatagagaatggcacagtctttatactgatactctcctttgcgtacccgccgggcaatatcccttgccacaaaatccgcttcctctgccgccgtatccagctgctcaaaggtgatcttgtccccggctccattgtccgtccacagacgcttttcctttcgcccctgattgttggcaatcacagcattggctgcatccagaatattttgcgtgctccggtaattctgctccagtttgatcactgtggcatccggaaaatgatgttcaaaattcagaatattgtagatattcgctccccggaacttatagatagactgatcatcatcacctacaacacaaagattctggtattttaaagccagcagacggatcagttcaaactgtgcggtattggtatcctgatactcatccaccataatatagcggaaacgatcctgatacgaggcaagcacctctttgtccagtttgaacagttccacggttttcatgatcagatcatcaaaatccaatgcattattctgctttaacgcctgctgatattcccgataaacctgggcctgtttccgtttcacataatcgcctgccgcgcgcgtctcaaattcgatcggatcgatcagctcatcttttgcggaggaaatagcagaaagaaacattttctctttgtacattttcgtatcgatttccagacgtttgcagatatccttcatcagagtcttctgatcatcggaatcgtagatggtaaaattggtcccaaaccccagcctgtcaatatatctgcgcaaaatacgcacacaggtggaatggaatgtgcacacccagatactttccgaaccatatcccaccatctggtcaatacgctcccgcatctcccctgccgctttattggtaaacgtgattgccatgatattgtagggattaaccccgcattcctcaatcagatatgccgtacgatgtgtcagtactctggtttttccggacccggcacctgccagaatcagaagcggtccgtcggttgccatcacagcctgccgctgtggttcgttcagtgcatctaataagctcatatcgtttctccgtctctttccataattcattattcgtgtgtctcattatatcatagatagtccgaatagaacatacattcttttattttttgaaaaaagcatgaaaatgccttgtcatctagtttttattactatataatgtgatatgaggtgaaaatatggacaacgaagtaaaagaatttcttgctgcactgcagaagaaactggtttcaatcgattacatcaaaacggaagacattccaaatatcggtttatatatggatcaggtcacgacctttatggacgagcagttagaagcctgcaaacgctatgaagatgataaaattctgaccaaaacaatgatcaacaattatgccaaaaacaatctgctccctgccccggagaagaaaaaatattccaaggagcatgtgctgaccctgttattcatttactattttaagaatctgctcagcatcaacgacatccagtccctgttaaatcccctgacggaacattattttggcaacaaagccggatttaatatggaagatgtctataacgaggtttttaatttagagagcaccgagtccgagaaattattaaaagatctcggaaaaaaatatgctctctcccgtgagacgttccggaaatttccggaaaatgatcaggaatttctgcagaatttcagttttatctgtctgctcagctacgacgtatacatcaaaaagatgattatcgaaagtgttatcgacaatatcaacagtcaaaacagtaaaacaaataaaaaagagaattccaaaaaggaatcctccaaaaaagacaccgtttaatccaaacggatgattgtattttcaggcacagatgcagatacgcatccgtgccttttttctattcctgttccggatgtttctgtgacagacggctgaataccatctcatatccgtcatttccatagttcagagaacgattgacacggctgatcgtcgctgtagacgcccccgtcttttccgcaatatcaaggtatgttttctgatcccgcagcattcccgccacttcaaatcgctgtgataaagaaagcaattcattgaccgtacacacatcctcaaaaaatgtataacattcctctctgttctgcagacataaaattgcatcaaacagatgatctactgcctctgttttaagtttcttgctcattatgctccctctttccttccaaaaatcatgtctgtattttatcatattaaagttttaaagtaaacagatttcttgcattaccccattgttatgctataatgtttagtacagtttaccaaacacgaaaacgaatggagaatctatgatatgaaaaagatcggttattttttttccggctttctgccaattttaacaacaacagctgcacagatactggcctctttttttatgttcggaatcgcagctctgtttctgtgtccggccttccagagcacaggctttgatgccgataccatcgaaacacttctgaccaatacggagtttaatgcatgcatcatgctgatttataccgtaacctgcatcgtattcatgggaatatggtattatcgctcctgtgggggcaattatcttccaaaaccatccctcacgtttcatcctctgcagtttttatccatcattcttctgattcccggcatgcagttcttttccggttatctgacttctgcggtatctcttcttttcccgaactggctcagccagtacgaaaaactcatggaaaccgcaggcttagactccgacatcggactgttcatgtttatctatgccgtaattctcggtcctgtctgtgaagaactggttttccgcggcgtcaccatgcgtctggtccgacgggcacttccgttctgggctgccaacctgatgcaggcggttctcttcggaatctttcacatgaactggattcagggaatttatgcatttgttctcggtcttgtactgggatggatctgtgaaaaaggaggaagcatctatttctcaatgttcttccacatcctgttcaacttctggggaaccatcatcggaccgctactgaacaatctcaaagaaacggatcttctgggaattatcatctttctctttacgattgtttctctcgttttgggcttttccttattccgcctgggaacgaaatggcgcgatcagaaagcggcgcgccttatggctgcccctgatcatgatgatcatttcgaagcagctgaatgatccggtactcataaaacacggtgatcacaaggatagcggcaatcaccagcagactgtacgcgtccttgagttcgatcccgatcacatctcccacacacggaaccatcagaccgatgataaacaccagttttaccagccggatcatccggatggaatatttacgcacctttcccacacacacctctttcggaagccggtttattttttccggctgacagcttaccaggctgagtcccacatagatcagaacaactcctgcaatgttacagataaatttatatggcgcaactttatagacaatcccataatagatctgcagtccgatatagacaattccaaggatcattcctatcgcctccgcaaaaattgccggaacggttaaatcttcttttttcatctgcttttctccatttcattctgtaaaatcatatcctaattctaacacctttttgacttgaattccatagttcatgtgctataatgaaacacagagtaacaatataacaaaggagatctcatggaaaatcttattttaccaaaacaatacaaatcagaactgaatcttcatgacacacagcttgccatcaagacagtcaaagatttctttcaggcactgctggcgcagagactgcatctgacacgtgtttctgctcctctttttgtagacccggcaaccggtcttaatgataacttaaacggttatgagcgcccggttactttcggtattaaggagcaggacgataaaaatgccgaagttgtccattctctcgcaaaatggaaacgttacgccctgaaaaaatacggatttcaggtcggagaaggcatctacacggatatgaatgccatccgccgcgatgaaagtacggacaacattcattctattttcgtagatcagtgggactgggaaaaaatcattcataaagaagaccgtaatctggactatttaaaagagaccgttcgtaccgtatataagtgtcttcgcaaaacagaacagtatatggccatccagtatgattacattgatctgatccttccaaaggaaattttctttatcacctcccaggaactggaggatctgttcccggacaacacaccgaaggaacgtgagtattatattaccaaggcaaaaggtgctgtatgtatcatgcagatcggtgacaccttagagtccggcgaaccgcacgacggacgtgctccggattacgatgactgggctttaaatgcagatattcttgtttattatccggttcttgatattgcactggaattatcttcgatgggtatccgtgtagacaaaactgcactgatttcccagcttgacaaagccggctgtccggaacgcaaggatctgccattccagaaatccatcatcgatggaacacttccttataccatcggcggaggaattggtcagtcccgtatctgtatgttcttccttcgcaaagctcatatcggcgaagtgcagagttctctctggccggaagaaacaattgcagcctgcgaggaacatggtattcagctcttataatttattttacataataaaataaacaaagcaaaaaatcaaagaggaaaaacgaaaaaaacgtttttcctctttttgtattatctatctcctctaaattacagctataaggtttcctcatccgcctcgcacatgcgataccctacgcccagttcatttacaatataatttttttctcccggtctggctcccagcttcttacggatatttaccatattgacctgcagttttttgatgctgccctcatcgttatacccccagatctctttgataatggctgagtatgtcataacctttcccgcatgttccgacaatgctgcaatgatattgtactctgtctgtgtcagcttcacttcttttttatgcaagaaaactcttcttgcatcgtaatcaatggtcagaccggaggccttaaattttccacccggaaacattccgttttgcatgcgatgtgttgtcatgcggagcgtagaacgtatccgcgcaagaaattcattggagccaaatggttttgtaacataatcattggctcccatatccaaagcctccactttatctttttcatctgacctggcagaaagcacaatcaccggcgtcagggaatctttccgtaaccgctttaaaaaagtcattccgtcctgatccggaagtcccagatctaaaacaacgagatccggtctgtgagaagcatacatcatcattccgtcttcgcaggaatatgccgataatgtctgatatccgtttgcctccagaagtgtagccaccagattgttaatatgttcatcatcctcaataattaaaatcttatatttatttccgttcatgcctgttccttctcctccatatccagataaaaccggaaaagtgcacctccatttttcttattttctgccttgatctttccaccgtgcgctttgataattgttgcgcacactgccagtcctattcctgcattgctccgtttgcaatcggaagatacctcatacgcctcatgactcccgtaaaaaacggattttaatttttcttccggaattccacatccatcatcctgtacttcaaatacggctttgtccgccacaagaaataccttcagtcccaggtgcaccattccctttgcatgctgcaccgcgttttctaaaatattgatcaacacctgctggatcaggatggcatccatgggaattaccacaaattcatctggaatatcaatttcaacctcctgatccggatatcttttatgaaactttaaaatcaccgaatcaatcagctcatccaaaaccgtaggtatcttaatgatttttacttttccactgtcaagttttgtgatcgaaagcaggttctcaaccatccggaaaagccactgtgcatcctgctggatgtcctgcagcatctttgtccgctgttccttcgtaaaatcattatccggatcaagcagcgccgagctggagccatagatcgtggtaagcggagtccgaagatcatgggaaaccgcacggaatatgtctgcacggattttttctttttctctctcttcttcgagaattttattatactttattttggtggtaaacccacaggtaatcaaagccatcagtataatgatcactgccgatgccatattctccggtatggaaaaattaaagtgaaaaaatggaaatgtgaaagcaaaattcaattcaagaacgctgagaattgcagctgccacaccatacagataccccggtgtgatcacagaagtcagaaagactccaaaaatagatactgccgggatcagcgcattttccacagtactgttttgtatccacaaacagaccataaaacacaccagctgaatcccgacggtaatggctatatctcttatgatatacaatgtttttttcatccgaatcttctttctccttatctcttgcatccgtatgtttcattatagcataatggcggttaagattcgaataaaaaatgtatttttctaagaaatcgtattcagttcctccatccacaatgttgcacacgcatcactcggcatacgcagatctcctctcggagaaacagcaacagatccgactttcgggccgtccggaaggcaggaacgtttaaactgctgcgcaaaaaatctgcggcagaacgttttcagccattttaaaataaatgcatcttcataagttcccgcaaacgcaatttttgccagacgataaatttttgcaggggaaaatccctgacgcaacatataatacaggaagaaatcatgcagttcatacggacctaccagatcctcggtcttctgtgaaatttttccgtcttccggcggcagaagctccggagaaacaggtgtatccaatacatcatacagtgtatcggaaagctgcttgtcctcacaggtatccgcataataacgcaccagatgccggactagtgtctttggcacagaagcattcacggcatacatggacatatgatctccgttgtacgttgcccaccccagtgcaagttccgacagatctccggttccgatcacaagcgcattctttttgttcgcaatgtccatcagaatctgcgtgcgttcccgcgcctgagaattttcatatgtcacatcatgcaccgaagggtcctgtccaatatccgaaaaatgcacatttaccgactgacagatatccacttccacaaattctgccccaaggctttgaatcagtttgacagcattgtcatatgtgcggtcggttgtcccgaatcccggcatggtgacggccgtaattcccttatgatcccgcccgcacagatcaaaggcacgcacggtcaccagcagtgccagcgtcgaatccagtcctccggaaatacctaccacagcattggctccggtatgttccagacgtttttttagtcccattgcctgaatcatcagaatttcatcacaacgcttttccctgttctgtctgtctgttggcacaaacggtgccggatcaatcaaccgcgtcagttttgtttcttctatttttaaagagaatagaatctcggtatgtgtctgatcctcagtgacaaaagttgtcattctgcggcgctgtgcacagagacgttccacatcaatctccgaatacaggatgccatgtccaaaacgcttggattccgcaagaatctgtccgttttccgcaatgatgttgtgcccggagaacaccagatcctgtgtagactctccctctcccgctgacgcataaatatatgccgcaagaagacgtgcagactggccacttaccagttccctgcggtaactgtctttgccggtcagttcattcgaagccgacaaattcaccagaacagacgcccccgccagtgcatgggagatactcggcggattcggtgtccacagatcctcacacagttccacaccgattctgagtttcggcatctgctcacagacaaaaagcagatcccggtccgcaggaacacagcttccgtccggcagaaccacctctgtcgcaagctctgctccggatacgaaatgtctcgcctcataaaattcattgtaattcggcagataactcttcggtacaagtccaagcacttctccatgggaaaacactgccgcaacattgtataattttccaaggatttcaaagggaagtcccacgaaaaaaatggcgtccagtgaagcactctcttttactaatttcatcagcgcatcctttgcgccctgcagcagacgttcctgcaaaaacagatcctgacaggtatagccggtcagacaaagttccggaaaaactacaatctttgctccctgccgggtactttctttcatcatatccagaatcagttctgcattgtattttgtatctgccactttaattttcggtgtgactgcagctgcttttacaaatccctgtctcactttctcaactcctttaattcctctacggaaaattcatatgccttattacagaactgacactttacctcgatgctctccccatcattgatgatgtcatcgagatcttttttgctgagcgtcgaaagtgcgcgggatacccgctccttggaacagtcacagacaaatgctgccggaattttgtcggtgatttccaagccgaaatctccgagaatttcttcgagaattccttccggtgtcagtcctcgctccagcatcatagtcacagaatcgatctctgcaatacgattttccagtttttcaatgatctcgtcacccgtaaacggcataagctgaataataaatccgccggcctgacgcaccgtgttgtttttgttcatcagcacgcccaatcctaccgcagacggaatctgctcggaagttgcaaaataataggttaaatcttctgcaatctctcctgtctgcagctgacactgtcccacatatggctcttttagtcccatatctttgatgacgctcaaaataccgagatccagcgcgccccctacatttaaatgtccgtctttgtttggcggaagttccacaatcggattattgacaaatcccttgacatgtccattggcgtccgcagtaacggtaagtcccctggccggaccgctgcactgaatctgcagagtcagaagatccttttccccttttaacattgttcccatcatcgcaccgccggacaacagacgtcccagggctgccgtcatgatcggggacgtattgtgatcctgtctggcggtctccaccagatccctcgatgtaattgcaaatgcccggattgcggcacctgctgcggttgctctaacaatataatctgccatgtatcatttctcctttattcttttcttgtaacaaatgtgatacgctcactgtcggctttgaccccggcgtcggtgtaatcatcatacattccttcacagaccagtcccgcctgctgcagaaaatccactatctgttccaccttataatttctctgatagtgtgtttccgcatatcggcggtacagctctcccgcttccgggataaacagtgtcaggtcatattcattgattctggtctcttcgtcataataattttcccagataaaacttccttcctgcctgctctccgcaaatgtgtgatctccaagaagctgttcgtatttataggcggtattcatatcaaagataaatactccaccgctttccagacaggcggcaacccgccggaatgcatcggaaagttcctgtggctcaagcacataattgacacagtcacaggtacagcagactgcccgcacacatccatccagttcgagtgtctgcatctcctgcagcagataaagaatcggcggatctgtctgcttttccatggctttctgcagcatatccacagaaacatccacaccggtcatatcatacccacaggctgccagtctccgggtcagttctccggttccgcatcccagatccagcaccggtccgtctgcaattccatgcttttttaatgtctcacaaatatatgcacaccattcatcatagggcacattatccataaacaggtcgtaaacctgcgcaaaactcgtatacgcgtccattcttttcctcctgctttgtatcatagtttagcaagtttttatggcaaaagcaaggttgattattcttcccgaaacctttatactgaatgcataagttgaaatacagaaaggattttccatgcctgacaactacgaacattatatttccaaaaatattcaggccttctatcgcagaagacttttttctccaatgatatatctggttttgcttgcagttctctggatcgtatttccactgggtgccatgctgcggcctgcacagctttccgacaataccaaaattgcggatgcatacaaggaccatcaccgttatgtgcgcatgaccttcacggatctgaaattcagcggatatacctgtgaaacctatggacagacccgcggatattattattacaccacacagaaaaataattgcggcatcattctccttaccccgcatacatgtgaggaaggactccctacgatcgaccgtctgaccgtcaccggccggatcgtcaaaggaaaagaatcttatctggcacttttgtcccagctttcctctgacctgaactggaccgaaaccggtatccgcaatcagctgtcttcgtattatttcagtgagcctgactatcatttaaccacgacgcgcattttattcttcgcgtatttcggttccatgatttataccgtcctgtatcttctgatctgtatggtctatatccggttcccggtgctttccccaccgtgccagaacctgatcgtcttcggacatccgggtcagattctcgccgaggccgaggaagaacttgcaacacttccacagctggcaacggaggatatgtttattaccgaacattattttatcatgacatcaccatatggaaatgccattgtacctattcaggagattctgtggatctataaacattcgacgctccacaaaatgctctggtatcatttcagcatctcttataccatgcatattaccgcaaacaaacatatgtatgtaaactgtccgaaaaataccaaatccgatattgacggtattatggattacctggcagaagccaatcacaacattctggtaggtttcaatgaagaaaaccgcctgaaagtccaggcggttcagggaaaacctttccatattgaaaaattttatgcgttattgcgccgccgcgtctaaaacatacaggctttgcttccgatttcataatccagattttcataggcttcccttaccacgggaagcctttctttttcttccggcggtaattcatgttcagaaagtatctttatattctcctcaatctgtgcaatatcataggtatcaaatccatactttaaccttttccagcacagccggcgctgctctccatccatcatgggaaacttttcctgccgaagtatgtgaccgctttcctgtgaatcttttgtctcctgttttacttctttcacagtcccctgcagctgctctaagaagatatgcagattccggtttataaaggcacggttttcggtctttgccgccatctccataatttctgcctgctgggcaatctcctcttttccaatctggcggctgatacctttgattccatgaacttttgtctgaaacatatgcagatccctctggacatattccggaagtttcggaagtaaactctccacctctttccaataagattccagcgtgcggatattcgcagcgttcctctgtcctgtggctttcgccttctttgacgcatcgaccggattcggaagttccctgtatcttaccggaattccggtttctaaaacctgcctcatccgctgcagccggatcggtttcggcataaaatcggtaaatccatgccggatggaacggcttctgacttcatcagaaatatccgctgtcataagaacaagcggtgcatgactgtatctttgtatctgatccgccgtctcaaatccggacattcccggcatcatctgatccaaaataatcatctggtattcccgttcttttaccatctgtacagcttcttctcctgacaccgccagatccagtataaacttccatggagccgcaagttcctgaaaaatcaccctgtttgcttccatatcatccaccagaaggacacgtgcccgcggataaacccagttcggctgtatttcttcaacctgcggatcactctgttcttttaaaatttcctgtccgatgtttcccggctctgatatctcagtcggaacctgtttctgataaaatccaaaagatacgcgtgtcccttttcccggatcactctctgctcttacccagccatgcatcatttctacgagctgtctgacaattgacagacccaggccaaagccctctacccccatatcctcggaaaacgagacatattccgcaaatacctgtgcaagtttttcctttgtcattcccacaccggtatcttccacacagccgtcaaaccatacctgtccttcttccattttacagtgaagcgacagcgtgatcgttccctgttccgtaaacttgcaggcattcgataaaatattctgaaaaatctgtgccacacgtaaatagtccccacttacctgctccggaaaccggtccagaaacctcacggtaaatacgatatctttttcccggatattcagcagacaaagacgggcctgttcctcgatcatctcataaaaattgtatgttttgtctttgagcgtcaacattcctgcttccagcttcgaatatgcaaggatggtatccacctgttcaagcagattatttcccgcgacacggatatattcaagaatgtttttgctctcatccggaagattctgcctttttaaaatgtccgaacctccgataatcgcatgcagcggactgcgcagatcatgactgaccgatgccagaaaacggctttttaaaaatgactgttcttctgctttctttttcagatcctccatcagaaccgtttccttcttttgctgtgtgatgtcgagcagggtaagaatatatcctctcaccacattttcactgcagaccggatgcaactgacacctgcgataactttctttccactgaaccacataatcctgatccgggtctttactccaacgcatcattttggtataaaaagggtactcctgcggatcgtccgtcagttcccccacaatttccggaaaccatcgtctggcactggcattggcatcccggtaacgcattctgttgtcaaacaaaaacgtaggaatatcactgatattataaaagttttcccggataatgttcgtcacattggataacctgcccgtcatcatcagataaaagacaatcagacaggaaatttcaaaagctcccggcaccagaaattcttccgctttcggcgtaaccgcgcgaaacaacattgcaactcccggaagtgccatgccaagatacaacatatcatttacatgtccctcccagacagaaacctcgcttttcactctcacataagtagccagccccagaagaattcccgtataacaaagcagcgcaatccgaaacgcatcctgatacgtctcgcgctgcgcagcacgtataatcaacatggaattaaacagcaccagactgcagaacaaaatcacttccgtcctgagtttcagctggaatttcataaaatcacccacataatgaatcataagatacagcatgtgaatggccagtaaatctgtcagtatacgaagtgtctttgcctctcccgtaacataataggtaatgcgataaaaactgttcaatgcaatcagccctaaaaccaacggcagcagccggtgttcccttgcgtgaaacccgctgctgacataactttgtaatacaaacagtgtaaaaaaaagacagatcagatggaaaaccagtcccatatccgttttacctccaaccgctaaatatccgctctacttcggatttgatataaatggctttatatggccgcacaatatatcctgccgcatgcagtctccgacaggtcattaccgtatgcgcatcacacatggccgtgacaaacagaaccggtatcctgccccctgtgagcttgtttgctctcatggtagtctcgattccgttcatttccggcatatcaacatccataatgatcagatccggaaactcattgtgttccagataatgcaatgcctgttttccgcatttacagagaatgacggtatactcatcctcgagaattccacgcatggcatccagattagtcttcatatcatctacgatcatgattttttttctggcagtttcctgaaccatcttctttctttccggctcttccgaatctggagaaaccgtatcaagatattccggtggaagaatcgtaacattaaggtttttattttccatcagatccagtttggtcccatccggcatattcagaatcggtcgcagattatgcggtcctttgttttcatagatcaggcccttacgtccatccgacagatttacctccgtccctctcggaaacagcggaacccgctccataaacacttccacaacatttttgtcaaacatgatgccacaggctcccatgagatactctaccgcctcataaggggaatatggtttcttatacggacgtctcgatgtcagcgcatcatacacatccgccacatgtacaattcttacggagagtgactgttcatctcccatcagcccctgtgggtatccgcttccatctacattttcatgatgaagaagtaccgtctgcttgatatgcgccgaaatattccagcgcttcgaaagcagctggtacgaacgggtcgaatgggtcttcatcagctggtattcatccggtgtcagcctgcccggtttgtttagtatttcctttggaatggcaagctttcccagatcatgcaaaagagccgctgtaaccagataattcagatcgcgttcactcattcccatccccataccgatcacacagcagagcacagcaacattcaccgaatgtgcatatgtgtaatcatcgtatgagcgcagatccgtcatatccagacacacattttccctggacaaaagattctccacaatctgttgtgcaatctcggcacaacggtcaatatcattctcctgcacacatttaaacccttcctggcgcagtttttccggtattgttgcttcgatgtagatatctttcgactgttcatcctcgatatagataccgctaaatccgtattcgtttagtttattgatataggaagccgtcagttcacagccgcttcccaccatggtacgtcccatggaatcatataaatcatacgcaagacacattcccggtctggcatcttcaatggaaacaaaacgcataaagcctccaattataactacaacttaaatcataaccagataaattgctgcaagtgaaattacaatctgaatgatagcaaagcgaaataccacctgggcattggaccacccacccttttttcttacatggtcgtgaatcggtgtgatggtattctttagaatatgtatctttaagaaccgaagcagtgaaacctttaccagaccaagaccaccatctgcgataagtaccgcagcaaccagcaggtacataaacgggctgtgcatcttcaatactgcaatggcgataaaaatacccattgcacgtgatccggcatctcccataagaagcttgctcggtgttgcgttataccacagatatcccagcagacatactgcaaacagtaaaatgcagtaattgaaagaatcattgacttttaaaatattgtcaagaacaaacacactcatcaacgtgataatggtcagtgttcccgacaatccatccacaccatccgaacagttggtaacattgatggaaacccacaccagaataacggtcagaatggcaaatacaaccggtggaatcacgatggtcgttcccgtaatggcaatggtgatctcactggaattgtaatgcagataggaaatggctacaacgactgccactgccagatccagaattccctttaaatactctccccatggtttttctgcggcatcatcaaagaatccggtgaacatttcgatgacgatcagcaccagataaatgataatttccttattcattttgccaaacaacaatgcggaaacaacaaaagtcaacacaaaaataatacccgcacctcttggttttcctgcggaaagagctccatcatgtgcatactgtcttcccatgtccttcggcagatatccgtttaattttgcaattgcaatacaggtcactgcaaaagcaaataaaacaccgataaaagcaaccagtgcgtgttcatatgttcctaataagtatatcattttctcctccttcgggctttcacccgatttaattatattaggagacaggaaaaaagtaaagtttttgcttgcatttttatcgaattgtgttattatatactcacacgcgtcaaagcgttaaagtgtaaaagattcaaagaaccacaaggaggaaacaaaaatggctcaaaaaggagacttaatgacagcacgttccgatattcgtgtattggacgcaaccattcgtgacggaggactcgtaaacaactttatgttctccgatgactttatcaacgcactctaccgcaccaatgtaaaggccggcgttgactatatggagtttggttataaagcttccaaggagctgtttgacgtaaataaattcggcaagtggaagttctgtgatgaggaatccatccgtgagatcgttggtgacaacaactccgatatgaagatttccgtcatggcagatgtcggacgctgcgattacaaaaaagatatcattgacaaaaaagacagtgtaattgacatggttcgtgtggcaacttacgtgcaccagatgcctgctgcaatcgaaatgattgaagatgccaaggcaaagggctacgaggtaacctgtaatatcatggcaatctccaatgccaaagaatccgatattgaccaggcacttgaaatggtcggtcaaagcagcgccgatggcatttatatcgtggacagttacggtgctctttacccggaacagatccgtgcgattgcagataaatacaccgaacttggagaaaaatacggcaaatacatcggtatgcatgcacacaataaccagcagcttgcctttgccaacacgatcgaagcactctcccacggtgtcagtcttttagatgctaccatgatgtccatgggacggggtgccggaaactgtgccatggaactgcttctgagttttctgaaaaatccgaaatacaatgtattcccggtactccggttcttagaagactatatgctgccgctcaaagaaaccggtgccgtatggggatatgatattccgtatctgctgaccggacgtctgaaccagcatccatctgctgccattgatttttgcaaggacaaccgcaaggattacgcagatttctataccgatctgttagacaaatagctaaaaaattcagagggtattgcataatttccaa

SEQ ID NO: 1024 - DNA, 11241 bp, Unknown
  gut microbiota DNA sequence
caactgtcttattctttccctacgaagataaaaatccggatccggcaaattatccaattccattgattctgcatactttgctaccatctctccgataaaatttgccaaatcactccaggcatctctttcttttaaaaccactttattcttaaccataattaaaatcctttctgacattgtcattgaaatccatcgtatcccatccatagtgatgtttcctcacttcctgataggataagatagatattattaaaattagtattgttattattagtcttattagattttgattttaactgttcaaaacctgtaaataccaaaagtctgtatgcgtcaaaatcaaaattcttaattgtgatttctccatcttttgtattttgatttttacggtatggctatttctcaaaacattttcttaaggtacagcttgttaggtcttcccaatccctgtctcttccgttcaagtgctcccaccttttccaattcatccaataacttgcatgccttttgagttccacaattcaaatcctcgcaaatattttttattgaataatagataaacaccctcccttggttgtcaatccatccattttttattgacaatgaaactcgatctaaaaagaatgcgtataaaagctttgcatccattgacatttcaacaaagccttcatcctctaccagacattttggcagcttgatgaaagtaaaacgctcctcaccggtgcaatagttatacttcggttgaatacataccttttctaaatctctcataaacttaatcctttcttttctctttttacaaattggcaagcagtgctccggtatatacccggcgcatttttgcttgttggggaaggtctccgttccactccggtccgtgcagagcagacgtccaccggacgtcttgcaccccaatccccttgaactgcggataacccgcagagccatgttaacactatgaatccgtttcagaaaaaccaagaactgcctcaagtgcctttttcagaaattctgtttgctgattatgcatcttttttatttctgcaatatcctcttcgtacaattttccggtttcatttgctttcttcgcatactgatttaggttattgctaattcttgaatgcaaagacagcacccctttcagttcaggccactcaggaataatcatatatccgttcaataccatctttctgataaaggcactcatattttgaactccggcctccttcattcggttatgcagtatctccacctcctccggtctaaatttcacataaataccttttgaatactctttcattttgcattttctccttttgacatctggtttcttttagaaatcattcttcccgggcaatcgataatttctaaaagtgagcaacaaaaaagcaaccgatactactcgattgccatgttgttacttttgcgagactatacattccccaaaaaattgttagtgttgcacaatcagttttgtgaaaaattctgtccataatctgtcgcaaagtgttaattgactttttacaaattgttgttctcaagtttcttacaaaattggaaaaagcccaaactgcaatagtttgagctttgtttgtatattcacattttctgtttttgggtatagaatctccgttgataatatagaatatttgttcgtttttgtcaagactgattcttaattgcaaattagtttatcttgaacttctttaatagtttcggtacattctcttaagtgaatcaaataaacctatgtgtaatactgcgcctgtgcattccataactcatagtatttcccatgcgtatcctgcaataatctatcatgaactcccctctgcacaatctgtccgccatcaaatactgctatgatatcacaaaacctacaggatgaaagtctgtgactgatgtaaatagctgtcttatcctgtactatctcattaaattttgaatacacttcatattctgcaatcggatccagggcagctgtcggttcatcaagaataataaatggagcatttttataaagcgctctcgctaaagcaatcttctgtgcttccccaccggaaatctctacaccctcttcgtccaaatctttgtagatagaagtctctaatcctttcttcatactctgcaagcgttcataaaatcctgccttctctaaacacctctttgcgagttcttcattgtaatgaaaacttgctgaaacattttgtccaagtccgaaagaaaacaatttaaaatcctgaaaaacaacagaaaatatggacatgtattctttatagtcatatttcctgatgtccacattatttaataagatttctccttctgttgggtcatataaacgacagagcaattttataaatgttgtctttccgcttccgttcatacctactaccgcaagtttttctccaatcttgaatttgagattcacattacgcagcacataattctctgtccttggatatttgaatgaaacattactaaactcaatgtaatattcattatcttcccgtttttccactgtaaggctgccctgatacatatgattcgggatatccaggtaatcatacatcttctttaggtgagcacaatatagttcattatcagacaccataaacatcaaatctctgattccatctcctaatcttgtcagtaccgatacatactgaacaacgcttcctacaccatatgctcccagaaaagcctttattgccacaaacaggtagcacgcgcagttaccaagtcctactataaatcccgctactgacgggaaaaatgccatatgaaaactattcttcttttcagcttttccccacgcttctaattcttctattttcttaatagcaagggtatcctgcctatagatacggacatcttttgccctctcaagatttgtatatagctcatgcccgaaaaacataaatgtcctattaaaccataagctattatcacaccatttcataaacaggctattttcttttcttgtcgctttataattactaaatccgcataaagtgatacagcctaaaattgctacaatccaaatcggatggtccacgattttctctccggttttagaaataaaaagagtgcctgacattaatagagcaacaaagatattaataaataccttcaccattacagaagttccccaaaccagctgtgcaagaccatttccaaacataaagagattttcttccacctcttgacgctgtttctgtattgatacatcttccaggtcatcataatctaatgacatctgtttgtctgaaaaaaccttttcaaaccaaatccacatttgcgattctttctctttacatatatgcaaaagtacattttgaaatacgatacatataaagttaattgtaattacacatatcacataggaagcaatataatctttcctacaatgattggtcaattcatccactatccttgcagaaaaccaaattgttataaaaggttgcagtgaatgtatgaactcatacaatgctttttgttcggaaagacccggacaatattttctcaaaattccaaatccccttttggtgattctaattcgttcgccaaaagacattttcttcattctgccacctcctcttctcgataatactttgcctgcatttcaaataagttataatatttccccttcttgtcaagaagctccctatgcgttccttcttcacagatagcaccatcttcaatcaagataatcctgttgcaaaagttggtacttgcaagcctatgcgaaataaatactgtagtttttccttcgctaatctgattgtatttatgatatatctcactctcagctataggatccaacgctgccgtaggctcatctaacaacataatcggtgaggatttgtacattgcccttgcaagtagaagtttttgcgtttcacctcccgagaattccactccgtcctcataaatcgtccttccaaattgactctgtaatttattcggtagtttttggattcgttcccacattcctgccagctccaggcatttcttcactcgttcagaatccacttgcgccgcaggtgcttctgcaactatttcttctacagtcaccggcataatactaaattgctgaaataccgcagaatacatccggtaaagttctactctatcatattccgcaattgattttccatcgtaaagcacctgcccctctgttgggtcaatcagaccacagataagctttactaaagtcgtttttcctgctccgtttaaaccaactacagcaaggtgttcacccggattaattgcgagattaaaattttccagtacatatggctggttttcttcatatctaaaacttacattctttagctcaattacctttggcaacttatcctgatttggatgcaatccaccttctctcagatactcttccgggaagtcaagatattcccgaaatcgattaatctttgtacttaactgattcaacacagagacttcggcaaatatttcacttaaccaggcagaaaaaccattgacaactccaaaataaagtacaaaatctgccaccgaaatctgactattcataaaaagatagatcaaatacagatagatgataccttctctcaataaacctaatgctccgtcacacgctgtcacagaaaaaagtttttttgtcaatttgtgataccatgccgcaatccccttcatattatccgtataaatatcggagaaccactttgccataggataaagccggatatcctttgcagaacgcgcgtcgccggaaatcgcattaatgtaattaagccgttgtacataactcattctttctttgctatgctcgtctgtccatttcacaactcttttgtttaaatagaaactaaccgcagtggtcacagcaataaatagtattacagctacatttagtttataaagaactgcagaaaagacagatatccccaaaacactggtaccgagactttgtagtacatcatacacttgcgttaagggtgaatgtccgttacagcacaggaaactttcctcttgcagctttcgaaatattccgttttcctgatttatgtagtccgtagttaaccctttgtttgctacaagcttcagataatgaacgttaatactaaacttctcaaaatatagatattttgtaagaaacttgctgactccggtcaacacagcaatacttcccataaataccataatagtgcctatcaatcccttaatatcactacctaaagtaagcttttcaattaccagcttcggtaaaaatgcagacagaattgggattgtagcatttacaagggtcagtattatgtacagcactaataaggcaaagtaccattcagatgttttcttaatacagtaccaaatattttttagcataatgcacctccttctctgctattctacatctccttaaccctacaacgtaaaattcgtgcaccaactgtatctgtcagtacacgaattgcagttattccattgcaggaactaaaaattcggagctaaatgctccatcctcgctattatatttgcaccagccaccatgttcttctataatcgtctctgcccgatgaaggccaaatccatgcgttccctctttattagaggaaaataatgttcctattttctttttcttcatcccggcagaattgagcatggaaaaatacagcatctttcctttcattgacatatatatacgaataaaacgcttaccagaagaaagcctgcaggattcaattgcattgtccaataaatttccaaccaaaatactaagttccacatctgtgatagtcaatgaatccggtacacttgctttcacatcgactgctatattctctgcttttgcctgcgcaatcttagctgacaatatcgcatcaagggatacattccctgtttttagaagtgtatcaacattcatcaattgatgatctaatttctctatataggcaattgcacgttctacctctcctgcttctaattgtccctttaaggcttggagatgatggtgaaaatcatgtttatatcctctcatttccgaatggatacttcgcacttcatttagatgctgttttgcctgctctgtctgatactggacaagtttcaaatatgttttctttctcatattaactcctaattacgctcaatatatgcccgattgatctgatcatattttcctcttgcaagtggcacttgtcccccattatccagtgtaacactgtcgcgcgaaatacgcataatatgctttaatgatacaaggtacgaacgatgtgtctgataaaaatcttcactaagttcctgtgcaaatgttgaaatatttgcttttatcttatattccttaccctttgtatatattgttacataatgggaaagtgattccaaataaaggatttccttctcatataacttaacaacttcaccttcgtaatgaatgataatcgacggttctcctgcttctatcttgcattttgctttcgaaagaacttcctccattttacctgctttcacaggtttgaccagataatggagggcatctacttcataccctacgccaataaactcaaaatgtgatgttataaaaataatctcaacattatcctgattctgccgtattttctttgccaaatcgattcctgacattccactcatttccacatctaataacaaaatctgataatttttgcattcttcgtattgaaacaggaaactttcagcagatgcatatgtttctatatttgttatgatgtcttccttcttagcccaatcctctacagcatatttcaaatactctatttcattctcttcgtcatcacatatagcaacatgtagcactgatatcactccctttcgcattgaaacttcatagtagacatgattaatcttgagattttcatgtactattccttttcttaatcactatcattgatagttcttatgcacttattgcactgcagaacttttgatattctgtgtatagtattcttggcattcttgtccttccttatctgtatacagcacatctctttaaattcatttttctacatatgttaatagatatatgcgcaaaggctcagatttcttatacagaaacctgagcctattgcttttgtaacagcttagcacatcagctcctgctataaacatatttcattttttagatctaaaacaaagaaaactctcttttttcattatatattcctctttcaatcaactccctaataacactaatgcgtggtctgcatccccgtctatcatatatgtaccttccaaagcgctccgattcctcaaatatcatttgaatatcaatatcataaacctcaaaatagcagtcttcaggtgattcattataaaatttcacgaaattcaatctatcccatttgatttccggtgaaaagctagaaaaatccattcgtcctgttgcatattttatttcaatacgattttttccttttggtgcgtttgggtcaaaacagtcaaaaccgacactcatattatcaattctccaatatcccattttatacgcaactaaagcttctacaaactctgatggcaaactactaggtcttccgccgatttgctttattttttcattcaagttcatccaatcagaatataatttctgtaataaaaacatatcctcttcttcatattgtattatgtttataggtgtttctctctccaaaatatctaaataattctcttttcttatcattataattcctcctgattgaaagatataaataataaaatacataataattctaagtatctctgaataacatcttgatacttattgaatgtttcttgtaaacaatttatttttgtacatgttattactaatacaaactctgtcgtatcgtctacactcaatggtatagccaatatagattgatactgtctatcatcatctaaatctaaaaatggtacatcggcctttctattatcaatatccccacaatagattattcttttttccttaaaagcagtcccaaccaaagaacccttatctaaacgcaatttatctattgttccaggtgaatgtttagttgatactaaaattttacactgtcctttatcatcttgtaaaaagatacttgtattcatttttgcattctttgaaaaaacatcatcccgaaaaatatattctatctctgcgattagagcttgtagttctatattttcatatttctttctattttttaaagaataaagtatttttctattaactgaagctgtatttatgtaatattcgcacttattctttagtaattctatttcttgctctaagctatcaatttcttgatttatatcatctctttcacgttccacatcatttattctatcatttaaagaagctattgattctagtagttcatctttttcttttttcagactatcaattcctaaattttcaatctgtttatcgaaatactcttcttgaacccttagttttcttcttagaccaataataattacaataaaaatagatataattactgcaaatattattccaatagttaaaaatattttatttttttgaaaagcataccatattccattcgcaatcatttggattgtgaagacacctatgccgctaaaaacatctgtcttttttatatccatcattttctccttacgtaatatttactagaaatttgctaatgcaataatatcatctgaaaatgcctcaacgcatcctcaatcgccttttccttctcctttgggcattttggctgtcttgcatcctccgattttgaaagattataattctccctcttctccaatccatgcttatcttttacctgcgcaatatacagattagataccttaagtcctgtctcctccaacacatatttcttaattttctcatacgtagccttactctcagcagaagtaatatccatctcatccatatcaagtttcacattcacatgatgcttcgcttcatgaagtttggacaataagcataccgtctccacatgtttcgtaaacggaaaaagatcaaacggtgtacactctttcatccggtatccatgctttgtcagatacttcagatcccgcaccagcgtttccggaccacaggatacatacacgactttattcggagccagtcgcactacagaggaaagaaacgcctcatcgcttcccgtacgcggcggatccataatgaccacatccgcatgttctcctttttctgccatctctaccataaattgtccggcatcttcattataaaaagtaacattgtgaatatgattgcgctttgcattggagatagcatcctttatcgcatcacggtttaactccactccgatcacatgctttgcacggctgctggcaatcagcccgatcgtgcccgtaccgcagtacgcatcgatcacagtttcttttcccgtcagtttggcacaggaaatggccttccggtagagtttttccgtctgctgcggatttacctgataaaatgaagtcggtgaaatacgaaatgtgcatccgcacagttcatcctcaataaatccttttccataaaccgtaatattgcgctccccgagcaccatgctggtcttgcggtcattgacattgatcactactgtactgatctccgggaacttcttccgcagtgccttgacaaaattatttttggaaggaagaatcggagataccagtacaagcaccaccataatctgtccgctgtgatagccctttcgcaccagcacatgacgcagcagcccatatccggtatcctcatcatatgcacgaatccggaaagaacgcatcatatttttgatttcacggataatggcatccgcctgtgcatcctcgatctggcactgctctacatccacgatgtcatgcgaatgtttctcatatacgcctgccacaatatgtccgcgtttattgcaggaaaaagccgcctgtactttatgccgatagtggtatggatcgtccatcccgatgattggattgatctttccaaacggttccatgagtttgcgcatgtaactctgctttttggaaagctgctgactgtacaaaattccctgatagtcacaccctccgcatctttttgcgtaaatgcagtgttcacctgttttttttatctggcttatgttcggttttctatccgtttctcttcccctgttcctctcttttttcatcttctgtcccgttgtttttttctgtcctatttgcatattttccaacttcctgtacttgatttttaaagttctttctcgtagcaccaccagtcctcgtcaaataaatcgctctctcccactacgtcaaaatgcagtttttcataagaacggagcgcttttttatttgttttacacacgagaaaatgcacactcttttttccctgttttttcaattcttccatgccatgctgcagaagccgccgggcaattccctgattctgcatatcggtgcgcaccccgagtctggaaagctccgcagacggctgcagtgttttggaccagcaggtgagtgcttccacctgcggatcttcatccactgtgatcgtgccaatgatttctccatcttcattttccatacaaaaaagagcatttcttttcatatcataatcaaattcctgttctcccggatacccgttgccccatgcgcagtatggagtaccgatcagtgactgatacagcgcaagaatttcttccttatcgtcctgcttagcttttcgaaacttcatttttcttcttttcatccttcgctttcgattttctttttcaactatgccataatgctctctaaaatgcaagtatactgcccttttcatttttttacccaaaacaccccggcagccgtttttataacggataccggggtgtctgttttctatagccgggtgtacttatacctgaatacgatctgcaatctcatttcccatggcaaaccgttctccattggcaccgatgatcagtccattggataatttctgaatcacctgtacgctgccaccttcttctacatgatggcggtgcaggaattctacaacttccggtaatccgaataaccactgaatggtataatttccaccaacttctgcttttgataatgcctgcataatgctccctccttctatagcttctccattcggttaccactattatatggagtttatacccggttagtcaatcgagagctttctccttttattataaccgaaataagtcatcactgatctgaaaaactgttcatttgttccagtttttccctttaagatatgttatattatgcgtagaaaaaggg

SEQ ID NO: 1025 - DNA, 79666 bp, Unknown
  gut microbiota DNA sequence
gcggcttacccgaatatattaagtaactgttttatcaacagccgtcattattcgcagtaatggcggctattttcgttttcccttgaaaatcgtgtagcacaatccaacaagggtgcaaatgaactaagaggatttgcttatttcgagatatttttctataaaagtgtgtcaaaaggtgtgtcagtcttttatttcatatcagagaattgttccggaacccctataaataagcattcttcggattatttctcatccaccacctgaaaaataaaaaatttaagataatagctctccggcacattcgcagaatttgcccacaaaatcggatgatccggcgcctgcgtacggaattccacctgacgcagccgtttgtgtgccgcctttgcagcttccttcaccgtctttgccagcagttcctgtgtcataaaatgggaacaggaacaggttgccaggtatccgccgtcttttaccagctttaaccctttcatattgatctcccgataacctttgatggcattcttcgtggcctcacgggatttcgtaaatgccggcgggtcgagaatgactacatcatacttttctccggcttctgccagtttcggaagctcgtccagtacatttgcacagcgaaaatgtaccgtatcttccagatgattacgcacggcattggcatttgcctgctgcaccgcatattccgaaatatcaagtcccgtcacatcggaagcacctgcgattcctgcattcagtgcaaacgttcccatatgtgtaaaacagtccaaaactctctttcctttacagatccgctgcattgccagccggttatacttctggtccaggaaaaagcccgtcttctgaccatttaccacatcgaccagatagtgcacgccattttccgtaatctccacctctgtatcaaatgtttccccaataaatcctttcaccttcggaagtccttctttcctgcgctcattggcgtcacttctctcatagactccacggatagaaataccttcctctttcagtaccccttttaataatgaaacgattgtttccttgaactgctccataccgagtgccagacattccaccaccagcacatcctcatacttgtcaaccaccagtcccggcaaaaaatccgcttccccgaaaatcacacgacaggaagatgtatccaccgttgtcttccggtattcccaggcattctttacacgcatacgaagaaaattctcgttaatctcctgatccgcatgacgggtcagcatccggatgcggatcttcgaattctgattgataaatccctttcccatcggatatccatcaaaatcatgtaccgtcaccacatctccattggtaaatgtccccacaatcgtatcaatctcattatcaaaaatccatgcgccacccgccttgatcgtgcggccttctcccttttttaaagtaacaattgtatgattctccatcttcttttccttcctgtaaatattttcttcatagagataccatgtgcgatgtcgaacatttgaggacatatacacaatatcttcttttcgctgtcccagcttcgttttcgtttgggacatatacacaatatttcttcttttatgtcccggcttcgttttcgtttgggacatatgcacaatatttcttcttttatgtcccacttttattttcgttcgggacatatacataatatctgcacttctatatcccatttttaacgctttccgggacatatcagtggaaactttttctatatatcccactctgactcttcttcgggacttttcaacttaaaaatcttccatatatccctgccctgtctatcttagaattttttctctcaaatatcttctatatgccctctccctgtctacctcaggactttttcccttaaagtgtaccacagaataattacgttttccagcactccccattgtttttgaaatccataaatgttataatgttgttaataaattaacgaagttgttgcatttctgttcacaacttcacgctaagacatacaaggaggtcttatacgaatggatttttcagaagaatacagacagaagctcgtttcagcagacgaagccgtaaaagtaatcaaatccggtgactgggtagactatggctggtgtaccaacaccgtagatacactggacaaagcacttgccaagcgtaccgatgaactgaaggatatcaacctgcgtggcggaatcctcttaaaaccgcttgccgtatttgagcgcgaagacgccggcgagcattttacatggaattcctggcatatgtccggaatcgaacgtcatatgatcgcacgtggctgtgcattctacagcccgatccgttattccgagctccctcgttattaccgtgagctggattgtccggatgatgtggcaatgttccaggttgctccaatggacaagcatggatacttcaacttcgggccaagtgcttcccatcttggtgcgatgtgtgagacagccagacatatcatcgtagaagtcaacgaaaatatgccgcgctgccttggcggaacagaaaacggtatacatatttccaaagtcaatgcaatcgtagaaggctccaatcctccaatcggagaactcggtgccggcggtcctgctaccgaagtagaccagaaagttgcacagctgatcgtagaccagattccaaacggtgcctgcttgcagcttggtatcggtggtatgccaaacgcagtcggttccctgatcgcacagtccgacttaaaggatcttggtgttcacacagaaatgtatgtagatgcattcgtagacattgccaaagccggaaagattaccggtgcctgcaaaaacattgaccgctaccgtcaggtatatggtttcggtgccggaaccaagaagatgtatgattatctggatgaaaatccagaactgatgagcgcacctgtcagttacaccaacgatatccgctccatcgcagcactggacaacttcatctccatcaacaactgtgtagatatcgacctgttcggacagatcagtgccgagtcttccggaaccaaacacatcagtggtgccggcggacagcttgacttcgttctcggtgcttatatgtccaaaggtggaaagagctttatctgctgttcttccacattcacggataagaaaggtgttatgcattcccgcatccgcccgaccctggcagaaggttctattgtcacagacacccgtgcaaatacccactatgtcgttaccgaatatggcatggtcaatgtaaagggattatctacctggcagaaggcagaggctctgatttccattgcacatccggacttccgtgatgatctgatcaaagaggcagaccagatgcacatctggagacgttccaaccgataagaacaccgtttgttcacaatttattcatattgcaaaaaaacctcgtttttaacggggtttttttataaattttacctcttgtctttactatccttttttagtaatctatagttcgagtaaaggagaggtaaagatgaagaaattttttagtattatcaaagaaaaactattcaccagagttgaaaaacaacattccgaagcttacctgcgtcggatctcatttctgaataaatattccctgctgttccacatgttgatatcctgtgggatcgtatttatggtggaggttctttcccgaaggagttttctctcggcatgttccttcgttgggatgcataccggtgcatttttttataatgcctttattgtatttgcatctttaagctttgtttatctgttccgcagacgtgcattctggcggatcattatcagcggtttctgggtgctccttggaatcattaacggatgcatcctttcaaaccgtgtaacaccgtttggctttacagaccttaaatgtatcaatgatctgtttgccatgaacaataccaactatttcacggcagaagaggccactatcgtagtcatcgggctcggtctgttccttctgttttgtgttgcgctcttcattaaaggaccgcgctatcagggcaagacccataaaattgttgtagtaggtgccattgtatcggtactgtttgtcggtcttcctgttacaacctctgctgcacagaatgccaatgttgttgcaagttacttctccaacattgcacagggatatgaaaactatggttttatctatggattctcttcgagtgtggtagaccgtggaatgagcaagccggatgactactccgagcagaaaattgcttcgattgaaaaaaatgtaaatgacacaaaaaaagaaacaactgtcaccaaaaagaatgcaccaaatattatctgtattcttcttgaatcattctgtgatccggatgagatcaagtttctgaattataatcaggatccgattcctaccttccacaatctcgagaagaactacacgagtggttacctgacagttccggttgttggcgcaggaaccgcaaacactgagtttgaagttctctccggtatgagtatgcagtacttcggaaccggcgagtatccgtataaaacaatcctgaaaaagacagactgcgagagcactgctgctgatctggcttccatcggatatggaacccatgccgtacataacaatggcggtaacttttacagccgtgtcaatgccttttccatgatgggatttgatactttcaccagcaaggaactgatgaacattcagagttatacgccaaacggaagctgggctaccgatgatattcttgttcctgaaacaatcaaaaccttggattccactccgaatcagccggactttacctacaccattaccgtaggtacacatggtgattatccaaagactccggttatcgcaaatccggtatataccgtcagcggtgtggatgatgaagaaaagaaaaaccagtggacttattacgtcaaccagttaaatgaagtagatacattcctgaatgatctgattacagagctctccaagagagatgaagataccatcgtggtagcgttcggtgatcatcttccaaccatgggtctggaagattccgatatgaaatccggtgatatctacaagacaaaatatgtcacatggaataacatgggattaaagaagcaggatgcagatctgtatgcataccagctgatggcaagcattacggattccacaggtattcatgagggaaccatcttaaattaccatcagacccagatgaacaacacagaccacactgcatatctggacggactggataatctgcagtatgacattctttacggaaaccgttactgctatgatggcaaagacaaataccctgcaaccgacattgtaatgggaattgacgatgtaactgtatcggagacgtcggattccatcggcggatcggaagtgtttgtctatggaaacaacttcaccaagtggagtaaggtatttgtaaatgacgagaaagtcaatacaaccttcagcaattccggttgtctgattattccaaaagacagtgtcaaagacggtgataccattaaagtgtgccagatgggttccaacagtacgattttccgtgaatccaacacgtacacatacaaagatcctgctgtggaagaaaccgttacgggaacagagtcggacagcaataccgaatctacagtttcagaaagccagaaataagcaaaaaagacctgccagtgaatttattcactgacaggtcttttcttgtcttaaattgtctttaacgcatccacagcggcatccagatacggattttccatctcatagaatgcaccggcatccgcagctttcgcatatgccggatccaatggcagtttgccaagaactctggttccttcttttgcggcaacttcgtcaatgttgctttctccaaacagtgcgatcttctttccacagtccgggcatttcagataactgaaattttccaccagtccaagtaccggtatatgcatcatatttgccatatggaaagctttctttacgatcatctgtaccagttcctgtggagatgtaacaataacgataccgtccaccggaagggactggaacacggtaagcggtacatcaccggttcccggtggcatgtccacaaacagatagtccacatcgccccagacagcctcattccagaactgtttcacagcccctgcaatcacaggtcctctccagacaaccggtgcctcttcatcttccatcagaagattgatggaaacgattttgattccttcttttgtctcatacggatacattcctttttcgtcaccgaccagctgaccgtgtgctccaaacatcttcggaatggacggtccggtaatatcggcatccagaattcccactttatatccggctttcgccatctgtaccgccagggaagaagtaacaaatgatttaccgacacctccctttccgctgaccactccaatcacatgtttgatattggaatatgcattcatcgcttcgagcatactctgcggattctgagaattatgggaacatccctcacagctttctttggaacaggatgatgctccgctgcaacttgaattttctggcataatgatagcctccttgttaattatttaatgatttatttatatagactgcccagtctttgaaatgggtagtatatgaaataagcttttccgataattttatctttgctgacataggtatgatcccaatatctggcatcataggaatcattccggttgtctccaagcaccagataactgtctttgggaacctcaaactcaaacggtccggttgcctctgtccatgtctctttcaggtaatcctccttcaaaggagtctcagagtcattgatatagattttcgcatcctcaatggtaaccttttctccgggcagaccaatcacacgcttgacgtatttttgcgtttcgtcatccgggaaccggaaaatcacgatatctcctctcttcggttctgaaaactgatacgccagccgcagcccgaacaggtcatcgcccggttcaatggtatgctccatcgatccggtcgggactgttgcattgatgatcacgtaattcttcaaaaccatcgccagcgcgaaggctgccagcagagtgactacccagctgagcacttcccgcagaggcgaagaagctttctcctttccctcgccctttggatcattgtccatctttatttcttctgttgacatttcttttttctcttccataatcactctactctcttggtgcaaaccaccagtcaataaaatcttccctgcggaaaaccagtcccacaagtcccagatccacacgttctttctgtgtcagggtctgcgcaataaattcattcacagatacatcaaaatcgccttccaggcaccagatacagctcactgtcggcacattctcctgatttttccagtcatctacgaacgaaccgccgaaatcaacaatcttattccaacgatgctgcgtattgataacccgctgcttgatattctcatagatgacctccatcatccggtgaactttcgggtgatacatcacaggctcaagaatccttaagagtcggtgctttggattgacacgcagttccagcgttccgtttgccgtattcgtcaccatacagaaaatctcgttatccggaaacgtttccggccgcagatgatactgataacgatatggtaccacactttttatcatatggaaatctgcatccatttcttcatatataacccccggacattcactgcttatcacatagtgcatgctaccctgataaggcgccagaagctggcagaacagatcccggttcttttcgaatacaatcagctggtattctgccagaaaacgccggaaatccataatatggttctgcctgtaatatgtaaacagccccttgctgataaatgcaatccttatgctttttccggtataaccctgaataattgttgcaaccggaagttcaatctctctcccttttaaataaacttccactgtgacagctttgccaagcagctgcatctcttcttcatactctgtcagaaccggctgctgtccgctggcaatatactggttcagtcccagcggattggatgcaaaatgttctacaatccgtctgccgatcagcctgcgcagctccgtcagattttcatcatgcgccacatcatcccttgccagccgcaatgtcaggaattttttccgtaaatgcagatgatacgtcatatgcctgagccactccggttttaaccccagatctttcttttcatcggtcacaagaaacccctgctgatacaggcaggatgtcccgatcagtccctgatgtttggaattataaatccagatacacccctccatcagttcatccatgatacgaatcgatatgattccaagaatatccgcgaacggattgtccatgatatgattctgttcccgcagcgtcacgcttttttcatcaaaggaaatctgaatgggaaatggctgatacagcatatagtgctgtactgcgtgcaccagcctctgaagggacagattcttcgcatatttcggccgtaacaccagcgtaattctggttccggactgttcgcggttggaattgatatattccattgtttccgccccttctatccattttgcggtaaccggttctaacgtctggcgatccgtaacattccacgcggtatttaccgatttgtcctttctcgactcaatcaacagtgcccgtgcaaccataaaaccggaaagcataccgactccaaactgcgccaccggttcatagtgaagctgctgtgtagaaaaatcctcgctctgataaaaactcactccgattttggcgacatactgctcaatatccctggcattgattccgattccgttatcctcaaacaccagacgctgcgtttcggaattatactgaatggaaatttgaggagaatacggatttcgcatggaatttaaggctcttgcctcctccatctccagaaactctgttccccagctccattccaacgccgccctggtattgcatgcatcaatggcattttgaagaaactcccggatataggcatccggatctccgtaaaactgcgtacttgcaaaggtcgatatgatattttcctgatccatacctactttgcactgtttcatagctgttcctcatttaataaaattgcctgaaccacaaaccgcttgtctgcctgtctgctcacacaggttgataaagtcagcagatgactgtccaccgaaagctggattttgtcctttacctccggcgaattcttggattttttcacaatgctttcaagataacttacacgtccctctttcgttgaaaagtcattggtgtgcagaatatgtgcatcgtccgtcttatatgccgcaaaaatctcatacacgagcaccttttcctttgtatacacatatatatacggaaaattgttaaaaaatgtctggtcttcatagttgtggagagaagcaaacattgtgtcattgcgcatattgtgcccatacacgacggtatcaaaatccgtaaactctttactgtttgccttctctgtataaatacatccaggatatcccctggtaccattcatattgtaattcagataataggaatcatcactcggatgctgtaacaccggataatccaccccggttcccggaatgtagatccatgcgtaaatatcctgattgactccctttaattttttccagtttaagtttttctgtggaatttctattcctttttgttccagttcgctgtcttcggtctgcacttcctgtgccacattctccgtctcagtctgcgtatctgacggaatattgatctgattatcattcacctgattctgcagatcatttacctgggcagaaagcttttcatattctttctgtgcattcttctgaaccatccagcttcttccaaatattatgagtaccacgatcaatacaactgccagaacaatggtcagaattttatagatattgatcgttctgtcgttctttctttcctgtcttttcataaaatagttttctttctttaaaattgaggcagggcggcagattccattccaccgccctcacgtgatgccatgcatcacctatccatagacctacatgctaaataaaattgtatccagtgagattaattcttacgtgcttttcttccgcatacaacaatacctgctgccgcaaatactgcaacgaacggaagtgccggaagcgctgccccggtttttggagatgtcttataggaaacagatccggaagctgatgttcctttctgacttcctgctccacttttgccattgacacgggcagaagaactctttgtggaagtattccgtacggaattctttccatcggtataaccatctgtataaccatcgtcataatcatcctcgaaactgtcctctccatcgtcataagactgtggatagtttactgtcacattctgatttacactaaccggattatactgattattggtctgtgagttgttctggttgttgttgtttgtctggctgctgctgttggaattgtcatttacattggaatttgtatttgatccctgggaattttcatcctttgacggatctgttgtaacggtaggattcacatttgaactgtaccttacaactataaccggtgaaaatgaatacaatgtaaccgtgactttgccattggaaacgctgtccggctttacagtctgccagcttccgctttttaatttatgtaatacataaacattgtctctagccttaattccacttgcacaaatcgttactttgattcctttggatgtattcgttgcagacggaacactgatatcagacatggccatgacggttgcacttccgttctgtgcacttgccacagcatttgcctgacggtttccctcgcggtaaacatctttgtccacacccttggaagaaaccgtgataagctcattgtttgcattataaccgctgctttcaacggttgttgccttattcagctcattggttctttgaaccagtgccgtatcacttgttggtgatggatctgcaaacacggttgtgcccattgtaaataccagcatcatagctgtcacaactcctgtgaaaattttctttttcatcgcaatctacctcctttccacgtaatataaactgcatgtaactctatctatatcaagtgcgcgcgcactggataccttattgtacgggtgtataaaacaccttcataatgagttcttccatggcatcttcatcaacatggtactcctcataccgtttcccgtcaatcggctttccctccaccgtttttccgggaaccgtatacatctggtcttctgaaaaaccgtaattcatcagctgctcaatcatacttgtgaaatccacactggttaccagataatcggaaacagaattgtaaatttctgtcacctgatccgggttttctgtggatactttttttaatttatccatataggcaacaatatactgttcttcgcgctgcagacgctttgttgcactgtcatattcttcggtatcccttccatgcaggtaataataagcctgcgtcccattcagggttactttttgccctttcttcaaattcacaccggcttttggaaacgaaatatcctgctgtacagtcacttccactcctcccacagcatcattcatctgtgggattccccccatattcatcgcaagataaccgctgatcggaatattttgaaacaggccggaaaccgcatccacggttttgctgcagctgaggcgcttaccgtccccgaatgcatgctgcaaacagatctgagttttaagcggtcccatatcaataccttcttcatcacacaattcgatatctgccatcgtgtttcgattgatggaaatgacctgcagctgctctgttttgttgtttacaacaagaagaaacagtgcatcggactgcccgccttgggtataatcgctgctttgctgtaccggaccatcgatatcaacccccatcatgaggtaggttttgatatctgtattatacaaatactcttttccctcataagtgaccacaccctcctgccacttttcctgaccggaatcctgtgtggtatctgtctgccccgcaacctgctgctcataagaattttctgtatcatctgcaatgtggaagccggcattttccgccttcgttttgacccctgccacaatcacaagtgcaagaatcaccaccatcattccggacataaaatacaatgcattatgaagttttgtcgatggttcatgcattcttctcatgatgttctccgtaatttccataatagctgccataatagccgccatagtagccaccctcatagccgctcttcttcatccgtactttgttcagtaccgcaccaagtaccctcactccggaagcttccatctgctttttgaccgtctggatcagacgtccgcttgccatgccctgggcaataacaagaatcgcaccatcacagtgttttgcgatcactgctgcgtcgattgcagctccgatcggcgcacaatccagcaatacataatcaaaatgttcttttgcaaaattaagtaactcggtaaaatactttttttccagaatttctgtcgggtttggtactgacggaccggcaaaaatcataaacaggcccggaatcgttgtaccgtaaagtacgtcttcgagttttttctgtccggacagaaaatgggataatccgtagatttctcttccatccgaagccactgcccgtaatcgtcccacgtatacggatttacgcatatcggtatcgatcagcaatacacgtttgccggattccgaaaaagaacgtgccagatccatcgtcacggtacttttcccttcgtttggcatggcagacgtcacaacgatggtgcagatatcatctccgcagaactggatattggtttttaatgcccggagtgattctttcatcgtataattttgttttttcagattctcaaatgttaccgatttcatttctttttcttccttctcttacgcttgcgctctttttccccatcgtattcggcttcttccaaaggaagcgtaccaagaacattcagccccagcttcctttgtacatcatctgcattcataatcgtatcattgaacagataagccaccacaataaccgcaatcgccaaaaacatgccaagtattcctccgaccgccgtatttttcatgatattcgggctgaccggttctccgtcggaatatcccttttgaatgatattcggtgcatcctgatccattttctgttggataaaggccacactgacacgcgcaatctcatccgcaatcttttttgccatggatgggtttgcatcgcgcaccgtaatctcgaggattcgcgagttggaaggattattcagggtaacttttttcttcagggaactgtaggtctcgtccagtccgagattctcaattacctgctcaagcacgggacgcccctctacgataaccatataatcgtttgtcagacttgtacctgtctgtatatccgcaagacttgtaatcgacatgcttttggacaatacataaaactgggatgttgactcatattgcggcaccattacaaacctgctgatacaatatgcggtcacggctccgataatcagtgcaaacaacacccatttccagaaagaaaggatctctaaaacgagatctttcagatcaatttcaatttcatcatcattttcaattacaatacgttcctgttgtaactgctgctccatatcaatgctccattactaactatttcatttctccggtcagaatctttgccggatgattcaccaaaagctgatccgcatattccctgccaaattttttttcaatcagctcatagcattttcccatatgattggcacggttttttattccatgactgtccgatgcaatcgcatccacacattctgccttcagcatctttttacagtatttctttggacccataccctcaagtccgagtaccgcatccgcattcaccgtaatccatgccccaagattgcgcagctcctctgccagctgcaaatccgcaagtgttccataccgctccacatgtgcaaataccggaatatatccgtgcagaaccagttcctgcgtcatctggtaaatataggcatattcactgtcgtgcgaatactcacacaacacataccgcgagccggccattgtccggcatctgccactgtcaagtgcctcgacaatatgactgttcacatggtattcggtgcccagtgcaagataaattccaagtttctgtgcatacggctccagaatacggaaatgttcttcaatttcttccttcggataagcaaacatgccgtgccggtaatgcggtgtcaggatcattgcagaaatgccctgctcttttgctgcctcaagcatcgccacagattcttctattgtttttgctccgtcgtctactccgtacagaaggtgacagtgaatatcgatcatggttttccttgcctttacttttttatactttattatactatatcgaccattttcttgcaatctttgagccgtttttccctcttttgacacaactttttatatttctcgggtttccacaattgatttcccggcaaacatagcgtataatggtcatgaaaagcgaataacacttgacaaacttcggttttcggggtacgcttatatgagtccatataaggacggtacaatatttgaccatcaggctcaggcggtgagagtaccgcacgcataaacaagtaggctttattctctgaactgtcagtattacagctcagtatgtcatagatttcattgatctgttttttacagcaagcgcgattgtccagcgcagggatttgttttcacaacatgacatgctgcctgttgaaaacgcagtacagcagatgcggactatttggatcaggaattcctgcggagggttccggtatccgtcgtgtgctcacacccctgccggagaggttaaactccggaactgcctagcaagtccgaatacaattgaacagaacaaacatatatttatctaaaaaccctatgcattatgcatagggttttttgtttcttcttttctgttgtccgttacaaagtaatgattccaagtgcatttaataccgaactgaataaaatcaacagtaccagtatcggtgcaacatacttgatcaatacaatatacagtttcttactcttaaatttctgtgtggaagattccacttcatccgtaatcgtctctggtttcacaataaaaccgacaaatacacaggtcaggaatgccacaatcggcataaggacactgttggatataaaatcgaagaaatccagaatactcattccgtgaatcgaaaaaccgctccagattccaaatccaagagaagacggaattgccatcaacaccgtataaacggttacacagaccgtaataaatttacggctcttttttgtcttatccacgaaaatggaaaccactgtctccatcagggaaatggacgatgtcagtgcagcaaacaataccagcacaaaaaataccgttccgatcaggtgtcctcccgccatactgtcaaacacttttggcagtgtaataaacattagtgtcggtcctgccttcagcgatgcctgatctccaccggaaaacacaaacacggccggtacaatcatcagtcctgccagaaatgcaattccggtatcaaagatttcgatattccgcacactgctctctatatcctcatttttcttcatataggagccatatgtaatcataatgcccatcgccagcgacatggaataaaacagctgtcccagtgccgccagaaaagcgttcgcactgatcttggaaagatccggctttaaatagtagacaattcctgcccctgctcccggacgggtcacaacaaataccgcaataataacggaaaggactaccagaagcggcatcagcactttactgatattttcaattcctttatttacgccaagcagaatcacaaccgaagtggcaaggataaaaaataccagccacatcaccggttccccggtccttgcaataaaatttgaaaaataatcatctgctgccgctgcatttccgcttcctgtaagaaatgcccatgcaaatttgatgacccatccaccgatcacacaataatacggaagaatgataatcggcacaatactggcaagaattccaatgaaaccgcacttttcatgcagcgtgctgaatgcatacagtgcacttttcccggtctttctgcccagtgcaatttctgtgatcataagtgcaaatccaaacgtaaccgcaaggatcacatagatcagtaaaaaagaacctccaccgtattttgcggcaaggtaaggaaacctccacagatttccaagtccgacagcagatcccgcagcggcaagaataaagcccattttgctggagaaactgctgccatgttttttgtgttcgttcataacagcccccttgatcatagtttcaggaggcagaccgtttataatttaaaccgatatccgactccccagatggtctcgatgtactgcggcttgttcgtattcatctcaatcttctctcgaatctttttgatgtgtacggtaaccgttgcaatatcaccgatagattccatatcccatattttacggaacaattcctcttttgtaaatacatgatttggattctctgccaaaaaagtcagcaaatcaaactcttttgtcgtaaactgtttctcttctccattgacccatacccggcgcgccgtcttgtctattttaatgccccggatctcaatgatatcattttgtggcatattgctgccgatcagtcgctcataccgtgccagatgtgccttcacgcgggctaccagttcactcggggaaaatggttttgtcacataatcatctgcccccagtccgagcccgcgaatcttgtcaatatcatccttttttgcggaaaccataaggattggtgtattctttgtctcacggatctttttacagatttcaaatccatccactcccggaagcatgagatctaagataaacagatcaaactcctcatgcagggctctttcgagtcctttggttccgtcattttcaatttccacttcaaagccactcagttccagataatctttctccagatctgcaatagccacttcatcttcaacgatcagtattctgctcatttgctgttacctcctgatatttgcgtattacaaagtacatggtggtgccggaatcttctttgctggttgcccagattttccctccatgatcctctatgatcttttttacaatggaaagtccgattccgctgccaccggttgccgaatttctcgaagcatctgtccggtagaaccggtcaaaaatatatggcagatctttctgggcgattccccttccattgtcttcgatttctacctgaataaaatccccgacatccttaatccggatgttgatgaatttttccgttttattcatatattttacggaatttcctataatattattgattactctgcgcagctgctccggatctgcaataatctgggtatccggtgttgcataattaaaataggacagggcaatcccctttgcctccagatccagtccgatttcttccacacaatccttaaaatatgcggcaacgttcagctttgcaaaatcatatggaatacggttggtgtcgatcttggaatacagtgtcagttcattgatcagtgtatccatctcatttgctttgttgtaaatggtacggatatacttatctaatttctccggcgtattggctactccatccatgatgccttccgaatagccctttaccgccgtaatcggtgttttcaggtcatgggcaatgttgctgatcagcgtgcggttttctttttcgttgcttagtttttcctctgcattatcttttaagcgctgacgcatctgttcaaaggtcgtgcaaagttccccgatctcatcgtcgcctccggtatccaacgcaaaatcgagatttccttctttgatattttctgccgcaacgcgcagtttctggatcggtgtaatcatgctccggtagatccacacaatcatcatgatcgctgtcagtaacagaatgattaccacacagataatcccccataaaataaactggcggatctcctgcccggtagcatcaaaagacgtgactatatacgccgtacatttttctcccgaatccagcttaaaatctgcctgttttaccagaatttcatcgtcccggtcgatatatttgtccactccctgtttcgaactgtttgccccatataccggaagttccgaaagaatcttttcattatcacttcccccattgaaagaaatattctccccgattcttaccaccagataggaatatttctgttccaggctctcattgatctcactaagatacgaaacgtcctccatttttgaaggagataactttatggtctttttgatcttttcaaaatccggtgcagtataacggtttaacatcggtacagaattgataatactataggcatccgcattcttaattccatacgtctgctcgatcacatgcgactgaaaattacaataggcgctgatcgtggcaatcgccaggatcgatggcacaaagataataatacagaacgaaatgatcagtttggtttttatcttcattcgtattccttccctgtaaaaaaaataagacacagaacaaactctgtgtcttattatatcattcttttataaaaaattatgtaaacttttcataaattaaaggtacttctttaaagcctctgccttgtttgttgcctcccatgggagatttaagtcattgcgtccgaagtgaccataagcagctgtctgacggtaaatcggacggcgcagatccagcatcttgataattcctgccggacgaagatcaaagttctcacgtacaatctttaccagctcatcatctgcgatctttcctgtaccgaatgtatcaaccatgacagaagtaggctgtgcaacaccgatggcgtaagataactgaatctcacacttatcagcaagacctgctgcaacaatgttctttgcaacataacgtgcagcatatgctgcggaacggtcaacctttgtgcagtcttttccggaaaaagctccgccgccgtgacgtgcatatccaccataggtatcaacgatgatcttacgaccggtcagacctgcatctccgtgtggtccgccgattacgaaacgtccggtcggattgataaagaatttggtatctccatcgatcagctcctttggaaggatcggatcaaagacatatttcttaatatcctcatggatctgttcctgggtaacgtcctcatcatgctgggtagataaaacaactgcctcaagtctctttggctttcctgcttcatcatactctacagaaacctgtgtctttccatccggacgaaggtaggtaagtgttccgtctttacgaacctttgtaagctgtaatgccagcttgtgtgccagtgaaatcggatatggcataaattccggtgtctcattggttgcatatccaaacatcattccctgatctccggcgccggtatccagatcatctgtcagctcgccctcttttgcctcaagtgccttgtcaacacccatggcaatatctgcggactgctgatctaaagctaccataaccgcacaggtatgtccgtcaaaaccggtctttgcatcgttgtatccgatctcgtttacagtctttcttacaattgcaggaatatcaagagttgcctttgttgtaatttctcctgtaacaagtacgaaaccggtacagcttgctgcctcacaggctacacggctcatcgggtcctgctccatgcatgcatccagaatggcatctgaaatcgcatcacacattttgtcaggatgtccttctgtaacggactctgatgtgaataataatttttccattgctttttgtttctcctctcttgttttatacagaaataaaaaaaaccgcctcgcagcggattgatctaaagataatcaaatccccttattgttcgattaactcgctcaggttggcaccttccaaaacaggggttgccgtgacttcacagatcctatgtatctccatcactctgaataagagaaagcttacaatattaaatttgaaatatccaagtgctaccatactccagtttctttcatctgtcaagccctaaaagattgacttttgcgtgaaataattctatacttttgtatatacgttacatacggagagataaaaaatgataaaaattgagacaaaacaactacaggaaggtgccatccttgcacagcctgtgatcacaccgcttggacagccgttggctcccgccggttctgctgtaacccgtcagctgatcaaccgcatgaaactgtaccgtgtggaatatgcagaaattgagggcgaagaacctgctccgcaggaggaggctccaaagcctgtaaaagaagcaaaaacatacgcacaggaaagcaaaacacactcacagaaagtcgccggttccagtgaattccgcacgttccagattgagtatgttcaggcaattgagctgatgaaacagttgtataccgcagccatcaaggataacaaaccgattgactcgcaaaaacttctgggcagtgtcgcagatctgttccagtcccgcaacaccatcgttgaaatgtttgatatgctttacaacatgcgtactgtggccgattcggtttatgcgcacagtctcaacgttgcactcatttcacgaatgatcggccgctggctgcgttttgaacgtcacgatctggacattcttacgcttgccggactgatgcacgatatcggaaaactgctgattccttccgatatcttaaataagccgggatctctgaccgatgaggagtttgcaaaaatcaaacagcacccggcactcggatacgagattttaaaacgtcagccggatctggattcccgtatcaaaaaagctgccctgatgcatcacgagcgctgtgatggaagcggctatccgaccggattgacggaagattacattgacaattttgcaatgatcgttgcaattgccgatgtgtacgatgccatgacagcggcacgttcctatcgctctccgttgtgtccgttcgaagtgatcagtaaatttgaagaagatggtttccagaaataccatacaaaatatattctggttttcttaaagcagattgccagcacttaccagagtaaccgcgtcattttaagtgacggaaggggatgtaccattgtcatgttaaatcagaatgcactgtcccgtccgattgtccagtttgatgataaatcctgtctggatctttccaccgccagccgcgacctctatatcaaagcggttttataaatttttcaaatgaaaagggagtgtgaaaacataccaatgtttttcacgctcccttttttgcccgttctttttatttatgaaactttcagaataaacttctgaatttctttttcatccgataccttttcaatctgtgccccaatgccgcgcaacttctgatcaaattcttcgtatccacgctcgataaaataaatatcatcaatcaccgtaattccctctgccaccagaccggcaatcaccagcgctgctcccgcacgcagatccggcgcattcaccctggcacctgtataacgggtcactccattgataatggcaatattgctctctaccttgatattggctcccatacgtgtcagttcatccacatatttgaaacggttttcaaaaatgctctccgtaacggtactggttccctctgcaattcccagaattactgccatctgtggctgcatatctgtcgggaatcccggatacggaagtgttgtcacctgtgtgtgatgcagttttccatccgaaataatccgaaccgcatcatcgaactcctcaactttgcatcctgcctccacaagtttggcggttgttgcttccagatgtttcggaataacatcctttaccagcacatctccccctgctgccgctgccgcaaacataaaggttcctgcctctatctgatccgggataaccgaatactctgtcttatgcagcttctccacaccgacaatacggataacatccgttcctgcaccacggatattcgcacccatactgtttaagaaatttgccacgtctaccacatgaggctcttttgccgcattttcaattacggtttttccttctgccatggatgctgccatcataatattgatcgttgctccaaccgatactttatccagataaatatgtgttccgtttaatttttctgcctctgcaataacaagaccatgtgcaatatccacgtctgctcccattgcacgaaatcctttgatatgcagatcaatcggtctgcttccgatatcgcatccgcccggaagagccacttccgcctttttgtattttccaagaagtgcaccgatcaaataataggacgcacggattctacggataaattcattgtccaccgtcacgtctttgataaatgaaccgttgatctttacggtatgtgcatcaatacggtctaccattgcaccgatctctgcaatcgcctgcaataatacattaatatctctcacgttcggcaaattttcgattgtaaccgtttcatccgtcatgatcgcagctgcaagaattgccagtgccgcattctttgccccgccgatttctacctcaccattcagcggatttccgcctttgattacatattgttccatatctcacctcaataaacgccctatttcgtatagtacgctaccctactatctatcctattcatctagtgtaaatttgtgataccatccacaatctgttcaacggtctgttcgatatccagccccgtctccgaaatccggatatccgcatatttttcatacagcggcgtgcgctccagatacagatcatataacgtctgtccgtctcttaaaacaacacccctgcctttgatatcttccagacgcttttccagctccggatatgccacctcaagatatataactgttccgatttcctgcagatgctccatagcttcttttccgtagacgacactgcctccggttgcaataattgcatgatgtgcctcaagtgtcgcattcacacggttttctacctgaatgaacccttcggttccctcttctgcaatgatctcacgaagcaggcgcttctcctgctcctgaatgactaaatctgcatctataaactgatatcccagcaccttagcaaggataacgccgacggtgctcttacccacccccggcattccaattaacacaatgttatctttttgcattactgtgtactctctgcattctgtgtttctgtggaagtctgtgtctctgtagaggcattcgggtcctgctgtgtcagagaattcttaaatgaaatctttgcaacattctttttattgaccttccagccgtcttttttctgccagccctccagcacttcattgtagtggtcacttttacgtttgtcaataatattctgacgatttttttctgtagcgtctttgtctgtttcactgtccagacgaacaatatataatgcactgtctgtttcaatcacatcggaagtttctccttctttcaaatcatccaatgcctttttcacagatgtatccagtgtggaatcatcggatgcatacgcaccggtagtggtctgctgatcctcatcctttgcagcatcttcgagagtttttccattctttaccgcatcttcgattttgtttgcggtctccttcagctgctttttctcatcatcggtatattctacggtatttccgctgtcatcctgatgggaagttgtagaaatagtcatcatcgtataaccgcgctcatttgcctcttcatccgtcacattggtatctgcttctgcctcgatagctttctgcattttgctgcggatggtgtagagcgtaagcagttcctccacggtatcttcgtctgcagtcatctccttgagtgcctcggaagaattatcgctgataaactgctgtgcagcttttttgattgctgccttttcgtcttttgtcacactcacatcatagtctttcatatgtgcctgtaacgtatacatctcatgaagctgttccataacggaatctttcatggtgtcttccatggttgttccgtttccatataaatccttgctccagagctcactgctgcttttggcccccatcatgctcttataataatcttctacatttgcctgctgataacggcatgtaaagtttgccatgcccatcgtgacggtctgatttttcatgcttgctgccgtcgcacctgtatttataccacatccggtaaaagctgctgcgcagattgcaccagctaaaataatcgctgtaactttttttgctttcatagttcctcccgggagtttcttttcacctatataccagagtattataattcttttccctacatcaggcaagcacttttacggctccgcacacaaaaaaacgtgcatttgttccaataattgcctgagaacttccagaatttccctgttcttttcccttgaatttgctcccagacggtaagtgaagtacggtcccttcggatctgccgcaaatttcagtgatggagcaaacgcttttaccagctccggaatacgctgtgcgtgaatctttgctttttcgtacattaggatttttaacagatcttctctttgaacaatttccttaatatatacactgtgggcaaccgctttgagtctggcaattgtcagcagattctgcacggacttcggaggctctccaaaacggtcaatcagttcttcgagcatttcctccgcttcctcatccgtttcaattccggcgatccgcttatacatatccagtttctgcgactcatttgcaatatatgtggacggaataaatgcatccgtccggatatcaacggaagtctcaaactgttcggccggtgcttctccccgggcttctttcaccgcttcgtgaagcatcttgcagtacagatcatatccaaccgcctccatgtgaccgctctgttcggctcccagcagatttccggctccccggatctccaggtcccgcatggcaatcttaaatccgctgcccagatccgaatactcccggatggcagccagtcgtttttccgccacctctttgagcattttgtttctgcggtacataagaaacgcatacgccgtacgattggatctgccgacccgcccgcgcagctgatacagctgggaaagccccatattatccgcgtcatgaatgatcatggtattgacatttgagatatccagtcccgtctctatgattgtcgttgataccagtacatcaatgtctccattgataaaccggtacatgatatcctccagctggttttcccgcatctgtccatgagcaaatgccacatttgcctccggcaccagctcctgaatgcgtgacgtcacttcatcaatatcccttactttgttatacacataatatacctgtccaccacgggcaagttcccgcgtgattgcctcccggaccagttcctcattatattccatgacatacgtctgaatagggacacggtccatcggcggttcctctaaaacgctcatatcccggattccgatcaggctcatgtgaagtgtccgcggaatcggtgtggcagtaagtgtcagcacatccacattggtctttaactgtttgattttttctttgtgagccacaccaaaccgttgttcctcgtccacgacaagaagcccaagatctttaaactgcacatcttttgacagaatccggtgtgttcccacaataatatccacctgtccttttttcagatcactgatggtcttcttctgctgcgctgccgtgcggaaacggcacaacagatccacccggacagggaaatccttcattctctgggaaaacgtattataaatctgctgggcaagaatggttgtcggcgcaaggtatgccacctgtttattctcctgcactgctttgaaagctgcacggatcgcaatctccgtctttccgtaaccgacatccccgcagatcagccggtccataatcttatgactctccatatcccgcttggttgcatcaatggcaagcacctgatcttcggtctcttcaaacgggaacagttcttcaaactctctctgccataccgtatccggtccatacatatagccattctgttcttcccgctcggcatataatttcaccagatcctgtgcgatctgacgcacggctccacgcacttttcccttggtttttgtccactcctggcttccaagtttattgagttttggttttcttgcgtctttccccgcatatttctggatctggtcaagctgtgttgcaagaatatacagattggagcctcccgcatattcgatcttgatgtaatctttcacctttcggtcgacttctatcttttcaattcctttgtagataccaagcccatgattttcatgtacgacataatccccgacactcagatccgtaaactgctggattttttcgccctcataggtgcggtgccgcttctttttctttttttcttccccgaaaatatccgtatccgtaatcactgcaaactgcaggatcggatattcatacccctgatgcacttttccgtagcagaccatgatctgtcctgccaccagatcgtgatcgtaatcttccgtataaaaacagttgagtccttcgtttaaaatatcctccgccagacgcttcgcgcgtgtgcgggaaccggaaagtaaaataatacggtatccgttttttttgtatttcttcaggtctgcgatcagaagttcaaagctgttattgtatgcgcttacgctctttacatgaatgccgaactgcccattggattttaatccgcaggtcttgatatccagtgcggaaaccgcacagcaggaatatttttcaagccttcccatgatttccttatagccaaacagttcgttcatctgccccggcagaatataccccatttccagacgctgcttcatgctctccgaaaattccagttccgtctgccgtccgcgttccgcgctccggctcagctcatcgaaaaacacaaatgtatctgccggatcaaaataatccagaaggctccaccgttccctgcagaaataggacaaaaaggcatccattcccgcggtttccgacaattcttcccattcctgtgccagttcttttgcctgtgacagtgcccgataggcttcctcggttttcatttctttccgcaatttatcggaaaaagcttctgcttcctttaacagtctgcgaataccttctgctttctcttcggtcgaaagaaccagttcacatgccggatataccacaagcttttctatattttcaatggatttctgactttccacatcaaaggtgcgaagggtatctacttcatcatcccacagttcaatccggaccggattttcttccgtcagcggaaaaatatcaagaattccacctcttaatgcaaactgaccgatattatccacctgatactgccgttcatatcccatccccaccagctgttccacaagtgcatccagatccagggtatctccctgtgcaatatgcagcacactgtcccacacctgtgcatcccttggcatcgtattcatcagggcatcaaatgttgtgatcaccgtcacctgttcattttcatgaattgcccgcaatgcactgatccgctctgcggtaagaaggtttccgcggatatccgattgataaaacagcacatcctttgccggataatacaccactgatggatcaaaaaaacgatagtcgtcatacaattctttcgctttctgctcatgaaacgttacgatcagacgccggctgcgtgtccttccaagcgtgtaaatcatatgtggcttctgtgcatcaatacagccactgatggtcaccagtcccggctgcatggccgcttttgtcatatcttcatatccgctcaattcctgcagcggttctataaatgctttcacttactttgtattctcctgcttttttgcattaaaatcattcattgccttgtctgcttccccctgaatcatcaggactgctgcatcttccgcatcccgtatggcttcttccacccttgcacggtcctccccggaaaaacggccaagcacatggtctgccagatcccatccctgtggcttttccccaacgccgactttaattcgcataaagtttgaggttcccacacttgaaataatgctcttgattccattatgcccacctgcactgccttttttgcgcacacggatatttcccggtgccaaagagatgtcatcaaaaataatcagcatttcgctctccggatcaagcttatagaaattcacgatttctgcgatgctttctccgcttaaattcatataggtctgcggtttggccaggatgacttttacgccttcgatcacaccgcttccacacagcgctttatgttttttctccgtgatgctgatgttgtatttttctgccagtgcatcgacggtatcaaatccaatattatgtcttgttttttcgtatttcttgtccggatttccaagtcctgcaattaaaaacatgtatccaattctccttttatttgaatttttgtccgttaattacgaaaggtaccgccgggtggctcccgtgtggtggctggggctgctgcttcctgtggcgtgcgattcagacagaatcttagaatttgcgaaaatgattgcgtggctctaattttgtgtccgggcaacgtttcgacagcggcgcggcttgtgtccgtctggcagggatgcgctcagaatttctagtctgcctaagcggagcacttcaaaaattttattgcgcccgctcccggttgtgtctccctatgaacactttgacagtcctttcataaatgtggtcgcaaaccgacccgcgggcacagtattttgaagcactccgctaaggcagacacgaaatccttcggacgcgtccctgccagacggacacaagccgcgccgctgtcgaaacttgaacgaacgcaaatcatcaaaggagccacgcggtcattttctgcaaattcttgattctggatgttgagcacgccacaggaagcagcagccccagccaccacacgggagccgcccatccataagtttcgcaattacggattcaaaaagtctgtaattaagaaaaggaccatggattactccacagtcccatttctcttattttaatcgtttattccttctcctgcaagacctcttcatactttttcagtatcaatccctgaatctgatcccttgtcgcggaattgatcggatgtgcgatatcccggaaatccccgtcgccggcttttctgctcggcatcgcgataaacaatcctttttccccttcgatcactttgatatcatgtacgacaaattcatcatcgattgtgatagataccacggctttcatcttgccttctttttccaccttgcggattctaacgtctgtaatctgcatatgtatcccccttctagtctctccctagagcatatatctttcgttgttttctgcaacaatccggacagcatcgtctccggaataaaatgtatttgcccgaagcgttccatggctctccacaatgcagttttctacatgcgtattatcgccaatatatgcatcattcaagataatcgaattcttgatcacgcaattttttcctacaaacactttcttaaacaaaacagaattttctaccctgccgtttataatacatccactggcgatcaaactgttgctgacgtccgatcccatattatattttgccggcggaagatcatccactttcgaataaatcttcggctcttcgcggaaaaagtactttctcacatccggtttcaaaaagtccatatttgtacggaagtaatcatctacacttgcaatattactccagtaactattcagtttatatccatacacacgctttacattgcggtaacgcaccagcacatccgtaacaaaatcaaaccggttttcctccgctgatttttcgagaatttcgatcagctgtcttctccggataatatacactcctgtggaaatcgtattggattgtgccaccagcggtttttcctcaaaatccgtgatccgggaatcttcattcatacggacgactccgaaacggctgacatccgcatctgccggcatatccttgcatgcaatggtaatatctgctttctttgcgatatgaaactccagcaggtcattgtaatccatcttatacacacagtcaccgctggatatgatcacatacggttcgtgacggtttttcaggaaatcaatattctgatacatggcatctgccgtgccacgataccagtcactgttttctgccgtaacggttggtgtaaacagatacagacctccctgttttcttccaaaatcccaccattttgaagaacttaaatgttcattcagtgaacgggaattatactgtgtgagtacagcaactgtctgtacatgcgaattgctcatgttacttaagacaaagtcaatgcagcggaaacttccgccgaccggcatcgccggaatcgcacgttttctggacagttctcccatccggttgttattgccacccgccaaaataattcctactgctttcattttctgtcacctgccttaataattacttcgccgcctgccaataccccgtctggataatcttcttttactgtcacaccggaaatggcagtgtttttgcccacctttacattctccggaacaacagaatcgtctccaatcgttaccagtccaaacgaataaacactctcgtttaatttgtttggtgctgcctctcctattcccagtgttaccccatcttcaattctgcagttttctgcaattatggatttgtcaatcgttacatccctgccgatactggtatccttcataataatggaatctcgcacgacagcccccggtccgatatatacgtttggtccgattaccgaattgatcaccgctccatgaatctctgctgcctccccaataatgcagcgctccacttttgcccccggtgctatgtactgcggctcaatcgtatcgcacttcgtgtaaatcttccagaattcctcgtaaagattgaattccggaatcagatcaatcagctccatattggcttcccagtatgagccaagtgttcccacatccttccagtaaccgttgaactcatatgcaaaaagcctcttgttgtttttgaagcaatacggaataatatgctttccgaaatcacagctctgctgatcttttaattcgataagagcatctcttaatactttccaggagaaaatataaattcccatggatgccagattactccgcggtttttctggtttttcctcaaaatcctgaatctttttgttttcatccgcaatcacaattccgaaacggcttgcctcctccatggaaacaggcatcgtcgcaatcgtcacatccgcatgatttgccttatggaagtccagcataacctcataatccatcttataaatatgatctccggaaaggatcagaacatattccggattataactttccatatagcgcagattctgataaatggcattggctgtaccggtataccattcactgttattgcttctctcatacggtggaagtacggtcactccaccattgttccgatcgagatcccacggaatgccgatgccgatatgtgtgttcagccggagtggctgatactgcgtcagcacaccaaccgtatcaattccggaattgatacaattgctgagtggaaaatcgataattctgtacttgccgccaaatgctaccgccggtttggcgacgtccgatgtcagaactccaagtctgctgccctgaccgcctgctaaaagcatggctatcatttctttcttaatcacgtcatcactcctcgtctgttctaaatattatgtttgtttcttactattactgtagtatatcatattatccttttatgtacaacagtttatacaaaaatgctgagtttttttgttgttttttggcaaaatgcacaatatattttcgggtgcgcctttggttatagagtggtataatagaaaaaaactttattaaaataggtaggtaatcctgatgtataaattaaaatttaatgaccccattcatattcactttatcggaattggcggaatcagcatgagcggactcgctgaaattcttctggaaaaaggctttacgatttccgggtccgatgcaaaagaatccgatcttacccgcatgctcgcatccaaaggtgctcagattttttatagacaaagtgccgaaaatatcattcccggcattgatctggttgtctacacagccgcaatccatccggataatccggaatttgcagaggccagatcccagggactgccaatgctctcccgtgcagaactgcttggacagatcatggacaactacaacaattccgttgccgttgccggaacccacggcaaaacaaccacaacttccatgatcagtgagattcttcttgctgcgaaatccgatccgaccatcactgttggcggaattcttccctctatcggaggaaacctgcgtgtcggtcattccggaatctttgtttcggaggcctgtgaatacaccaacagtttcctgaatttccgtccaaaatacagcatcatcttaaatgtagaagcagaacatctggactttttcaaggatatcaacgacatccgtcgttctttccgtaaatttgccggcaatacactggcagacggagcaaccattatcaatggagaaattgcagaccatcaggaactgaccgacggacttccacagcagatcatcacctacggttttgatgattcctgtgaatattatgcagataatctgacatatgatgacaaagcctgtccttcttttaccgccatgcacaacaaagaggccatctgtgaaatcaaacttgccgttcccggacgacacaatgccggaaatgccatggccgccatcgcccttgcctgtaccatgggaatcagcacagatgccatcatcagaggtctggacgctttccacggtgccaaccgccgtttccagtacaaaggaaccgtagacggtgtcaccatcattgacgattatgcacatcatccgacagagatccgtgcgacactgaccgccgcgcagaaatatccgcataagcgtctggtgctggtattccagccacacacctactcccgcaccaaagcttttctggatgattttgccgaagtactttccatggcagatgtcattgttctggcagacatctttgctgcccgcgaacagaataccttcggtgtaagctcgaaagatattctggagcgcctgacagccaaaggaaaagacgcgcactattttccttcttttgaagagatcgaaaagtttttattaaaaaattgtatgaacggagatctgttgataaccatgggagccggaaatgtcgtagaaatcggcgaatccctccttggaaaataacttatccacattatccacatagaaacgttgattctttcttcgttctgtgtggattttttgtctatatttatccactcctttccgttttgaatttgtacgttttggtggacttatccactttatccacaatgttgttcacaatcagtatccccctgattaccagggatttacgggtgtttttcttcttccatttggaaaatgattgtgctataatcacaaatgcataataagaaaggtactatgacatatgataaacattcagctgcacaatgattgtccagccacggacacaatcgttcccaaccagtttattgaccgctttatgccgtcagcaaacggggaatttgttaaggtatatttatatttattacggtgcatccattctcatgcatcaaattgtacaatttctgaaattgctgacaaatttaacaatacagaaatggacattcagcgtgcactgcgttactggcagaaagaaggactcctctctctggaggaaaccgccgacggtaaattgtgcggaatcggtcttcttccgtttccggaagattccacaaacacggaagaggcatcttcctctcctgccccgtctgctgtttctttggaagaaacaccagcatccgctgcaggggaaaacgtttcttgctcccagcctgcgaatcagccgcaggaaccgcagatccgccattatacgctggatgaaatcgcagaatttcagaaaaatccggatattcaggaaatgctttttgtcgtggaaacctatatccggcatccattcagtgagaatgatatcaacacgatcttattctggcatgaagatcttcacttttctgccgaactgatcgtctatctggtggaatattgcgtcagcaaaggacatacaaatcttcgttatctgaataaagtggcactggcatggcatgagaaaaaaattacttctgtggaacaggccaaaagtgaagccgccgtccgcagcaaagcgtactacgccgtcatgaaagctttcggcatcacaggaagaaaccttatcgattccgaaacagccatgatccgcaaatggaccaaagaatacgcttttgatctgtcattgatccaggaagcctgtgcccgcaccatttccagtaccggtcagtcaagtttcagttatgccgattctattctgaccagctggtataatgacaaggtacattctctggaagatgtcaaacgcctcgacgctacccatcagcaaaagaaaaaggagagagccgcagcgaaagcaaatgcagccgcttctccgaagaaaaacaattttaataactttgaatcccgtgaaaatgactataagagtctggaagccatgcttttaaactctccgatccggtcataatcactcccatatcatctgttgagcaataaaaggagaatcaaatgccgctttccaatgcacagtatgatgagatcatgcatgaatacgatgagcgccaactgcataaccgtcatattctcgaaacacggcgtgcggaggttttaaaaaagcttccccgtctgaaggaaattgatgcaagtgttgcatcttcttccgtccgtcaggcgcgtctgcatcttgatggagacacccatgcactggcctccttaaagcaggaactaagtgccctgtctctggaacggcagcagctccttactgcaagcgggtatccggcagactatctggacccggtttatacctgtccggattgcaaagacagcgggtatatcgacgggaaaaaatgccactgttttaaacaggcaattatcaataccgtctatgcccagtccaacattcgccaaatactccgtattgaaaattttgacaatttccgctacgatttttattcgaaagaggaaaaaaatccgctgacaggactttcttcttatgaaaccgcacaaaaagcggtgcgggaatgtcattattttattgacgattttgatcacaagccaaaaaatctgctgttttacggaaaaaccggtgtcggaaaaacttttctgacaaactgtgttgccaaagaacttcttgaccacggatattccgtaatttactttacagcatttcaattatttgatatattaagcaaaggtgtgtttgaaaaagattccgatgcaattgccacacaccagaacattttcgactgcgatttgttagtcatcgacgacctgggaacagaactgattaactcttttacctcttcccagctgtttttgtgtgtgaatgaacggctgatccggcaaaaatccaccattatttctaccaacctaagtgtggaacggatcaaggagtcctattctgaacgaacattttcacgtattttagattcctatacgtttatcaatctgttcacagaagaagatatccgcaaacagaaacgcacacgcatcatttccagataataccccatagttatgggtctattatatgcatatatgtttatcaattaatttaaacctggaggaaaatcatgccaaacgacgaaagaattttggaaaccatgccaaccggtactctcggactgattccgactgcaagctgtatggaattaggaaaaaaagtagacagctatctgtccacctggagagagcatcgcgaacacgagcatcacaacgatattgctttcaaggaatatcacaaagagagctacatcatcgagcctcatattccacgatttggttccggagaagcgaaatgtgttatcaatcagtctgtccggggctatgacctctatatcatggtagatgttacgaactacagcatgacctattcactctgcggacataccaatcatatgtctccagatgatcactttgcggatttaaagcgtgtcattgctgcagtcggcggaaaagcccgccgtatcactgtcattcttccattcctgtacgaaagccgtcagcacagaagaactgcccgtgaatctcttgactgcccattagcactgcaggagctttacaatatgggaatcgacaacatcatcacatttgatgctcacgatcctcgtgttatgaatgcgattcctctgaatggctttgagaatgtaatgccttcctatcagttcatcaaaggtatcttaaagaacgtaaaggatctgaccattgatgccgagcatctgatgatcatcagcccggacgaaggtgccaccaaccgtgcaatttaccttgcaaacgtacttggcattgatatgggtatgttttacaagagacgtgacttcagccgtgtcgtagacggacgtaacccgatcgttgcccatgaattcttaggctccaacgtcgaaggcaaagatgtactgatcattgatgatatgatttcctccggcgaaagcatgattgacactgcacgtgaattaaagaagcgtaaagcaaaccgtattttcgttgtttctacgttcggattattcacaaacggacttgcttctttcgataaagcatacgaagaaggcctgatttaccgtgtagtaaccacaaacctgatttatcagactccggagcttctctcccgtgagtactatatcagctgcgatatgagtaaatatattgcatatatcattgatactttaaatcatgattcttctatcagcgatctgttgaatccatacgatcgtatcaagaattatgtaaagaagtacaacgatgcaaaaaatgcgtaattatttcatgacaatctcataaaaaaacgcagacgaaaagcgtgtgaaaattttctggttttcacacgcttttgttctgcattacagccctgaactatttcttttcatcctcgatgatatgcccgttgtcaagattcggctgtataaacatttcccttgcatattccattaaagtttcagaatattctgctgtatgctcgttacgtttcataatctgtgccagatgcaccccgtgttctacccacgctttgccgtctgtagcggcgtttaacatcataggctgtagattatccatcacacgcgcgaactttgcttctggcgtcttctgtgcctcaaattcaagccacagatcatacagcatctttccctgctcttccggaagaagaccataaatccggtcggccgcttttttctcccggtcagcctgtgtcttctttccctcctcatcataagcataagtatctccggcatcaatctccaccagatcatggattaaaagcatgccgattgtatgaagcacatcaatcggttcattcgcatactcgctgagcaacatggtcatgatcgccatatgccaggcatgctccgcatcattttcctttcgcctgccatccgataaataggtttgtctcccaataaatttttccctgtcaatttcccggataaaagcaaactgctggtctaagcgcttttttgtgttttcgtccatattgttttcctcttttctatttctaatttcatgctcacctgattttgaaaaggaagtgacctccatgatggctctgtcactcccttccaatagtgttattattttgtttttattcctgctcatccagtacggatgtacagtgcggacatctggttgccctgatatcaatttccgaataacagaatggacatttttttgttgtcggttccggcttttcttcctccatacctgctaacgtgctcagtttttctgtgatctggttgataactttcaacataataaaaatcacaagtgccgtgatcagaaaattgattactgcagtaataaaattgccataatgcagaaccggtgcattttctcctgttccaagcgtaaccgtaaggtaagaaaagtccgtgcctccgaaaattcccaggatcggagtcaggatatctgcattcagggatgtcacaatggacgtaaatgcgccgccgacaataacaccgaccgccatatccatcacatttccacgcagaataaacttcttgaactctccaaagaatttgctttgccttttcattggtaaaaaacctccttattttttcccgaagcggaacagtcctttcttttcgtatggctcattggaactgccggtcatctcataaccaatttcatggattactttctttgcccacggaatatcaatcggctcttcgctgatgataaccgtctccccatcccgtgcggaagatgtcactttctttattttaaaatttttgcggatcacatcattcatgtgggattcacacattccacacatcatgccgtcaatttttaaggttgttttgatcattgtgtctgctccttttgtattatctgaaagatttttattttttcacttatgttatacccctatagggtatttgtcaaatattctgtggttgtaactctgagaccgttttacgtgtccaaaaaacttgacagaaaatatttatgatgatcgtatattgattttggagaaattgatgctcttttaaattagttccttaacagaacggaaaccttatccgctctccaaatcacatattttataaatttaaaaaatccgcatcggcaaaaccggcgcggattctcacttttaagtataaaaacccccatctgccttcacagatgagggttctcattgacaaattttaaactaactcaagtaatacttccagagcgccgtcacctttacgctgaccaatctttacgattcttgtgtaaccaccgttacggtctgcatactttggtgcgatctcatcaaataacttagcaacaaggtcaacttcctttgtgcccttcttggttccgtcatttgtctttactgtgtaaagaactttaagcatttctcttcttgcatgaagacgggaaggctgatccttcttaatcttcttctctacttcgtcataaacagtaactttcttaccatcaacaacttcttttactctcttgccgtctgcatctttacgagcaaccttagcagtaacagtaacttcgtcaaagttgtctttctcacgaacagcagcagcgatcaggccttctgcaaccttacggatttccttagcctttgcttctgttgttacgatcttgccattagcgatcagagcagtaacctgacctctgattaaagcctttctctggctggatgttctgcttaacttacgatactttgccattttaattttcctccatttgtggggtatcctgccatactctttggatttaccggcagaacccattcttaattctgtggcatttcaaaccacaagccataaatgttctatgacgttgtcacactcatcgggattactgacaccgccagtttttattattcttcaccctgatttaactgtaaacctaactctttgagttttgcaagtacttcttcaagagacttgcggccaaggttacgaaccttcatcatatcttccggagtacggttgataagctctgcaaccgtattgataccagctctcttcagacagttgtaagaacgaacagataattccagttcatcgatattcatctcaagaaccttctcctgtgtatcgttctctttctcaaccatgatctctgcctgctgtgcagcatctgacagatcaatgaagagatttaagtgctcactcaatactttcgcagcaaggctgactgcctcatctggctctaaagttccattggtatatacatccaatgtaagcttatcataatcagtaacctgacctacacgagtattctcaatcgttacatttacacgatctaccggtgtatagatagaatcgattgcgatcacaccaattggtgtatcctctgtcttattcttatctgcgctgacatatcctctgccctttgtaatggtaagttccatatagagcttgcagtctgcaccaccgtttaaatgtgcgatctccaattcaggattcatgatttcgatatccgaatcgacctggatatctgcagctgtaacaacgccttccccttcgaattcaatgtaagcaacttttggttcatttgtagaactgttattgcggatagcgaggttcttgatgttcataataatttcagtaacatcttccttaacgcccgggattgaactgaattcatggagaactccgtcaatcttcacctggcttacagcagctcccggtaaagaagaaagcataattcttcttaaagagttgccaagtgtagtaccatatcctctttccaaaggctctacaacaaatttgccatatgtcttgtcttctgaaatttcagcgatctcaatttttggtttttcaaaatcgaacactacaaagtccctccttctcgggtttacgatgcgttaaactaattacttagaatataactcgacgataagcatctcgtttactggaacgtcgatctgctcacgggatggtaactcttttacagttccctgcagcttctctgcgtcgatatctaaccattctggaacgattcttccaccagcaacctcaacgatgtctttcatacgctgaatgttcttcttgctttccttaatctcaacaacatcgccagccttaaccaggtaagaaggaatgtttacaaccttaccgtttacggttacgaacttgtggtcaacgatctgtcttgcttccttacgggttcttgcgaatccaagacggaatactacgttgtcaagtcttgactcaaggattgtcatcaggtttggacctgttaatcctctcatcttatctgctctcttatagtaattacggaaaggcttctctaatacaccatagatgaatttagccttctgcttttctcttaactgaagtccgtactcagataccttacggtttcctctctgaagatttctctttgacttcttatcatatcctaaataacttggctctaaaccaagggatctacatcttttcagtacaggtactttattcactgccatcttaatcgatacctcctaattaaactcttctacgctttggtggacggcatccgttatgtggtactggagtaacatccttgatggaaactacttcaagaccgcatgcggaaagggcacggatagcagcctcacgtcctgagcctggtcccttaaccataacatcaactgtcttcaaaccatgaattaaagctgcctttgtagcagtttctgctgccatctgtgcagcatatggagtagatttctttgaacctctaaatccaagaccaccagcactagcccatgataaagcgttaccttcagtatcagtaattgtcacgattgtgttattgaaagatgcctgaatgtgtgcctgtccgcgttcaacgtttttctttacgcgcttttttgttgttttctttgcaacgttcttagccatatctaaactaacctactttctctgattaaacttatttcttcttatttgctacagttctcttaggaccttttcttgttcttgcgtttgtcttagtcttctgaccacgaactggcagtccttttctgtgacggattccacgatagcatccgatctcctgaagtctcttaatattaagagcgatctctcttcttaaatcaccttctacagtctgtgtctcatcgatgactgcactgattctcttaacctcatcgtcagtaagatctctaacacgtgtgctaggatctacgtttgctgcttcaaggatacggtcagcacttgctctaccgattccgtagatgtaagtcagaccgatttctacacgtttttctcttggtaaatctacacctgcaatacgagccatgtgtgtttacacctccataaaatttttaagattatttagtagtcataaatacacctgcaaccgcgtattttcccgaaccctatccgtatacagctacggttgcacgtcctgaaatgtgtgcatacaaataggatttccatattcgcatatttgtcccatgccactcggtattatagcaaaaaagaccagactatgcctctgtttattatgaacagcgcaaattcactgcgctgcagccgcacataatgatttcatcgcaaatgcgatgctgctttcgccagtctgttataaactgactatagcgcacaaataacagggttcttctgtcaagaagtaattaaccctgtctctgtttgtgcttcggattctcacagataattctgatgcttccttttctcttgatgactttgcatttctcgcaaataggcttaactgatgatcttaccttcacagcaaatcctcctttctctataaaagccctgtttctgcggttttccgcatttttcaggtactttccaaaaagtgtccgaataatattatacacagacaccttgtggaagtcaacatattttttatttatctctccagatgattcttccctttgtcaggtcatatggggacatttcaattgttactttatctcccggcaggatacggataaaattcatacgaagttttccgctgatcgttgccagaatctggtgaccattctcaagttctactttaaaaaaagcgtttggcagtttttctactactacgccttccacttcaataacatctgcttttgacataactttctttcctcctgtatcgactcttttccattttcctgttgttaaaagagatttaaaaatccggctttcttttcctcttctgtcagagaaaggatctccggttttccatctgtaataagtatcgtattctcatagtgagcggataatgacttatcttccgtgacaacggtccactcatcatccatccagagtacatctttggttcccacattaatcatcggctccacggcaagtgtcatccccggtttcagcttaattcctctgcgaaaccgtgactgtctgaaattcgggatctccggttcttcatgcaaatggctgccaattccatgtccacaaagatcctcgaccactccatatccaaactgatttgcatagtcaccaattgctgcggaaatatcataaagatgatttccagctactgcttttttcattccttcgataaaggactgtctggtccgttcgatcagaagctttgcctcctcactcacttctccgactgcaacggttctcgccgcatctgaatgatagccttcataaataactcctgcatccagactgacaatatctccttctttgatgatcctttcgtctgtcggaatcccatgcaccacttcttcatttaccgaaacacaaatggacgccggatatccgcaataatttttaaatgaaggaatacatccatatccgcggatcatctcttcccccaaccggtcaatgtccaaagtagacatcccaggtttgatttctcttgcaagattctgatgcacggcagcgaggattttccccgcgcggcgcattttttcaatctcttcagcagatttgatcgttactttcatcttattcacctaagattgcaacaatatcggcaaacacttcatccattggcttggttccgtcaacggatttcagtattccctgtgccttgtaataatcgatcagtggctgtgtctgttcatgatatacagacagacgcttctgtacagtttccggcttgtcatcatcccgaagtacggtttctgctccacaggcatcacacttgccttccacctttgtcggattaaatacgatatgatatgttgccccgcaatttaagcaggcacgtcttccacccatacgttttacaatattctcatccggaacatcaacatcaattgcataatccatcgtctggctgattttctttaatgctgcatctaaagcttccgcctgtggaattgttcttggaaatccgtccagaacaaatccgtttttgcagtcatcctgctggatacgatccataaccagatcacaggtcagttcatctggcacaagtgcaccctgatccatatatgtttttgctttttttcctaactctgtaccatttttgatatttgcacggaaaatatcaccggtggaaatatgaggaatctggtattttgcagcaatctgctttgcctgtgttccttttcctgcccccggagcccctaacataataatcttcatatcatttctccatttctgttattaaacacgatatatttttatatagaagaattgctccccgtatcataagggaaatggagataccggaatccagtatctccaaaatataattagtcgttcaaaaatcccttgtaatagcgaactctcatctgtgactcaacctgcttaattgtctcaataacaacaccgacaataatgatgattgatgtaccaccgaaagaaacatctgccttaaatacaccgttgaagaaaattggaataaatgcaacgatggacagaccaactgctccgatgaatacaatgtagttgagtatctgatttaaataatcactggtaggctttccaggacggatacccggaataaaaccaccggctttcttcatattgtttgcaatctccaaaggattgaatgtaatctgtgtatagaaatatgcaaacgcgataattaacagaatataaaccacaagtccgatactgtagatcggctcttccggattgcaccagttagactgggacattccctttaagatcttgcttccgatacctgttccattaccttttccaagaatcgctgcgataatcactggtgtctgtaacagtgactgtgcaaagatgacagggattacaccgccggtattgaccttaagcggaatgtgtgtggactgaccacccacctgttttcttccctgcagcttcttggaatactgaactgggattctacgctctgcatcctgaagtactactacgaatactaccattgcaacgatgattgcaataatgatcaggcctgccacgattccctttggaatggatttgttcgcaatgaactgactccaaagagttcccatatcttccggcatacgtgaaatgatgttgataaccaatacaatggaaataccatttccgatacctttctctgtgatgcgctcaccaatccacataagaactgcagatcctgccgtaagtcctgtaataacctcaataacggctaaaggtccctgtccggtgagatatccaccacggtaaaaaccgattgtcattgctatagactgaatcaatgcaagaacgatggtcacataacgggtaagtgcaaccatcttctttcttccctcttctccgtcacgctgaatttcttcaagcttcggaatcgcaatggtaagcagctgaataatgatggatgaagtaatgtacggtgtaatattcagtgcgaatacagacatattcaggaaagaaccacctgtaatcgcattgaaaaatccaagtccgtctgcagactggcttgcccaccactgtttaaacacttccccatcaacccccggagccggaagttcacttccgatccggatgatgatcagcatcaaaaaagtaaaaagaattcgatctcgaatgtcctttactttaaatgcattacgcagtgtcttaaacattagatcacctcagcttttccaccaagagcttcaatcttctccttggcactagcactgaaagcgttagcctggactgtaagcttcttagtaaattctccatttccaagaatctttacgccgtctcttgggttcttaacgatacctgcttcgatcagtgtatctactgatactacagtgtcattatcgaatttctcaagagctgaaagattaattccgatgatttccttagagtttctgcacttgaaacctctctttggtaatcttctgtataatggcatctggccaccttcgaaccctggtcttggtgctccagaacgagccttctgacccttatggcccttaccagcagtcttgccatttcctgaaccgtgtccacgacctcttctgaagttatcgctgtgtacggagccttctgctgcttttaaactagataaatccattttggcacctccttattttattctatgcttcttctacgttaacgtatggtgcaaccttgcgaagcgcgccctgtgtagctgcgttgtttggtaactctacagtcttgtgtaacttagttaatccaagagcttcgattgtcttcttgttcttcggaacagcaccgattgttgacttaataagtgtaacttttactttatctgccatgacttagtcgctcctccttaacctaagatttcttctacagatttaccgcgaagtcttgcaacttcttccgggcttcttaactgagaaagtgcctcgatagtagcaagtacaacgttctgcttattatttgatcctaatgattttgtacggatatttgtgatacctgcaagctcacatacggaacgagccggaccacctgcgatgataccagtaccttcaggagacttctttaataatacggaagcacctgtgtattttcctgttacatcatgtgtaatagagttattctcgtctaatttaacactgatgaggctcttaattgcatcttcttttcctttgcggattgcttcaggaatttcagcagcctttccaagacctgcaccaacatgaccattcttgtcaccaacaacaacgagagctgtgaagcgcatgttacgtccacccttaacgacctttgttacacgcttgatgtcaacaacctggtcaactaattctaattgactcgcatcaatgatttcacgtttcatgtttgtctcctcctaaaactctaaaccagcttctcttgctgcttcagctaatgcctttaccttgcctgcgtaaataaaaccgcctcgatcgaagacaactgtggtaatacccttatctaatgctttctttgcaataacagtaccaagttttgctgctgcatcaacgttattagtcttctcaagctctgcctttaaatctttatccagagttgaagcagaaacaagtgtatttccaactgtatcatcaataatctgagcatacatatggttattacttctgaatacagctaaacgaggacgctctgctgtacctgcaagatgattacgcattctgctatgcttcttttcacgaacttctgttcttgactttttactaaccatttcttgtccactcctttaattatttcttaccagtcttaccaactttacgtctaataacttcatcagcatacttgatacccttgcccttatatggctcaggtcttctcttatctctgatttcagctgcgtactggccaactttttctttgtcaatacctttaacgataatcttgttatcttcaacaactgcctcaagtccttctggatcttccatctcaaccggatgagaatatccaaggtgaagtgttaacttctttccggacttctgtgctctataacctacaccgtttacctcaagggtcttggtgtaaccatcagttacaccaacaaccatgttgtttatcagtgttcttgttaatccgtgtaaggatttcattttctttaaatcgtttggtcttgtaactacgacttcagagccctcaaccttaatatccatctctgatggaagagttctctccaaagtaccctttggaccttttacagtcacatgattattttctgcgatctcaactgttactccagctggaattgcgattggcattcttcctatacgtgacatgcccgtacctcctgtatttattggatgttaatagtttctatctggttttgactaccatacaaatgctaatacttcgccaccaacctgaagctttcttgcttccttgtcggtaacgattccctggttcgtagaaaggattgcgattcctaatccaccaagtacactcgggatttcatccttgccagcgtatacacgtaaacctggcttggaaattctcttaattcctgtaatgatcttctcattcttatcagcgccatacttcaatgtgacacggattgtcttgaagttaccatcctcgatgatgtcatacttctcgatgaaaccttcatcaacaaggatgccagcgatagcaactttgatcttagaagctggaatatctactgtatcatgttttgcagtatttgcattacggattcttgtaagcatatctgcaattggatcacttgtcatcatcatgacatttttcctccttttggactacaacttttctcttaaaggtttaccaggatgccttcttaacgcctggaatctgacctttatatgctaactcacggaaacatactctacagattccgtattttcttaaaactgaatgtggacgtccacaaattctgcaacgtgtatattctctggtagagaattttggtttacgctgctgtttaattttcatacttgtcttagccattaaaaattccctcctgattatttagcaaatggcatgttaaacagagttaataactcacgtgcctcttcatctgtctttgcagttgtaacgaagatgatatccataccacgaaccttatctaccttatcgtactcgatctctgggaagataatctgctctttgataccaagtgcgtagtttccacgtccgtcaaatgcgtttggattaacaccacggaagtcacgtacacgaggtaatgctaagttgatcagacgatcagcgaactcatacatcttctcgccacgtaaggtaaccttacatccgattggcatgttctctctgatcttgaagtttgcgatcgcgttcttagcctttgttgtaacagccttctgacctgtgatagcctccatgtcctttacagctgcctcaagaagctttgcgttctccttagcctcaccaacacccatgttaactacgatcttgtcaagctttggaacctccattgtattcttgtatccgaactttttgatcattgcgtctttgatctcattttcgtactgctctttaagtctactcaatgttttgtcctcctctcttcaattaatcgataacatcgcctgttgatttcgcataacgtactttcttgtctccgtccatcttgaaacctacacgggtagcttttcctttgtgaaggaacattacgtttgatgcatcaataggtccttcctgatgaaggattccgccctgctggtttgccatgcttggctttgcatgcttggtaaccatgttaacgccttcaacgaggagtgtgttgtcttttttatttacggcaataaccttgccctctttgtctttatctctgccagcgataacttttaccatatcgccttttttgatcttcatacttgccatcttcgttcctcctataatacttctggagccagagaaacaattttcatgaactgtttctcacgaagctcacgagctactggtccaaagatacgagttcctctcggagttttgtcgtccttgataataactgctgcgttctcatcaaacttaatataggaaccatctttacgacgggcaccctttactgaacgaacaactacggcttttacaacatcgccctttttaacaacaccgcctggtgttgcatctttaacagtagcaacgatcacatcgccgatgttcgcatatcttctggtagatccacccattacgcggataacaagtaactcttttgcgccagtattgtccgcaactttgagtctgctttcctgctgtaccatgcttgtagcctccttttattattttgctctttccatgatttctacaagtctccatctcttatctttagataatggtcttgtttccataactctgacggtatcgccgatcttagcatcgttgttctcgtcatgagcctttaacttataagtctttttaacgatcttgttgtacagtggatgtctctcgttgttctttacagctacaacgattgtcttatccatcttatcgcttacaacaacacctacacgtgtttttctaagatttctttcttccacgaccgaagtctcctttctgagaattggatttattcagcaacgctagctttctcggtgataacagtctgaattctagcaatattcttgcgaacttctttaattctggctgtattatctaactgattggttgcattctggaatctcaaattgaaaagttccttttttgcatcaactaactgtgactgtaaatctgcaacagtaagtgactttaattcttctaaatatgcactagttttcatttgactcaccgccttctaaatctgcacgtgaaactactttacatttgcaaggtaatttatgtgtagcaagacgtaaagcttctttcgctacgtcttccggaacaccggagatttcaaataatactctacctggtttaactacagctacccaatactcaagggcaccctttcctttacccattcgaacacccataggcttatgagttacaggcttctctgggaagatcttgatccagactttaccaccacgcttgatatatcttgtcatagcaacacgggctgcctcgatctgatttgccttaatccagcaaggctctaatgatacgataccatactcaccgtatgtgatcttgtttcctctggttgctttaccagccatggaaccacggaactgtttacgatgttttactctctttggcattaacataattactgagctcctccttccttattagcctttgtaggaagcacttcgccacggtagatccaaaccttaacacctactttaccgtaagtggtatctgcctctgcgaatccataatcgatatctgcacgaagtgtctgaagcggtatagttccttcagagtagaactctgtacgggccatatcagctccaccaagacgtcctgagcaggaagtcttaattccctttgcaccggtcttcattgcacgacccatgcaggacttcattgctctacggaaagaaacacggttctcaagctgtaaagcgatgttctcagctactaactgagcgtcacgatctggtctctttacttctttgatatctacaactaacttcttatctgtaagtttctgaacttctgccttgatcttttcgatctcagcgccgcccttaccaattacaacacctggcttagctgtgtaaatgataaccttcacacgatctgatgctctttcgatctcaatcttagaaacaccagctgcgtataattttttcttcagaaatgttctgatattgtaatcttctactaagtaatcagcgaaatctccatctgcataccatttagaatcccaatctttgataacgccgactcttaatccatgaggattaaccttctgtcccatgattgcctcctatctttcatcgagcacgattgtaatgtggctcattctcttttcgattctataagctctaccctgtgcacgaggatgaattctcttcattgttggtcccttatttgcgtagcactctgctacataaaggttttctgccttcattccgttattgttctcagcgttagcgattgctgactttaataacttctctacaacgcttgaagcgtatcttgggttgtaggatacgattgcaagtgcagtcgcaacatccttaccacgaattgcatctaatacgaagcaagccttctgtactgacactctagcataagataacttagctgaaggtcttgtgtcctttacttcgtttctctctctcttgatctgggatctatgtccttttgccatggatgaaacctccttccactaaatattattttatctcacgcctgatttcttttcgtcttttccatgtcctctgtaagttcttgttgcaacgaactcaccgagcttatgtccaaccatgtcctctgtaacatataccggaacatgctttcttccgtcatgaacagcgattgtgtgtccaacgaaagatgggaaaatagtagaacgacgggaccaggtcttaattacggacttgtctccggaagcgttcatagcatctacttttttgagtaagctctcatcagcaaatggtccttttttaagtgaacgtgccatttcataaacctcctaattatttgatagctctaccgtctcttcttcttacgataagcttgttagactgcttgttcttctttctggtctttaaaccaagtgcaggcttgccccatggagtacatggtcctggacgacctaccggagccttaccttcaccaccaccgtgtggatggtcattagggttcataacagaaccacgaactgttgggcggatacccatgtgacgcttacgtccagccttaccaatatttacgaggttgtggtcaccgtttccgataacaccgattgttgctctacactgaattggaaccattctcatctcgcctgaaggaagacgaagtgttgcatactttccttccttagccatcagctgtgcgctgagtccggcagaacgtactaactgtccgcccttacctggcagtaactcgatgttgtggatctgtgtaccaaccggaatattctcaagtggtaaacagtttccaactcttacctctgcttctggtccgttcataaccttcataccgtcggttaatcctgcaggagcaaggatatatgctttctcaccatctgcatagcagatcagtgcgatatttgctgttctattcggatcgtattcaacaccgattacggttgccggaataccatcttttcttctcttaaagtcgatgattctgtattttcttctgtttccaccaccctggtgtctaactgtgattttaccctgattgttacgaccagcgttcttctttaaagaagttgtaagggatttctcaggagttgtcttagtgatctcagagaaatcagaaccagtcatatttcttctggaaggtgtatatgggttatatgtcttaattcccattgtttttctcctttcgatgttttcattatcgtgtcatcgctgacacatagttcgtggtgcatctctgatgcatcacctacgcacttgcttgcgaagcaactcttatgcaagtgctccttgtggaattataatccagcgaagatctcgatatccttgctgtcctctgttaactgaacgattgctttctttgtcttagcagtctttcctgttaccattccacgtcttctgttcttgccttcacaattcattgtgttgaccttggcaacctttgttccctcgaacattctctctacggcttccttgatcatagttttgtttgcatccggatgaacaagaaatgtatatttcttctcagccattgcattcatactcttctcagttactactggtttgaggattacatcataatactgtacgtttgccattatgcatacacctcctcgattgttgcaagagcagcctttgtaacaactaccttgtcatactttaatgcatcaaatacattcagctcgtttgtctgagcagtcttaacagttggaatatttgctgcagatgcgatcacgtttgtgtccatgtcgtttaatacaacaagtgccttctcaactttcagattgtccataacctgtacgaacttctttgtcttaatttcatctaatttcagctcatcaacaactacgaacttgttctctgctaccttagaagtcagaacagactttaatgcagctctcttctctttcttgttgagcttgaatgagtaatctcttggtgttggagcaaatacaactccgccgcctgtccactgtggagaacgtgtagatccctgtcttgcatgaccggttcccttctgtctccatggttttcttccgccaccgcgaacttcagaacgtgtcttagccttctgtgttccctgacgattatttgcaagctgctgaagcacagccatatgaactaaatgctcattaatttctacgccgaaaatggaatcgtttaattcgatagaatcaacttctttaccttccatattataaacagctactttagccatcgtaaagttcctcctttcttactttgcactatttaccagactttgtggtctcttttactgtgatgagagctttctttgctcctgggacagcacccttgatcagcagtaagttgttctctgcgtcaactcttacaacttcaagattctgagttgtaacttttacgctacccatgtgtccaggcattccttttcccttgaatacacggctcggagaagaacatgcaccgttagaaccctgatgacgatggaacttagaaccatgagccatcggtcctctgtgctgacctaatctcttaatagcaccctggaaacctttaccttttgaaatagcagtaacatcaaccttgtcaccttctgcgaagatgtcagctttgatttcatctgctaacttatactcgtctgcattctcaaacttgaactcgcgaacgaatctcttaccagatacaccagctttagcgaagtgacccatctgagccttgtttacgccatgtctgttgcgaatttctttctttccgttggcatctttgttaacagtcttttctttcttgtcaacaaatccaacctgaactgcactgtatccatcgttgtctactgtcttaatctgagtaacaacacaaggaccagcctgtaatacagtaaccggcactaatacgccgtctgcattgaagatctgtgtcattccgacttttgttgctaaaatcgctttcttcattgtttaacctcctgttttctacagcggaacgcctcttgcccacctgctgatctgcagtggagtagcggaaccgttcatcctagagcagccatatctatatgaaataactaatcaggacttacgaaataatttgtcgaaacagttattatttctgtttcattttaatatcgatgtaaacacctgccggcatctcaagacgtgataaagcatcaacagtcttctgagttggtgtaacgatatcaatcagtctcttatgagttctctgctcgaactgttcacgggaatctttgtacttgtgagtagctctaagaattgtaactacttccttcttagtaggaagaggtaccggtccgctcacctgtgatccgttcttctttacagtctcgatgattttctttgctgatgaatcaactaattcgtgatcataagccttgagagtgattctcattacttgacttgccataaaaaaagtcgcctccttttcgcactttgtaaatagtacgacaagcggtgactgtacacttctccgtgtgtgtcctgcggtacatctctgatgtatcgccccatcgtcaggcgattcgcattttttcacacgttgtttctatctttgatagaccatattgtttgtacagtgacttgtcgtcagtttcctaacttgacattcgctccacggaaaacctgccacataggcagcaacctcacgtttcacagctatcatgccacagcaattgatattatacatggtctttcccaaaaaagcaagaacttttttgattttctgtcaaaaaagagaaaaatgaaaaggagcatcctatttcattccttttataataggaagatactcctttataccacgattactctttctcaattatttctctgatcctgtctgcttcctcgcgggacagtttatttttttcacaccaggcagacaaaaatgcggatggttttccgtcaaaccaaaactccagctgctgttgtaacaactcatccctataggctgccagacttttttccggatgaatatatgccgcttttcctttacggtaagttgttgcaaagcctttgtctacaatcttatgaacaaatgtcacaacagttgtacgtgcgtagttctttttatatcgatctgccagttcgcgaatcaggtcttgcaatgcaatatcttctttcgcatcccagattactttcatgatcattgtttcacaagcacttaaatctcccataaatgattccatgtcgttcatcctccgtttaattattccatcgttaggtacattctatcattttatgtcacaaatgcaatatttttttgtctaaaaatttctttttctttcaaaatccgtcatgcagaaatttaatcattgattattttttctatttttcatataatgttactgttttatacagatggaaatcaggaggatatgatatatgtggttagcagatcaatggaatgactatgaagtgatcgattgttcaaaaggtgaaaagctcgaacgctggggagattatcttctcgtccgcccagatccccaggtaatctgggatactccgaaaaaagaaaaaggatggcgcaaaatgaacggccactaccaccgcagttccaaaggaggtggagaatgggaatttttccagcttccaaaagaatggaccattcaatattccctgcctattaataagaagttaacgtttcatttaaaacctttcagttttaaacataccggattatttccggaacaggctgccaactggaactggttttcccagctcattgcagacgccgtttccaaaggacgccaggttaaggttcttaatcttttcgcctataccggtggggcaacacttgcggccgctgcggcaggtgcaagcgtaacccatgtagatgcatccaaaggcatggtcacctgggcaaaggaaaatgcaatttcttccggtctgaaagatgccccgatccggtggttggtcgatgactgtgtcaaatttgtagagcgggaaatccgtcgtgggaaccattatgatgccattatcatggacccgccgtcttacggtcgcggaccaaaaggggaaatctggaaaatagaagagagcgtttatccgctcatccagctctgcagccagattttaacggacaatccgctcttcttcctgattaactcatataccaccggtctgcagccggcagttctttcctatatgataagcacggtgcttggcaccgccaatggtacagtcaccgccagcgagatcggtcttccggtttcctccaacggactggttcttccatgtggtgccagtgggcgctacgaagctaccgggatttaaccaatcccttttctttccactttccgctcttccagcgaaggtacatgccaacggcacggacgcattcatcaccagtcataccgatgtatgcgcccacggccagaaggcccagacggattccaaacagatacgttcccccaactgaacacaaaatcataaagcaggcacccatcactaccgggaatacggcatccccacttgtctttaatgcctgtccgtacaccagattggttacacggcctatctcaagtacgatgtcaattgccagaagtttaccgacaagcgacaccatctgcggatctttggaaaacagctgcataatccagccggaacaaagcgtaaacaccgtctccagaataactgcaacaatcactccgatcaccgctgcttttttcgttccacggtcacacgcatcatactctttcgcaccgatatgccatcccgtcataattgcatttgcctgtgcaagtgccgcacctacacaataggaaaaatttgtgatctgcattgtgtaggaacgcgctgtcacattaagcccctgtgcatccatctgattcaggaaacggatcaccagcgtcatggaaacgttatagatcgccgtctcgcatgcggacggaagcccgatacggatgatctgtcccatcactgcccggttgctctctctctccggatgctgttttgctttcaccaaaacagcaccaagcagtacaacaatcaccagattgatgatgcgtgagatcaccgtggcggtagcaacacccgctacccctttgtgcagtacaaacaggaaaaatgcattcaggcaaaaattaataacattaccgataatggatgcatacaacggttccttcgaaaaaccaaatgcccgaagataactcgagcagatgggaatcagtgcatttaaaatacaaaatccgcccacgatctgcagataagttttcgccggctgcatcagcgcatctgccacaccgaccccagagagaatggtccctgcaccgagtgataagaacagagacattattacgccaagcgctgcattaaataccagtccaagctgtctggcctgatatgccacccccggcctgcccgccccgatattctgcgtcatgacggccaccattccggaggaaatcacagaaaacataataataaaaatccctatatatgtattcgcagttcccaccgcccctaccgcctgatcatttacagacgaaagcatcagggtatcaaccattcccgaaagcatatacaaaagtgtttccagacaaatgggaataaaaagctgcgttaaattttttctcctctgttccatttatggtatctcctttctttcgtattcattttatgcccttttttcaaaaaatgcttgcattttatcgccttataattgcattatttctacttttccattataatttaggaaactgacagaaggagggacttcatgtatccggaactcaaggaaaaccgtccgcacggcacagacaattacccctatacacaatatcacatgcacaatattttccatgcttttcagattcccgtacactggcacgatgagcttgaagttatttacacgaaaaaaggacctttaaacctcctgattgacgggaaagaatatactgctgaggacggttcggtctattttgttgctccggggcagcttcatctgatgggatcggcagccggggatgtcgactactacaccctcctgtttcctctcgaatttatttcgtttcagtcggatgattctttggaacgggaacttttctttcccctgcggaaccacactctctcctttccctgtaaacttccagaggatcacgacacagcagcaaaggcatccgttctgcttgatcagatcatcaacgccaactctgaccgtattgctgcgaaccaaaaaaacggataccaaaaccagcttggcacccgcattcttctcctgaaacttgtgcttcttatggcagaacaggatctgttttatcccagccataccaaaagcaccagcagtctccagaaagagttgttatcttatattcagcaaaattactgttttcgcatttctctgcacgatctcgccggacatttccatatgtccgaaaaatatatctcccggtatttccgggaacatttccagcttacgctctcgcagtatatcacgtacctgcggttatcccacgcaaagcatctgctggaaaccacaagtctctccatcacagagacagcactgcagagcggctttccaaacgtaagctattttatccggacatttaaaaatacttttcatgtcccaccgctgcaataccgcaattcaatccgctagaggatacgcttctttcgcagaagaagcaggataatcacacaaatgatcaccataattccgatgataatagcaaatccgtgcgcagtattggcaaacgggacccagtgctcgttgacattcataccgtaaattccggaaataaccgtaggaatcgccataaccagcgtgatgactgtcagcgatttcatgatggaattcatccgattatcgatgaccgatgacaacaattctctggtaccgtttataatgtcacggtaaatacttgtcatctcaattgcctgctggttctctacgattacatccccgagcagttccttatcctccggatactgctccagccgcttgtatcttgtcagccggtcaagcactactccgttggcacgaagggatgtcgcaaagtagaccagtgtcgattccagttcatgcagcgcaatcagatccacttcctccgtatcatccccgacacgttcctcgatctccgtacgcatcttgtcgatgatgcgaagatcactctgataaagcaccgcaatccggtacaggatctgatagacaaaacgaagcttttttttcgtgctgaattcccggacacggttattcaaaaacgcctgaagaaccggtgtatcctccgtacagactgtaacgatctcacccgatgtaatcagaataccaagcggtatggtcgtatacgattctttttcatgacggatctcgatcgacgggatatcgaccaaaatgagcgtataaccatcctgtagctcgatacgggaactctcctcttcatcgagtgcggccagcacatcttcaacatccatatccagagcatccgcgaccatctgtccctccgcgacactggggtttaccatctgcacccatacaccatcctgaattgtcggttcttcatgaatctttcggtcatctgttctgtaatatttaaccaccggattcccctcctttcgtatcgtctgtacggaattatttactgtaatgtattatagcactctgtataactttcctaccagacttttattgcgaatcatggaaagattattcaaaaacagcacatcattcactttcttgtcctgtgcaagtttactgatacttcctgtccaataacggtaatccacgacatacaccgtctgataatgatcaaccagaaatggaataaatgcatttccgaacgattcttttacaacaatgcaggaacttccatccgacagatccttgttctcaatttccgtatatggattatcacttgcaataaacgtactgtatttcagtcccgcattgtaattcgaaacatcataaattaccggccagtcatattttttgccatccgatgccgtcacatggcatatgctctcagcatttgggtaatatgctgtcacagtatccggattcgccttcagctttgcatccgaagtatcattataaaaagatcccagaaatccgtcaaaatcctgttttttactatatgcatccagcgattccggcgtaatcccttttgctttacagaattccgtatatgcgtaataagcaccaagtgtcgtccaatgatgatccgtccgaaaatattcatactccgtccgatgctgcataagcacgtcatatacgtccacgttttttacatgtttgtccatttttgcctggatcttctgcattgcgtcatgctgatcggaagacgagattttgtctttcaaattatccggaaatgtaattcccgaactgaggggaatgacaagatcatacacatccgattttccggccagagtatccgctaccttatttacactttttgcataattgtctgctactttgtccagatatgtgtataactcatatgctgtatcatccactgtcacaacgcttttgtaatcttttatttttccatccgaagtgatggacggatattttgtttcctcttccgcttcctgcgtaacatcctgtgtggaatcctgtgtgcttttctgtgttgtggtctctgtttctgtcttatctattccttcttcctgcctgttcccgcaacccgaaaacaccgttacggcaagtatggcagcaaagattattttacttactctcttataaaccatttatcttacctcttttccattttaaattcttccgaccagtttatacagattccggtctgaaataaaatttgtaatattatagagaacgagtacatctgtaatcttatgttctttcatatattcctctatatttccattataataccgtaagtcaatcatagtaatctgtccatagttttctgttgcaaacggcacaaaggtgtttgcaaacgaatccttgatgacgagcagattgcgatcctgatgtctggcatggtctgatacaatctgtaccgttccgtaattatctccgaaaaagtatttatatttatccttttgactcagctgcgctgtatcgtaacagctgtccgtctgtttcttttcatcaattgtcagactgcagtcacttccgtatgtcttctgcttcgtatctccatacgtccagatactgtcatatgccgaatccgcatccagtattttggaatacaggcttccacggaattttttggttgcaacctgttttttcagatcagccagcggcgtgctctccatcccggtactgtcacaccatgtttcataggcaaggtaagcgccctcactcgtccagtgatgatccgttttgtaatagatataatcctcattatgggaaagcagtttttccctcacatctgtcacacgacagtccttcatctgtttttcaatttggtcaatatactttgcctgatcaaacagccttgcatgtgccggaagtttatcggccattaccagcccggatgacgggacaagcagaaaagatatccggtccttttctacattttcagaagcttttgcgaaaaaatcctgcaccgctttcacattgcgggcaatctgtttttcatccacatcttccggtgtgattttttcaaaatcatagccgtcttttcccacataagcccctccgatatctgtgtctttgcaggctttctgaattccggtttttaccgtgatccatccatcgcgaaaacagatctgatccctgagataattttcaagaccatcctgaaattttccactcaatatattgtcaaccgtcagtctgggcggttccgccagatatctgttttcgttcggtgagaactcacgatctttcatcagcaggcttccaccggataccagcgcaagaaacgcaacaaaaatgacaatcattgtcacactgatttttttcaatgatctatgcctcctaaaaacggaaatataaaaacggattgtaactgtctcctaccagaaatgcaaaggacaccagcaaaaacacaaccatgagaaccggctttgctatggtccatcctttcgacgttgcaatcgcatcgtaaacggtagcatcctttccctgctttaatctgcgcatccagacacggtaatcaatagatgccgcgatcaatgccaccagaagtaccgcattacttccaaggaaatataagaaatcagaatccgcaactgccacatgtccgattccaaacattgtctttaaatattctcccagctggtgaatatccgtctgtgcaaaaattgtccatccaataaccacgagaaacatgctgtaaatatgcccgatccaatttggaagtttatccagccatttaagcaggaacaacttttcaatcatgagaagcacaccataatacacaccccagagtacaaagttccagtttgccccgtgccacagaccggtcagcatccatacaaccataatattaaacagctgccgtaccagacccttacggtttcccccaagcggaatgtatacatactcgcggaaccaggaactcagggaaatatgccagcgtctccagaattccgtaattgtctttgacatatacgggaaattgaagttttccagaaaataaaatccaaacattctgcccagtccgatcgccatatccgaataccccgaaaaatcaaaataaatctgaaaactgtatgcaattgcaccaagccatgccgtagccaccgacatgtgattcagctgtgaaatggaattccacagacttccgatctgatttgccagaagcactttctttgccagacccacggaaaaacgaaatgctccttcggaaaaatcttccagcgtgacttttctgtgcatgagttctttttccaccgttttatactgcacaatcggtcctgcaatcagctgcggaaacagggttacataggttgcaaatgtaaggatgtttttctgtgccgcaacctccccgcgataaacatcaatcgtataggacattgtctgaaaggtataaaaagaaattccaatcggaagtgctatatgcagcagtgacaaccctgcccctgtaatggaattgatactcccgataacaaaatccgtgtacttaaaaaacccgaggatggcaaggtttccgcacagatcaacgatcagtgcggcttttgctttccccggacagtttttgtttttaaagtgctcgatcaaccgcccattcgcataatcaaatacaatcgaaaacagcatgattaatacatagaccggctctccccacgcataaaagaccagactaaaaaccaataaaacaaggtttctaagccttgccgggcagagatagtacagcaataatacgatcggtaaaaacgcaagtaaaaatacaaaactactaaaaaccattttatttaaacgccttttctataatttcttttgcctgatccgaatccccggacacacacagaaccacatactgatttttctgctccagcaccgcatttccaatccgttttgtctcttccggcacataatcctggaaagaatcggcctgatcatcaagatatttctggacatcttccatggtttcttttgcctgatttgaatcttttgcagtaaaaacacctacctcttctgccgtagaaccgcttccggcatacataacagaatcaacatcttccggtaaatctacaagcattgaaatttcatccgctgtcagttcctttaatgtatcatcatatttaatctctgttgcaagcgattttgcaagagcctgcgcatcaattgtctttgcttccccaccgcatcctgcaagtaaaagtactcctgctgtcagtactgccagcagtcctgtctttttcatcatcatattttccgatcctttctttttatacaccctgatatttctcactctgtacacgaatcagttcttcatcatcaaaataattgattttcatcgcctgttttacttcagaaagtgtctgtgctgcaacttcacgcgctgcatcacttccttttttcagaatttcatatactgccggaatgtctttctcaaattctgcccttcgcgcacgaatcggagccagctcttcctgaatgacgttgttcaggaattttttgatttttacatctccaagaccgcctctggtatagtgttcctttaattcatccagattatgatattccgggagatattcttcaaaatgctccggtttgctgaaggcatccagataggtaaatacacagtttccttccagatgtcccggatcagatatctgaatatgtgtcggatccgtgtacatactcataatcttttttttgacatcactttccgtatctgaaagataaatacagttccccagggatttgctcatcttctgttttccatcaattcccggcagacgcatacatgcctcattctccggaagcagcacatccggctccaccagcacctcatcataaatggaattgaatttacggacaatctcccttgtctgctcaatcattggaagctgatcttctcccgctggtacaaccgttgccttaaaagcagtaatatctgctgcctgactgatcggatatgtaaaaaatccaaccggaatactggtctcaaaattgcgcattttaatttctgacttaacagtcggattccgctgcagcctggaaacagttaccagattggcatagaaaaacgtaagctctgtcaattcggaaatctgtgactggacaaacaatgtggatttcgctggatccagccctgcagataaataatccagtgccacctctatgatattctgacgcaccttctccggattatcaaaattgtcggtcagtgcctgtgcatccgcaatcataataaaaatcttatcaaactctcccgaattctgtaattccactcttcttcgcagagatcctacatagtgtcccacatgcagtcttcctgtcgggcgatccccggttaatataatttttgccatctctatgcctcctgatttttctcagttactatatattttcgtgttatttttctaatttaatttatacactgtcaactgtagcaaatccacgttgcaatgtcaacggatgttgtgttaaaataagaatgaattaagatattaaacttcgtcaatttaaggaggtttgtttttatgaacgagaaaatatataaagcaatgggatcatcagccgtatcaagcctcgtgatcggaatctgtgtacttgccacaggaatcgccgcaggggttcttcttattataaacgggtcccgcttactaaagcataaatcaaaaattttattataatacttcaaatccggagaattttttcattctccgggttttttactctttattgtcaacccgttcgctcatcatcgttgacatttcattttttccatgctaaagtgaatgcatattgttaataattacacacaaggaaggtatttagcaaatgcatacaacaaaagaaaacgatccggttctctcccgcgaggaggctctttctattttaaacactccggacgatcagctggatgatctgatcgcccgtgctgaaaaactccggagaaaatataaaggaaatcacgtcagcatccatattctgaccaatgcccgcagcggcaactgttcccaggactgcgcatactgtgcacaatcctgccgttccaccgcagatattgaaaaatacaaatgggtttccgatgagaaactgtacaaggataacgattttgtcaatgaacaccatttaagccgccactgtatcggcttaagcggaatgaaatttacagatgaggaaattgaagaacttgccgaacgcatccgtgccatgaagaaaaccggcacacatctgtgctgttccattggatttttaacggaaaaacaggcacgcatgctctacgatgccggtcttgaccgtatcaaccacaacttaaacagcagccgcgcctattacagccatatctgctccacccacacctttgaccagcgtgttgaaaatattcatatgctgcagaagattggatttgaaatctgcagtggcggaatcatcggtatgggcgagagcaaagaagatgtggtagatatgctgatggaactgcgtgagatccagccggaagcactgccgatcaattttctgcttccgatcaagggaactccgttaggcgataaagatatttccggtctgaccacagaatactgcatgaaagtcctctgccttgcaagactgatggttccacagtcagatatccgctgtgccgccggccgtgaggtatatttcaaaggagaagaaaaaaagcttttaagtgtcgtcgattccatcttcgcctccggttatctgaccgccggtggacagggcatccaggataccatcaaaaccatcgaggatgccggctttacttatgagattgaatctgcataaagcttttaatcatgcggaatatcatgaaaacgccccgcaagttcttctgtccgcacaacattgataaaagcatggggatcaatctgacggataagcggaagcagctccctttttgcctcggaattaatgacggaataaatcagggtcttttgcttttcctcataacacccgattccctggaataacgttgcatcatggttggtccgttcccggatggcacgatagatttcattggatttatcagaaataataaacatcgtttccttctggtaacgcttgtacaatgcctgaatgatctgcgtgctgcagaactggtaaataatcgagtacaacgcaatcgaccagccgaacagggcacctgcaactacaagcatgagcacatttcctgccagaatataattccatgcatcaatgcccttctgctgtgataaaaagatgctgataaagtcggtgccacccgtggtggtgccgacatttaaacacagactgatggcaaatccattgatcagtccaccaaacacactgatcagcagcacatcctttgtaaacacatacgccggaagcatatctgtaaaaatactcgtcagtacaataacaataatagaatacagagtaaattttttcccgataaatttatatgcaatgtaagtaggaaccagattcagtccgatgttaaacaccgaaaacggtatactgacatggataaaatctaacccgatctgctgtagtaaaagtgacaatccggaaaatcctcccggaaacaggcctgccgttttggcaaaacagcgcagattccacgcatacaaaagtgaagcaaaaaacacaataaacaggcggaatacctgataaaatttcgggtgtttatattcaagtgactgaaacatccttttctccctctttctcatttttttgcattgtaacatattccgacaaaaaaagacagacctttacggcctgcctaccatctgccccattgggtaatatttttcatctccaattgcccactgaattccaagttctgcctttccattcccatcaaatccatagaatatataaccagtaatcatttctacatgatagatccccttatatcttccatttttctgtccggtttcaaacatcacatcccccggattcaatttcatattttgtatatttgcccgactcagacctccgctgacaagtttcttatgctgtacgcaccattttcccatatccgctgcaaccggtgcataatatgccattccaaaatttacaccattcttatgataagatttccacaccagagaactgcagtcgtaaaatttttcctgcatacgctttggctggctggttttatcaattgttacattagacaaatccagaaccatatccgttggactatcatcactgtcataccaatcatcattatcataggaatcaatattataaccatcttctgctttcacttctgccaccggtacgcagatacaggcacctgccataagtactgctgcaagcagacaataaaaccttttttcataaaaccatgctcctcttttgtatgtaatcttcaatagaattatcataccactacagaggtagtaaaatcaactatccaattttatccttccatcatttccagatactgccccttatcaatatgcatcatggaaatccggtttttaaaccgacggaatccatatacacagtccacattccggatcagagactgcaaacgctcatccggcacacagacaatcagctgcagatccatctttctggcatatttcagacagactgcgcttcgctcctgatccattttggaaaacgcctcatccagcagtaccagcttgattttggaatcccgcttactctgctgcatatacagcatggcaaatccagcaagcagtgctacatactttggattttgtccctcaccaccggaatccctgcccgccatatcatcgacaaagttttcccggatcacatttccatgttcatcggttacctgttcaaacatgctgaatgacagataatttctgtagtctgcgtactgttccatttctttgcgcttctgtgcccgcaaatgctcatcctcatctttcggcggcataaacttgtcggtcagaagtttgatcttctgctcatatttctgataaaatgcatcttctccgaaactgatctgaccgtcaattccggcattgtccagattcttgctgtcgagttcctctgccataagcatatcaaagaactgtccgttttcatttttggccggttcaattttaatctggtacgtgctgtctgagaaattggtttcccgcaacaggcggttgatctcatatgcgtgccgtttggctgctttgatatctccgtgaattgttgcaatgacattctcccggagactcttatagatggatgcacactttttttcaaattcttcttcgtatgccggctcaaaatccgtcctgtaccgttcaagcattttttcatatgcttcattggatttctcagctccgctgaattcactggccggatatgcaagaatatatttatttcgcgccatctgcagacgttctgcctgttcctgctccttatctgccagatctgcaatctctgccttcttcctgttaatcacggactgcccggattgcttttttaacaattcccacacttcctgttcgagttcttcattggcaatatatccctgcagcttttcctccagctgctgtcttctagactcattttctccggaaagctgcccataccggctggttagctttgccagctctgtctgcacttcatcgatctcagtctggatgtcccgcacctgcttctttaaagccttttccttctcttcgagttctttgtatgccccctcccgcaaaaagcggatcacttcttcgagttctttcttggttttatttacctttgcaagctcagcacccgccttggagagtttcacgtaatgagatggctcatctttcagacactcaaattctcttgcagcttttaatctgcgcagcagatgatccaattccgtctcctgtctgcttaaatcttccacatcgttttcatattctgtaagccgcgccttggaaacacggcgtccaatacacgctctggttgtatagtcttttttcttaagatgccggaaaataaaattgctgtacgaataacaatccggtgtcacaccatcccttacctgctccagttcctccacagacctgcatttcataatatgtcccagataccgtttcaggcatacatccacataagcatcctctgtctttactgcatcatataaagatccttccaaacaatccggctcactgtccgcaatcgccttggaattaattaaatccacattttcatattgcttcatgttgcgaaacaggactgctgcctcatgtgcatattgtggttccgtgatcagggaacgttttaatcttcccatgcgtccctcgatggcatttttccattcttcctcctgcacatcaaacagatcagcaaaaatctgcaccctgacagtcgttccatagcggtcactcagctgttgggataatgccgttcttgcagacctcagattctcctcatatggtttgcggttatgtttcatgtcatccaccagccgctttttttcttttaattcttttccgatctcgcgcctctgctcactgtaatcctccacttcattttcgatattctgcttggcagattcaatttttaaatgcaggttctggcacaattcctccgttacgtttccactgccaagttctgcaatcaaatttagaaccggattactgatataatcggtgatcacatcatcttcctcccagtttttcattccaagaaggatcttgttccactgtctcatattatccgcaagcatctggctgcgtgcatccagttcctcatactgctgctgttttccacccaaatcactggacttaagatctgcactgacctgaatcagttcctgttcggtttccccacgcacagcagaacgttcttttatctttccatgcagctgctcctgtttctctgcaatgatctttttatcctcttccgcggtctgaattcttgcccgcaaatcttcaattccaatgcagcggatcattgcctctgcccggatcttatcggactgcagacgcacgagttcctgcccggatgtctgaatatctgtcagtatctcgattcgttttctcagatcttctattttatctttgatctgccggtaagaatccaattgttcactaatcgtggcaatggtattggaagtgttctttggaaacatataatcacgaataaactgtcccgttccattggtcattttcagggcaattgcacttttttccatcgtgataaaacggttctgatcaatatacccgagaatcacatcatacagagttcccagatatgcctctttggaaccataaatgcggttgacttctccctttccgcggttgtcatcggattttgttctggcactgaccagctttttgatctcctgattggaatagcagacgccctgttccgtcagatattcagactccggcattttcccggagtgactgaaatacacaaattttttgatctcagaatctgattttcttacttcaaacgcaattccaatacaggttatcatatgggttccggtatcttcaatttccagagcaattacggaacagaaatcacagtctttacgattggcagatccgtctttttgttctccgcgcagataacttaacacacttctgcgattttttgcatcatccgctgctttattcagaaaactcggtgagaaacttccatacaaaatgacctggatggcatccatcactgtcgattttccagatccgctttttccactgaacaaattcacatattcatgaaactccagtaccttatgatcaatgcctccccagttgttaaggcacatccttgtaaaaactttttttgcctgactcaatttattcactcctcatttcgtcttgtgtttcccactgatcctgcgtcttttccgaatactctgcttccttttgttcttccgtttccccggtttctcccttgaacatttcaacgagctcattgatatctgccgctgaacagaaaatattaatggtactgtaaatataaatcggggaatcgtcttcgagatttccaatggcacttggcagttcgatcatctggtgtgttttcatcagaatcaatgcctcctgccactcctgagcggtcagtctgcgcgtaatcaagtttgtttcctttccatatcttcggatctccgcaagactggttgtcgtggcatgtagtccttctcccataattttatcccgataaatcaatttcataaggatcaccagtttcgttgttaaaagtgtcatacgctccgtcagcacgccatctcctgtaatccggaaaatatgttcctgcggatcatgaaccagttcacagtcaagcacctgcagataatctgcaataaattcccgatttctcgcacatacctgatagtgaggattatccttctggatcagagtaaccggatcacactttgtctgcaaaatacaggtctgccgaaacaaatcctgtatggtttttctaatattttccgcctcactctgcgagatattttccatgtattctaacatttctttttactctcctttttttgcatcgatcatcagtcttgagaaaacaaacccctgctctcctttgagctcaccctcgatgtgtaccatatcctcctgtctggtatcctccgtttcctcctgccacaaaaacagcagtttttccagatcttctacggactgaatcgtctgttcatccgtgacaaatctgccatccacgatatttttctgcctgaattcctgcaactgttttttcgtataaagcggctttggtacaaaatcggtcatctgagtctcctcgttgtgcttttccatcgcaatcgggtgaaatcctgcatcctccgcatttttccggttgtaaaaacttctatcggttatattcttaaactgtgttcccactctgatccggtcacgcatttgttctaacacctgtgggctgtttgcatgatgatccaacaaattaattaactttacaatatgatcttcatccgaagagccttcctgcagaatataatggattcgtgccagtgcacgcttggcaaagacagttttctgttcgatcagcttgttatattttttttcgatcagatcaaattcccgctccacctgatatacaagctgactggcactttcacaatattccagacgatactggtttcttttgctggtaacagttccctccacaagtccggtacgctcttttacaagctgttcccttttttggtcattttcgcgaagaatctggctgaccagttctttaactgcttccttataacggtaaaagctgtctgttgtcgtaagaattgcatattttttactgtcacggttgttaatttcctctaccagaactttctgaattccaataaaattttttttctgcgacaattcctcaaaataggaacgcattccatcctgcatattggaaagaagctgccccagccgtctggacgtctggagtgcgttttttaaaatatcattatttttttctgtatccgaatgatacgtaaacaaagcactgtaaatcgaaaggatactttccctctcccggctgtcatcttctgtctgaagcttctgaaacaattccgtaaacagctgactgtattccgggaaagaaataatatacgtatttaacttttcatcaaaatcgctttttaaccatccccaccgaatcaaggtattcaatatgccagacggcgaatcttccggaaataaggtatccggctcgtcctcttcttctatttcctcatcctcccagataatccttgcctttgcaattgtatctgcaataatcacacggcattcctctatcgtcaatccaagtgctgtatacacttcattattttcctcataaattgccacaagaaactgcatatatgcatcacggtttttcgtgcgaaatagtttataaaattcctttggaattttcttttttaaaatcatgaatgaatttcctctttattttctacaacagccgttcctgttctatcgtcagacctgacttaagtattgcttcctttaatggttccgaaaccagatcacaaatcgtcttcaaaaaccgaacttcctttggagagaaaaaaccatgacaaaatatataaagagtatcttttctataagacatgtcctcatagtttgctttattttcaattgtcatgattcttttgcaacctgacagggcatacgcccttgcatgttccattgtctgtgtatttataatcgttccataaatctgtgatgaagaatcaattactttttcatcatttataatatactgcagtgtgcctttccactcaagcgtctgcgcataagaatgaatattatgcgcatccagcagttcatcatcactcatttcctctatataaaatggggattttgcttttaaaacagacagtattctatcctcataatttttttggaaacatttggaattgtgaaggacacgcgcactgaacacccatttccagatgtgttccttttgatgtgcaactgcatctatacatacaaaaaaagtttcatcttccagttctttctgctctttgcctctgttcaacagatccaataaatcatcatagtaggagcacaaccatgcacaatcctgtccttttctccgccatttttccacacgggcaatgagacgaagctgcctttcccttggatcttcgatttgttccctttcacacaattccggaataatcgcaacatcataatcaattttcttaatacttgtttttacatctttccaatttggcttaaacttccccatctttcccgcatttgtctcattttcaagaatatttgcctgatccaaaagctgttttcttccacccactatttccataacatccgcatcgatatacggatgtttccatccactgagcatccccgccctgtaatgatcggtattggttttatcaatgatccaacgggctaaagttttatgttcctgctctttttttctgcccacgtggtctctcctttattcctatgatttcatccacaggaagtgccgcgtaaaaagctgatgcatatctgccaaaaacgtagacataacacttcctgaaccttttacctcttcttccgttgcttcctgctgtaatgctgcgattgctgtttccattttttcatttccctgtaatccctcatcggtcgggagcgtatgattatctttcatttcctcatcttcatatatttagtataacgaaaaattttccgaattgcacctattatttaaacatttcgcatgaatcatcaccgacaaaaagagaacagtgccccgattgatcatctgacactgttctctttcttttggttttatccctgttctccggattccggtacatctgtacttaccggttttgtactattctgcggctccacttttgccatcgtaacctttgttccgtcatcctttactacaaagttcacggaatcaagtcccgatacattcacattgcggttgaccttcgcatcgtaagactctgcgttgataatatctgccagatcaattccggttgcttctttcatgctttcaaagacttttgccatgaccaccggcacatttccggcaatctgatccacaccattgctgccgccttcgccacctccaatgattgtgatcttgtcaatctgaccgagcggttctgcaacttttccggcaatatccggaagtaccttgatcatcatttccgctactgcagccttattatacttcgcatatgcttctgccttcttttccatggcttctgcttccgcaataccttttgcctgaatcgcagatgcctctgcctcaccgactgcccggataccggctgcttcctgctctcttgcaaaacgcatggcttctgcctgtgccttctgcgcttccgcttcccgctgtgcctcaaactgctttgcctctgcgtccttctgacgctgataaagttctgcttccgcgcgctgctgggctgcatatttttctgcctcggctttcttctttacttctgcctccagcgactgctccgtaacggcaacctgcttctgctttaactcaatttcacgctcctgctttgcaatatctgcatttgccgtggtaacttcgatggtcttacgttgttcctctttctggatttcgtaagcggcatctgccatcgccttctttgtatcggcttccatctgaagttctgattttttgattgccagttcattctgtttcttcgcaatctctgtctgcgcttccactgccgcatcattggattctttatccgctgctgcctgtgcaactttaatatctctctcactctcggcctttgcgatagctgccgatttcttaatctttacaatattgtcgataccgagattttcaatgacatcatttccatcaacgaaattctgcacattgaaactgatgatatccagtcccatcgctgccagatccggctccgcattttctttgacaaggttggcaaatttctgacggtcggaaaccatctcctccagccgcatcttaccaacaatctcacgcacattaccttcaagcacttcacgtgccacacttgctatgtactctgtatttttattcagaaagttctctgctgccagacgcagtttctccggatcattactgatcttgacattgaccgtggcatccacattgatattgatgtaatccgctgtcggtacggcgttactcgtcttgacatcaatcggaatcagacgcagattcagtttatccagacgctcaaaaaacggaatccttatacttgcctttccaatgacaacttttgatttctttttcacaccggaaataatgtatgccatatccggtggtgcttttacgtatcccagcaataacagcaatacaacaatcgccacaataaccgccgggataaggtacggtatcagattttccataaaaatcccctttctgttaactactcctgctacttttttattgtaatatactttttaaaaattgtcatattattttcttatgatgttttccttaacttaaccttaaaacatagacacttgaaattctttcctgttaaatccatgaaaaatattataaaataatttggaaaagtttgtaacgaaaccatcttttcgccgtctaatctgtgtaaaaaggaggtgaccggttctgaattatgaaaaattgtacaattcctattacctgcaggtttactcttacgtgatgacaatcgtcaaaaatcagtccctggcggaagaaatcacacaaaatacgttttataaagcgctgactgcccgacacggctatgaagggaaatcccgtgaattcacatggctgtgcagcatagccaaaaaccttgcagttgatgaatgccgcaaaaatcaaaaatatgcctgtttcgatgcatctgctgcggaaacatccgatgatattgcaaaccatattgcggatcaggactctgcgctgcagattcatctcgtacttcatgaacttcaggaaccttataaagaagtctttcagctaagagttttcggagaattatccttttcacaaatcggaataatcttcgggaaaacagaaaattgggcgagagttacttatcacagggcaagattaaaaattaaagaaaggatggaccactatgaatcataatccaaacgaatgtgacattgtgcaggatctcctgccattatattacgaccatgcatgcagtcctgccagctgtgaactggtcagacagcatcttgctgactgcgctgactgcgaaaaaatttacgaagatttagccaatcataccattgacaacgtaattgaaaccgaatcctgcgaaattctggaacggcatgccaaaaaagaacggaacctggcatacaaagccggtatagtcattgccgccctgctgcttgttccgatccttattacctttattgtatccatggccggcggcagcggactcggcgtattctctgtcgtaaccgcttccatgatgcttgtcgcagcactcactgttgttccgcttatttcttcccagaaacggctgatgaaatgtattttatgtggtgtcggtgccctgctgctgattttattttttgtaaatgccatgaatggcggaggagaatttttcttctggtccgttccgactgtattcggactttccgttatatttttccctctggtgatacgcgaaatgacattaccgcctgtattatccgataaaaaagcccttattatcatgatctgggatacgctttggctctacctgaccatatttaccatatcttaccgttccggattaggcagtctgaaaaccggatgcattgtggcaacagttctgatgattggtgtatggctctttttcctcataattcgctatctcccggtcaatggttttatcaaaggcggtctgtgtacacttctttgcagtatatggattaccttctccaatgatgtttgcagttatcttctgtatgataccagacagcttaccatccgccatgcgaatttttccacctggacgacagatctcaacgtaaatgccaacgtgtatgtcatccttcttgtcgccggaattctcatcagtgctttactgatcggaatcgggattgtaaaaaaggaaactaataattagggtaattaaaagtttaatggggtctttctttagtataggttatccactaattcagttctgtatcacgcttacagttgcgaagagtacggaagtcttgcgcacataatgaacgtgtttattgtatccaccaaacgcagtcacgtaacaagtctgcaggtgatcgaattttagccccctattacgcacaacttccaacatcatactgtagatgtaccgaaaaaaatatatatcctcttgtcataaatttataaatatggtaatatattaacacagagagagccatatggattatggctgaaagacactcatgcacatatgtgtatgggtgttttttactttactaaaattttatattctaaattttctctagcaccttgggcatgcggacgaaaagttggactgtgtaatgcctgacatgttatgaggtacacacaagaacaaatatcgacagcacttgtattactaaaagcgacaggatccccagacaaagttgtccaaaccttagggtatccatctgcaccaatgctttatcattggcgtaaaaagtatcctgaatattacgatgttccaaatcaaaagcattggagacaagctccaacagaattgaaacatgacgtaattaaacgttgccttattaagggcgagcctgtaaaattagtggcagaagaaatcggatacacaccttccttgatatataaatggattagggagtatcgggagaagggatgttttcaacccatgaaaaaaactactgccaacattaatgtaaatccaaacgatatcacatctgcggaagatatcaatgagcttaaagctcag

SEQ ID NO: 1026 - DNA, 5580 bp, Unknown
  gut microbiota DNA sequence
aatatagttgatatacacaatcgaatatgctaacgtgaaaatgtaacaagtaattcaacattcaaacacaggagaataataatgaaaaaagaaggttccactgcttctatgctgtggctggatatccgtaggggattttgcagtaagcggttttggggcattgttggggtagttacaattgtttttgtagtgtttcttacacttgacatcatatatccattacaaaaatattataatgggtatggaacgtttgactggaaattggactcaatctcgatggctccatttgctgttcgtatcggtattttatcaatggatctgtttgtcactttttttccatttattggagtaatagcatatgctggaacgataatagatgagcgaaaagacggatattgttatcagattatacaaaaaagagggtttcattcctattactggagtcattttgtcgcaagtgggctgcttgggggacttcttgcggtagctattcttataagcttatatctgttgacagacattgggataggacaaaatccattatggaaagatgcaatacaagtgtatcttacacccgaatttggatcggaaaacgagacggtttattttggcatccatattcttacaaaatcagcaggacacgttgaacttgtattgttgggaatggtcagcttctttttgacgggatgtttgtttgggttattaggagcgataattgcatttgtatcagatgcacgggttcttgtatatgcaatgccaatgatcattatggagaccgggtgtgggggactttatgcaatttccctgttgtttggaagagattctgttgccgcaaatgtgctggcatatttttataacataacaggagcatatatttcatttggaaacttattaagccggtgcattgtgatctttttgattattttaatgctatgtattggaaaagggatggaatctaaagtggttcggtattatctcggagaggagatcagacaggtatgagagaaaccataggggcggttgttcgcaaaccggtgtttcgaataaaattaattgctatttcgctacttttcgttgtttcgttgattgaacaggtatccaataactatattcagtcatccgggcaacaagtgggaagaatgacggttattttattgttgatgcatacattcagttatttttcattttatctttcagtttttttggttggatatatattactgattccggatattgttaaggatgcatttatagaaaggcagacaatgatgcggtgtcagtcccgtatgcgggcggcaaagtatgccataggaaaaattatagccttttcgattctttatgttatttggtttgtaatgcttaccatccttgttggggggatctggtttcatgacttttcattggcatggcctaaatttatggatatccagcaaagacagcttgcagccaatggattatctacaattacatggattaatataccggttggagcaggcaaatatccaacactgcttgtggcaggattaatctgtttgcgaagtacgattgggtttatttttctgggattgctggctttactggtaacattaattactggtaaaacgcgcaatggaatggggattgttattcttttggcagcgattgcaggctatgtaaaactatatatgaatgatgtatttacttattggaattcagcacatccgattggaaataaacgcagttatattcgtatatcaaaggctaccataacaccattgtttacaacctgtctaaaatcggatgaatttatgccatggatgcgctatggtattattgcgggcattcttttatgtgtcatcaccggagcaggaattatgctttattacaggaaaggggatttgggcgatgaggatcgagatgaataatattaacaaaacaataaagggtgtatcgcttctgacagacattaacctggcactggaatccggtcatatctatggatttgtcggagataatggcagtggaaaaacggtattgttcaaggtattattgggactgatgcacaaaacttccgggaccattctggtagatggcagggaacagaaggatctgatgcaggatgttggtttcatcattgagcgtccggagtacataccatattattcagcaaaaaagaatctggaaatcattgcggcctatcggaaagtcgcggatgatcagcgcatttgcacggtattggagatgttcggcttagacccgtcggataagaaagcggtggggaagtattcgctcggtatgaagcaaaagcttgcactttccatggcatttctggaagatccgaaagtattgatactggatgaaccgctcagcgcgctggatgcagattcggtgcaggaggcccgcaagcgcattttggaggaaaaggagcgtggaaagctggttcttattgcatcccattatccggaggatatccaatcactgtgtgatgaggtatattggatgaagaatggacatgttttaccgtcgaaggaaaataaatgatgtcaaagttatcagaaaaagaataagaaatggcatatttttgtagtatgaaaaaggtatgggagtgtacttgtgtttccaatcgttttctgctacagtaggcttatacagaacagatgattagcaaaggagctttctcgggataagagaaagctctttttgctgtataaatcataaaggatcagggaggcgaatctatggtgcagaaatgatcacattgttgtcagaggcaatgccattaagccagttgttcgaagttttgttcgctagctcagttgttgtcaaacctaccatttgaatattctcgtgcggaagaacccgccgcacaggaatattcatagtactagtcgaaatataaagttctctacatatttcggatctggaacgattcccctcaatatagtcaatacaagcttgctctttttcttgaggagtaaatctttcttttctagacatgaaaaatacctccaaagtaacagattttttatatttaatctgtctactttagaggtatcatatcagacaagggcgctttttttgatgaaaatcttgaagaaacggacaaaaatgcaaaatataatcttgaagaaatgcccggttcatgttataacaaggatatatttgggaggtaatgatgtattttaaacggaaagcatatgacagattgttagaatggaaagcaaaatactcagacaaatatgcggctttgctagagggggccaaacgagtcggtaaatcaacgatcgcggagtcttttgggcaaaatgaatacaagtcttatcttttgattgatttctcaaagacaacggacaatatacgcagttgttttgaggatgtgggaaatttaaatatgttctttttgcgtcttcaggccgaaacaggagtgactttatacgaacatgaatcattgatcatatttgatgaagtacagcttttttcacaggcaaggcaggctatcaagcatctggtggcagatggcagatatagttatctggaaacgggatctctaatctcgattaagaaaaatgtaaaagacattttgattccatcggaggagatgaagatacaggtatatccgatggactatgaagaattttgtgatgccacaggaggtaattatgaactcttgcgccagatttatggtacaggatctgcaatcggacaggcaacgaatcgaaaattaatgcgagatctgcgtatttatatggctgttgggggaatgccgcaggcggtagaagcatacacggcaggtaagaatttctcggaaattgatatggtcaagagacagatcatatcattatatgaagatgattttaagaaaattgatgcgtctggaagaatttctgcattgtatcattcgattccggcgcagctcgccaaagattcaaaaaaatatcggatttcaacagcaatcgggaagaagagtaaagcaaaaacagaggaattattatatgagttgattgattcaaaaacaattttgccgtgttataattcaaccgatctacgtgtgagtttagcagacacaaaggattttgacagttacaaactctacctcgcagatacaggattgtttgttacattgatgtttatggatcgcccggtgacagaaaatgatgtgtacgcaaagctgctttctgacaaattaccggctaatctcggattcttatatgaaaatctggttgcacaaatgatcgcggcatctggcagagagcttttctatcacacatgggaaaagtcaggcagtacgcattattatgaagtggatttcctgatctcggaaggaagcaaagtgaacgctttcgaaattaaatcatctggatctggaaaacatgagtcgataaaggtattcgataaaaagttttcgaaaaatgtgcatgatatatatttattgtcacagaaggatgttggaaaggaagaaaacttgttactgaaaccattttatttgatgccttttctaattgaacaaaagtaaatttactaggagtatgtaagaaatgataagatttaataacgattacaaccatggagcatttgcatccatattgaaggaacttggcgcaacgaacagcacaagctacgccggatacggggaagatgagtggtgcgataaagcggaaaccatcataaagaagctggtcgataatgacaatgcattgatcaaattcattccgggagccacgcaggcgaattacgtcgtgatcgctgctgcattatcttcggtgcaaagcgtgatcgctgcagataccggacatatcaactgtcacgaggcggcgtccatcgagaacaccggacacaagattctggaacttccgaatacagatggcaagattaccgcgcagcagatcgccgcttgcgccaaggcgtattacgatcaggacgagccggagtatctgaccgaaccgaagatggtatatctgtcttttccgacagaaaaaggtacactttattcgaagaaggaaattaaggagatccatgatgtgtgcacaaaatatgggatgtatcttttcgtggatggcgcgcgcatgggatatggacttggatcggagaaaaatgatcttactttgaaggattttgcggaattgacggatgtattttatattggcggaacaaagtgtggcgctttgttcggcgaggcgctcattattactgcgcaggatctgaagtatcgctttaaggcctacatgaagcagaatggtgcagtacttgcgaaaggctggctgatgggactgcagtttgcaacgatgctggagagcggcgagtattttgaggctgcgaagcgcgccgatgcgcttgcgatgcagattaagaaagcgtttgaggacaagggtgttccgtttgcggtggagagctttaccaaccagcagtttgttattctgacggagcagcagaagcaggagcttgcgcaaaaatattattttgaagacgaaggtgatacgcagcgtttctgtacgagctgggcaacaacggaggacgaggttgatatgctggttacggacatcgaaaagttgtagaaatattgaaacatgtggcaatgccattaagccagttgttcgaagtttt

SEQ ID NO: 1027 - DNA, 161184 bp, Unknown
  gut microbiota DNA sequence
tatcgtatgttgaaatcaataacagataagtcggaaggaaagattgtaattctggatatgatttgttttgagtatctgattcttgcatttgataagttggtagaatggacgggcactggaaagaccgataaaataaaaatccgtgataaagttttggcggcagttgagaatcacagaatagatttatcaaggattgatgataagaaaacattacagtacatagctggatttaagagatattctacagaacgtgtgatgaagtcattggttggtgaatttacacaaaatgaaaagtggtctgttaaagggactcttatgggtgaatgctggtataaagattgttgtgtggcagagcatacggataatcttaggtgtggtaagcctgaggttgaaggtggggatgagaagatgaggatgctgatacggtcagaggaagtacaaaggataatgagagatattactttgaaagaatagtttaataagactatatttttcgtaatgcataataaaggatacattataatatggtattgctgacggcgacctctttaaaaaatctttcgcagaatggaaaatttttgttagacactgtgaatcaaaatccgtttgtcacactggctttgtattatgttgtgccgcgttcacttatggcgattgcatttttttatgtgagcatcaatgtgaactgtgttgtgcgcaaatcgatggaaaatgcctggaaaatgaaacaagacaggcactatgaaggggataccgaatttattctgcggtatatttgccgtaggtaggaactataatttgacgcgtgacaataaagttcataaaccctatcttgcaaaatttgataaaaacggtaataaaggaagaaaacatgagtaagaaacacaaacatatttctgccacgaaaacaacagaacagaaggcagtacaacagtcacagcagccacagaaactgacaccacagaagctgaaccagcttttggagaaaaatccgtttgcacagcttctgggaatggaactgctggaagtgcgggaaggctatgcttacggaagaatgcgcatggatgagaattttacgaatatttacggtggaatgcatggcggatgtgcgtatgcgcttgctgatacgcttgctggtttggcggcatccacctatggcaattatgttacaacgattgacgggaaaatgaattatctggaggctgtgaaaaataccggctacgtgtacggtgaagcggaagtacaaagacagggaggacggatcggcgtatataccgtgaaacttatggatgaaaatcaaaaagttctggttactgctgattttacctattaccggacaggacaggcgattgaccagcagggatagggtgttttcaaggtgtctgatttggaaaaaaatcagatgccttttttctttttacttgtttatcgcgttaaagtatagtagtgttaaaatataaaaataccaaggaggaaaagttatgggaaaaggttttggacagcatcgggacattgcagcagacggtgaatgaatttcagatataaattgtttgtaaaataaaaacaacttaataaaaacagaaaatgcggtcatatttatgaaaaaatatttcatgaatatgaccgctttattgttcgagaaatgaaagatataaaagaaaacatacattattgtctgataatattatataaaacgaacaatagacaaattatcagacaaaagaacgaaaaaaatgatttacaagaggcggttataggagtaaaatgagaatcagttaagaaaaagcaactcatgaatgatttacaacgaaaggatagttctatgaaagagcaatggaatgagagcacagcaaccgccaaaggattatatgatccgagtttcgaacatgataactgcggaattggtgctgtggtaaacatcaaagggatcaagacccaccagaccgtggaaaatgccttgaaaattgttgagaacttaaagcatagagccggaaaagatgccgacggaaagactggagatggtgttggtattcttcttcagatttcccataagttctttaagaaagcgacagagccgcttggaatcaagctgggagaagagagagattacggcgttggaatgtttttcttcccacaggatgagttaaagaccaatcaggcaaagaagatgtttgaggtaattgtcgagaaggaaggaatggaattcctcggatggagacaggtaccgattcatccggacaagctttccgacaaggcaagaggatgtatgccatgcatcatgcaggcgttcatcaaaagaccggaagatgtggagaagggacttgattttgaccgcaagctgtatgtggcacgccgtgtattcgagcagtccaacgatgacagctacgttgcttctctttcgagcagaacgatcgtatataaaggaatgttccttgtagagcagctgcgtcagttcttctccgatctgcaggataaggattatgagtctgcaattgcaaccgtacattcccgtttctctaccaacacaaatccaagctgggagagagcacatccaaaccgttttattgtacataacggtgagatcaacaccatccgcggtaatgcagacaagatgcttgcccgggaagagacgatggcatccggcaagctgcgcggggaattccagaaggtacttccggtcgtcaacaccgaaggatctgactccgcaatgctggacaatacgttggagtttctggtgatgagtggcatggatctgccactggcagtcatgatcatgattccggagccatgggcaaacaatgctgtgatgacacagaaaaagaaagatttctatcagtattatgcaactatgatggagccttgggacggacctgcatccatcctgttttccgatggagatatgatgggagcggttcttgaccgtaacggtctgcgtccatcccgttattacattacagacgatgattatctgattctttcttccgaggtcggagttctcgatattgatccgacccatatcgtgaccaaagaccgtctgcgtcctggtaaaatgcttcttgtagataccgtgcagggccgtgtgatcgatgacgatgagttaaaagaaaaatatgcgggcaagcgtccgtatggtgagtggcttgacagtaacatcgtcatgttaaaggatttaaaaatcccgaatgagcgtgtgccggaatacacacaggaagaacgtcagagaatgcagagagcattcggttacacgtatgagtccttaaaggattccatcctgccgatggcaaagaacggcattgagggtaccgctgcgatgggtacagatacaccgcttgcggcgctgtccggaaaccgtgagccgctgtttaactattttaagcagctgtttgcacaggtaaccaacccgccaatcgattccatccgtgaggaggttgttacttctacgacggtgtatatcggatctgccggaaacctcttagaggaaaaaccggagaactgtaaagtacttcggatcaacaatccgattctgaccaacacagacctgatgaaaatccgcaatatgaaagtagacggatttaaggtagaaaccattccgattatttattataagaataccagtcttgagaaagccgtagatcgtctctttattgaggcggatcgtgcatacagagacggagccaatatcctgatcctttccgacagaggcgtggatgataaccatgtggcaattccttccctgcttgccgtatctgcattgcagcagtatctggtaaagacaaagaaacgtacttccctttccctgattctcgaatccggagagccgcgtgaggtacatcattttgcaacactgcttggttttggtgcgagtgcaattaacccatacttggcactggataccgtaaaacagctgatcgacgagcacatgttagacaaagattattatgccgcagttgatgattataaccatgcaattatcaccggtattgtaaagattgcagccaagatgggtatttctacgatccagtcgtatcagggttccaagatttttgaggcacttggtattgataaagatgtcattgacaagtatttcaccaatacggtcagccgcatcggcggaatttccatcaaggatatcgagaatgatgtcaatacgcttcattccgcagcctatgatccgctgggacttgaaaccgatgtaacccttgacagcaaggggcgccacaagatgagaagcggagccgatgcgcatctgtacaatccggctaccatccatctgctgcagcagtctaccaaacgtggggactatgagatgttcaaacagtatacgagtctggtagatgaagaagaaaagcatacgaacctgcgtggactgatggattttgagtacccgaagaagggtgtgaagcttgaggaagtggaaagcgtagattctattgtgacacgttttaagaccggagcgatgtcttacggttctatttcgaaggaagcacatgagacacttgccattgccatgaatcacttacacggtaagtcaaacaccggtgaaggtggtgaggacaaggatcgtctgaccgtcggaccggacggaaagaaccgttgttccgcaatcaaacaggttgcatccggacgtttcggtgttaccagccgttatctgaccagtgcgcaggagatccagatcaaaatggcacagggagcaaagcctggtgaaggtggacatcttccgggtaagaaagtatatccatggattgccaagacaagactttccacaccgggtgtatctttgatctccccgccaccacaccacgatatttattccatcgaggatcttgaacagctgatctttgacttaaagaatgcaaaccgcgatgcaagaatttccgtaaaactggtttccgaggcaggtgtcggtaccgtagcagccggtgttgcaaaagccggtgcacaggttgtcctgatctccggatatgacggtggtacaggtgctgcgccaagcagttccatccacaacgcaggtcttccgtgggaacttggtctggcagagacacatcagacactgattatgaacggactgcgtaataaagtaagaattgagacagacggaaagctgatgagtggtaaagacgtggccattgctgcatgtcttggcgcggaagagtttggttttgcaaccgctccgctggtaaccatgggctgtgtcatgatgcgtgtatgtaatctggatacctgtccggcaggtattgcaacccagaatccggagcttcgtaagcgtttcgcaggaaaaccggagtatgttgagaacttcatgcgctttatcgcagaagaacttcgggagtacatggcaaaacttggtgtccgcacagtggatgaactcgtcggacgaagcgatttcttaaaggttcgcggagatctgtccgagcgtgaagcaaagcttgacctgagcaatatcttaaataatccgtttgcaggaacaaagcagaaggttatttttgatccgaagcaggtatatgatttcgaactggataagaccaaagatatcacggagttcttaaaacagttaaagccggcacttgataagaagcagaagcgtatgatcgataccgaagtaacaaacgtaaaccgttcgcttggaacaatcttcggatcagagattacaaagaagtacgacgatacactggatgaggatactttcattattaaatgcagcggagccggcggacagagttttggtgcctttattccaaagggactgacactcgaactggtgggagattccaacgattatttcggaaagggactttccggcggaaagctgatcgtttatccaccggcaggagtaaacttcaaaaaggatgagaacatcattatcggtaacgtagcactgtacggtgcgacaagcggtaaggcattcatcaatggtgtggcaggagaacgtttctgtgtcagaaattccggagctactgctgttgttgagggtgtcggcgatcatggatgtgagtatatgacgggcggtcgtgttgttatccttggtaaaaccggaaagaactttgccgcaggtatgagcggtggtatcgcttatgtactggatgaggacaacgatctgtacatgcgtaccaacaagtctatggtattcagtgaggaagtcaccaataaatatgacgtattagagctcaaagaaatgatcaaagaacatgttacactgaccaattcggaaaaaggtaaggaaattctcgatcacttcagtgagtatctgccgaagtttaagaaagtcatcccatatgattataaccgtatgcagatggcaatcgttcagatggaagaaaaaggtctgaatgcagagcaggcacagattgaggcattttatgccagcacgagagcataaggagggaagaaacaatgggaaagccaacaggatttatggaatacgacagatgtgaggcgcgttcggtggaaccaaaggaacgaatcaaaaattttgatgaattccacatcttcctttccaaagaaaaacaaagagagcaggcagcgcgctgtatggattgcggtgtcccgttctgtcagtcgggtatgacagttgccggaatgacttccggctgcccgctgcacaatctggtaccggagtggaacgatctgctttataccggaaactatcagcaggcatataaccgtctgcacaagacaaataatttcccggagtttacctcccgtgtatgtccggctctgtgtgagaaggcatgtacctgtggacactggggagatccggtatctgtccgggacaatgagcatggaatcattgagacggcatacaaagaaggttatgccggaccacatattccaaaggttcgtaccggaaagaaagttgccatcatcggttccggtccttccggactggcagcagcagatcagctgaaccagagaggacatgatgttacggtatatgagagagatgaccgtgtcggcggacttctgatgtatggtattccgaatatgaagctcgaaaagcagatcattgaccgtaagatcaatgttatgaaagaagagggcgtgaagtttatcacaggctgtaatgtcggtgtggatgtcaagagtgcagagctgttaaaagagtatgacagagtcatcctctgctgtggagcaaagcatgcgcgtgatatcaaggcagcaggtcgtgatgcagaaggaatctattttgcagtcgattatctgtcacgcaacacaaagagccttttggattccaattttaaggacaacaaatttatttccgcaaagggaaaaaatgttgtgatcatcggtggcggtgataccggaaatgactgtgtgggaacggctatccgtcagggtgcaaagtctgtaacccagctggagatgatgccatgtccaccggcagagcgggcagcaaataacccatggccggagtggccgaaggtgttaaagaccgactatggccaggaagaagcgattgcatgtttcggtacagatccacgaatctatcagacaaccgtaaaggaattccataaggataagaacggtaagctgaatggtctgacaatcgtcagacttgagagcaaggtggatgagaagaccggacgcagaaatatggtggaagttgcaggttccgagaagaagattccggcagaacttgtactgatcgctgcaggattccttggaacagaggaatacattgcaaaggcattcggtgtagagctgaaccagagaacaaatgtagctacagagcctggaacatatgcaacaaatgtaaagaacgtatttgttgcgggagatatgcacagaggacagtcactggttgtctgggcaattcgtgagggccgtgaggtggcacatgacgtggatacaagtctgatgggatattcttatctgtccgtacagtaaaatagagacttatggctggtgcatagccatatgatttttgggagtcatctgaaacagatggctccttttttacctcttgtgggcttttttttacctgtcagtgcaaatcggtttacagtttttcgttttttcgctatgataatttttgtaaaaaggagtcaggtatgaaaataaaaatggaaattgacgaaaatctgcaggatgaggagatcattgtgcgttgtcgggaactgagtgacgatgtggtggcaatgcagaggaggattgcggaggctgttcatgcaggcatgcggctggcggttgtccgtggagacctggaatattatcttccactcaatgaaattttattttttgagacagcagatgctgttgtggcggttcacacggccacgcagatttatgaaacacatttgcggttatatgaactggaaaaaatgcttccgggcagctttttgcgggtgtcaaaatcctgcattatgaatacggaaaagattcgttctgtccgcaaaaatattacaggtgcgagtgaggtagaatttatggattctgtgaaaaaggcatttgtatcacgcagttattttaaagtcctgacggacaaattggaagaaaagaggttaaaaaaatgaaaaagagaaatattttctgggcagttattcttatttttatcgcagtatatctggtggcgagcaaaatgcatatgatacctgcgattccgttctttaaaatcttatttaccgtgatctttgtgtatacggctgtttatggatttgtgcggctgcatttctttgaaggaatgttgtcggttggattgctgggctgtatgtacgataaagtgcttggcattcaggcaattactccgtggacacttcttctggcagcgtgtctggtcggtctggcactggatctgcttttcagaaatttaaaaaaacaaaaagataatacttattttggacacagcaatgcaggcggacatgtggagaatggacaggatggtgagtatgtacatgtggaaaattcttttggagcgttgagtaaatatgtaaattctgactgttttcgggaggcaaaaatttcgaacagttttggagagtgtaacgtatttttcaataatacggcattaaaaggagcgaatgcaattatccgtacggataattctttcggcagtacaaacatttatcttccgtcaacctggcgcgtggaattcagacagaataccgcatttggcaatgtggaatgtaaaggtcagggcagcagtgatccggatgctccgtgtgtggaactgcagatctcaagcagttttggacagacttgtataatttttggataattctgcttgatattatgtacatttcgatgtagaattatagataaatagtatactatacataggaggaaacgtatgcgtaagaattactttcaaaatgtgaaaattgcggataagctgaaaatggttatgaaagcaatttttgcaattttactggtgaacaatattctgtttgcaattttaatgcttgtatttggacatccggtatggattatcattcctgtcattgcagtagttggtatgccattgctttccaaaaagatcattcaggaactgacacaaaatattcttgaaccgttagaacagatagaaaaggccgcagatgacatggcacacggaaacctcgaaattgatatttcttatcagggggaagatgaactgggaaagcttgcagaaagtttccgcaatacatctttttatttaaggggtgttgtggacgatatcaatcaactccttacagagtttgcaaaaggaaactttgatgcgagatcccatgatattgaagcctatcagggaaatttcggtgaaattttaaagaaactggaagcgacagaaaataatctgagccagacgatcaaaaatgtacaggaatcttccgatcaggtatctgcaggagctgatcagctggcacagagtgcacagggattggcagagggtgccaccgatcaggcagcggcagtacagcagctgacatcttcggttgccgaggttgctacacatatcgaagaaaatacgaagtccacagacaatgtacatgaccaggcaaagcaggttgcaatcaaagcagacagcggaagtgcaaagatgaaagaactggtcgaagccatgcagcatatttcagagaccaccaatgatatccaggttgtcatcggaaagattgaaagcattgccagccagacaaacctgttgtctttaaatgcatccattgaggctgcgcgtgccggtgaagcaggaaaaggatttgcggttgttgcagaacagattaaaaaccttgcggaagagagtgcttcttcggcagaagaaacccgtgtcatgctgacaaacagtttgaatcaggtgggtgtcggaagctccgttgcagatgagacttcccagtttatgtcggaaatgatcgaacagctggatgcagttgtcatggaggtggctaagatccgtcagatttctgatcagcaggcagaatcggtaaagcagatttccgctgctgttgagcaggtaaatggggttgtacagtctaattccgctacttcggaagaggtatctgcaaccagtgaagaactttctgcatctgctgaaaatctggacgagatggtatcggggtttgtcctgcgcaaataagatacggacagatgacaggcacatagtacagatgaggtgattttatgccatcaatcatggtgtatacggaagaaacattttattatacagacggaatccgtgttgttgcgcgggaagaatatatgcggccggatgttacggaactgagtttctaccagaaagaaggtttctggtttggatttgaagctccgtattctatttataccatgcagggaatccgggcattgattgagttgaaactcagacaatacgattgtacaccggaatttcgctatacgcgtaagaaaattgaatatagttacagtgaaaaaaagattctcgattctgtgattttttatatcacgaaatccgatcagccgggagttttgtctgtgatggaggaaattaatcattccactcatctgtgtttctggaacatgaaagtgccataccatgattttggggaaatccgtaaacataccgatgcggtattttacggaatgtttcaacaaaaagcgcaatagttcttgactttttcggcaaaagttctataatacattctcggtaatagaggatgtgtcgaatgaataaagagagagattatttttttgataatttgaaagcggtattgatattcttagtcgtgctggggcattttttgctccctatccacggagaaagtgttcttgtggtggtaaagcgcctgatctatgtatttcatatgccgctttttgtatttgtgtcaggttattttgcaaagaaaatatataaaaacggacaatataattttaaaaaaatattgtatctgatcaaggcgtacatcatatttgttattgcaattcagatagtatatgcactgtgtggattccgggatttctcagagattaattttttctcgcagagtggggcgccgtggtatctgtttgccatgattgtgtggtatcttaccattcctgtcatccggaagtacaaagagataccggtattaatcgtgacggttgcgctggctctgatcgccggatatttcaaaaatatcggcgattttttgtgcatgtcccgtattctggtatttggtccgttcttttatctgggatattatatggaacaaccggtgcttgaacgggcattgcgaccggtttaccggagagttgttgtaccggctgctgtggcaatctgtgcggggattctggcgtttggctcaaagttaaaagatgagcttggcatggtctatgaaaacatttcctattatgaactggatgatgtgtgggaaggaccgtttgttcgtctggcactgatgattgccgcgtttctgatttcgtgggcgattatgttttttgtgccgcgtgggaaaacctgtctgtcagtgattggacagaatacgatgccggtatatatgctgcaccggatcctgcgggatatcctgatgtttgcgggaatctatgactatctcggagattggggatggtttgcgctgtttgttctgatttgtctgagtatctgcgtgatttacctgcttgttaatccaaaggtagtaaatcaggtaaataagattctgacactttataccccgcggctgtggggcagaatacgccggaatcaggcgatataaaggaatcgtagattgacttttcctcctatattttctaagcttagaaccagaaagatataggaggaatttttttatggatgcaaaaaagtttggagtactctggtattatggagaaatgtctgcacggatacttaatggtgtaacggcacagagtatgatagaagtaattcgtatttgacaattccaaaaaatgattatatagtggcagaaaagaacttttgttttcacagagaaaatacactgagggaggaacgtaataatgtacgaatttacgcaggattgtctgacgggcatcgaccagatcgatgaagagcaccgcaaactgttttcgctgatcaatgaagcggttgaactgccgaaggaagcacgcacaccacagacggtaaaaaatatactggaacatttaagtgattatgccgtaaaccattttgcacacgaagaagcctatatggaggcacagaacgatccggaactgccgttgcagaaaaaagagcatcaggcatttgccgatcacgtaaaacttctggaaaagcagccactcaccggggagaatgcatcggcgatgctcgatgagattctgacctatctggtacgctggctgtaccggcatattttaagcagtgacatgatgatcggaaaaatgcagaaagaagatccgtttgtgtttaccgcgaaatattatacgggaattgaactggtagacagggaacaccggaaactgtttgagattatcggagaggtaaatgcactgatccataacgacctgcttcatgacaaatacgatgaaattgtacgtctgctggatgaactccgggaatataccaagtttcattttgaagatgaagaggcctatatgcagaaaatcaacagcccgatgctggaagcgcaaaagagggcgcatcaggcatttgtggacaagctgatgagtatcgatctggataagctggaagaaattgatgacaaccagcaggaatatctgcatgagctgattgagttccttggcggatggctgatcaatcatattttaaagatggatacgcagattgcaaaaacagaacagtaattattatgtgcggtgaaaggattattttcaccgcattttaatatgtcaatttaatatgaaacttatatagaaaatacgttatcctttttaaaaatattctttataataaaagatagcgagattgagaaaaggaagtgtatttttatggcaacaatttttccaagggaacagaaggcaaaaatgctttttgaaaagattaaagagaatccgcaggcatgtgagcgcctgatggaaacgttttatgatgcgctcggagtgggcgatgattatgagggcaacggtctttctgcggagcagttcgcaaccgcactgtttcgttcttatgaggaaaaggatctgacggcgtttctgatggcaatctgccagaacagtatgtttgatctgctgcggaattcgtttctggctccgtttcgttttaatgccaatggtcagacaaatccctatatcctgacggatgaggatggaaaattaattccggatatcaaatttcatgtcagtgacaaaaattatgagcagttttttaaggtatttcaaaagagtgaacaggtgaagatgtatctggcatacggattccgtaaacggcattgttatgacagagataccatggaagcacaggaaatccgtatgggagagcatatcggagtgctgcttgtctatgaaatgccggatacggtaaaaatgcaggagacagaagcgcaggcatatgcgatcatctgggatatcctgatggatctgcagaaatccctgccacgttcggtcgtttattacggacaggattccatggaaaataagggaaaccgttacgatgcacttggggtgtttttgccgatgtaccattttcggaaggcattggagaaaaacattgatattgcaaacaaaattgtattgatgcattaagaaagaggatgatgattcatgcaaaccactgcaatacctaaaaatcacatggatatcccatggcatgagtacagcggtcacggaaattgtccgattacagaggcagacctgaccgaaaaagcttcaatcgtcggccgtgtcggcctgatgctgttatcctgtggaacgggagcctggcgtgtccgcagttccatgaatacgatttcacaaaatctcggaattacatgttcgacagatatcggtctgatgtcgattgaatatacctgttttgatggaacgagtggattttcccagtctctttgcctgaccaataccggagtcaacacatcaaaactgaaccggctggagcgttttatcggtgaattttcaaccgtagggaaaaccatgacgggcgaacagctccatgatcatctggatgagatcgaccggattcatggactctattccccggtggctttgggatttgccgcggcactggcatgcggcgcattcacatttttgcttggcggaggacccgtggaaatgctgtttgctttttgcggggcaggacttggaaactttgtccgctgcaaactgacaaagcatcatctgacactgtttctcgggattgtggcatccgttgcctcggcgtgcgttacctataccattctgcttcggatcgcagagctgattgccggggtttccctgcagcatgaggcgggatatatctgttccatgctttttatcattccgggctttccgtttattacaagcggaattgaccttgccaagctggatatgcgttccgggctggagaggctgacctatgcgatcattatcattgttgttgcgaccattacggcatggctgatggcactgcttttgcatctgcatccggtgaattttccggcgctttccatgtccgttcccatgcatatcatactgcgtctggtcttcagtttctgcggcgtgttcggattttcgattatgtttaacagtccgtggaaactggcggcaacggcagcactgatcggagcagtggccaacaccctccggctggagctggtggatcttgcttcatttcctccggctgcggctgcttttgtgggagcacttttggcaggaatccttgcatcattgatcaaaaaccaggcgggatatccaaggatttcacttacggttccgtcgattgtcattatggtaccgggactgtatctgtaccgggcaatttacaatctgggtgcgatgtctttgaatacctctgcatcctggtttgcttctgcaattttaattattgtggcactgccgcttggtctgatctttgcaagaattctgaccgaccggacattccggtattgtacatagaaatacgtctgtttccttacggctccacaaatcccggaaagatactgacacctctttattttagaaaagacttgcaaaaacagactaattgatgtaagataagatacacaaaacaggatgtctgaaaaagactatagattttacggtttctgattcaaaccgtcggtctatagtctttttttgcggaacatccggcagaaaagaggagtttgtatgaatcaggagtacatgaaaacaagaaaaatcctgccgctggtgctttccatgtcacttcccatggtcatatccatggcagtgaatgcattgtataacattgtggacagttattttgtggcaaagatcagtgaagatgcgatgacggcgcttgcccttgtgtttccgatgcaaaatctcgtcaatgccattgttatcggatttgcgatcggaatcaatgcaagggtagccttttatctgggagcaaaagaggagaaactggcggatgagtcggcatccgtggggcttttgttaaatttgatccacggtctggtgctggcactgctttgttctgccattatgccatcgtttcttcggatgtttacaggcgatacacaggtgatcgcactggcatgcacgtattccacgcgggtatttgcgtttgcaccagtgatcggtctgggacttgcatatgaaaagatctttcaggcagtcgggcggatgaaggtgtcgatgatctgtatgatgctcggatgtgtaaccaatattattttagatccggttatgatctttggtcttggaccggtaccgaagcttggaattgcgggtgcggcttatgccacgggaatcggtcagtgtgtgacgctggcggggtatctgctgttttattttgcacgtccgatgcatgtaaaggtcaacgtcgcaaatatgaagacaaccggaagcgtaatgaaaaatatttataccatcggaattccggcaactttaaatcttgcacttccttccattcaggtgtccgcattaaatgcaatccttgcgccgtttccgggaagttatattctggtgctcggagtttattataaactgcagacatttatttatctgacggcaaacggaattgtgcagggaatccggccgctcgttggatataattatggagcgggagaatatgacagggtgaaaaagattacgcacacctccatgggattgatcgcactggttatggttatgggaatggcaatttcctgtgcaattccgcagcagctgatgggattgtttaccacaagccgcgcaacaatggaaatcggaggtgcggcactcagaatcatcagttttggattcgtggtatcctcggtttccgttacattttccggagtcctggagggactgggaaagggcatgccatcacttttgatttctcttgcgcgctatatcgttgtgatgctgccggtttcttttgcgctcagccggttgttacaggcatcgggcgtgtggtatggatttgccgttaccgagtatatcgtagcggttctttcctattatatatacaaattccatatgagagatataaaagggtaacaaaataaaaaaagtgtggtacaatagttatgatatggataagagaaaaggaataaggaggagtcggttatgccatactcaaacgccaccaaacaggcatttgcagatgctcttcgaaaactgttggaacagaaaccttttgcaaagatcagtgtatcacacatttgcgaagaatgcggaatgaaccgcaaaagtttttattatcattttaaagataaatatgatctggtcaactggatttttgacactgaaattacaaagattttttcagaagaagaatggaaaaatgccggctttacatgggatatactggaaaaaatctgtgagtatttttataaacaccggacattctattcgaaagtactgcagattgaggggcagaactcttttacagaacatttccgggatattttagtccctgtcaatcgtaaatttcttgcgatggtagaggaagaggaaaaaggagaacatgaggaattttatattcatttcttttcggatgcatttctggcagcactggtgagatggcttgaggacagggaatgtgtgtccccacaggaatttagtgcactgttgcgttcgagtgtggaaatgattgcaaagtatgtgctgcagagtcagaaataagtggagaaagatgctctaaattggtaaaatccgacaaattttacccacattcgcgcttttgtccacttgaatttgagaagagaaaagatataatacttttcagattacacaaaacatttctgtcatgttatggcggcagaatgaaaggaagttgagattatgaataaaatgtcattacagaagagtattcagaactttggaatcaagcaggccttaaagtatatggagaaagatccagaggagaacattccgaaactgatggatatggttgacaaatttgcaccggacggatggtatgaggcacagagaaatatgatccgcaaggtgattcaggagaggggaaactggtaccagctgattcttcgcatttatcagctgaatccggaagtccgtaaggcattcttccagaatttcattttcaatgcaagcttaaaaggcagcgcactgcaggagcagcttgctgaagaaaacaactgtaacattccgtgggcaattctgttagaccctacctctgcatgtaatttacactgtaccggatgctgggcagcagagtatggccatcagctgaatctggatctggatacgattgattctatcgtacgtcagggtaaggagcttggtacctatatgtatatttatacaggtggagaaccattggtacgtaaaaaagacctgatcaagatctgtgagatgcatccggattgtgaattcctttctttcacaaacggtactttgattgatgaagagttctgccaggaaatgcttcgtgtcaagaactttgttccggcgatcagtctggaaggattcgagacagccaacgatggacgaagaggcgaaggtgtatttgataaagtacagcatgccatgagcctgttaaagagccatggtttaccatttggtatttccacctgctataccagaaagaatttagatgatgtaaccagcgaaaaattctttgatatgctggttgagagtggtgcattatttgtatggttcttccactatatgccggttggaaatgatgcagcagtggaacttctgcctacacctgagcagcgtgaggaaatcttccatcgtatccgtaagttccgtcagacaaaggcaatatttagcatggattttcagaatgacgcacagtttgtcggcggatgtatcgccggtggacgaagatatttacatatcaatgccaagggtgatgtggagccatgcgtatttattcattattccaatgcaaatattcatgactgcagcctgctggatgctttaaagagcccattattccaggcatatcatgacaaccagccgtttaatgacaatatgcttcgtccgtgtccgatgcttgagaacccggataagcttggagagatggtaaaagagtcaaaggcagtaaataccgattatcagtcaccggagacaccggaacatctgaaagaaaaggctgctccttatgccgagaactggacacctacagcagaaaaactctggaacaaagaaaaagaaaagattgcagcaggaaaagccggcgtggaacagtaatgataagttttctcaataaggacagccggattgctgttgcataaagtgtgggactccgctatttatcggatgatagatggtgtgagtcctttttttatgctcttttttgcacgccgtggtgactaaaaaaatacttgcaaattggaaaaatggggcataaaatacgtttttaaacaggaagacaaaattataaatcagttactaaggaggaaacaacgatgttaaagtgtttcaaaaattttgatgcaaagaaaaccggactttttgcagcaggtgtactgtttggtaccgcaggaatcaagattctttccagcaaggatgcaaagaaactttatacaaattgtacagcagccgtactccgtgcaaaggaagttgttttaaagaccgctacaaaggtacaggagaatgcagaggatatctatgcagaggctaagcagatcaacgaagaccgtgcagcaaaagaagaggaagtatttgacggtgaggaagtaaccgaagagacaactgccgaagagacagaaactaccgaagagacagcagaggcataaaaacgcatgaaagagatgttacgcaataagtaacatctcttttatcgaaagcaggttaaagatatgaaatttcaaatcagacatgagataagaggaagaatgagaattcacgtgatccagagccgtatgtcatttgcacaggcagatacattacagtattatctggaacagtgtgaatctgtgatttccgcaaaaattcaaaatcgtaccgaagatgtgaccatttgttatgaaggaagcagagatgcaatccttgaagtgttaaaggcattttcgtatgaaaagacggatgttccggatacctgtattaaaaattccggaagagaaatgaatcagcattactgggatcagctggtggagcagacgttctggcatttcggtaacaaactgtttctgccgttttccgttcgtgcagtcatcacagcggtgaaatccgtgaagtatatctggaaagggcttcagactctgtttcagggtaagatcgaggttccggtactggatgcaactgccattggtgtttccattatccgtggtgattttgcgaccgcaggatctgtgatgtatctgcttggtatcggagagacgctggaagaatggacacataagaaatccgtgggagatctggcacgcagtatgtcactcaacatcagcaaggtatggatgatgtgtgatggacaggaaatactcgtttccgcagacaacgtgcagtccggagatgaagtgcgcattcatatgggaaatgtgatcccgtttgacggaacggtaacggatggagaggcaatggtaaatcaggcatctttaaccggagaatcggttccggtccgcaaagtacctgatggcgtggtatatgccggaactgttgtcgaggaaggcgagattacgatccgcgtcagagaagtaaacggatcaagcaagtatgaaaagatcatggcgatgatcgaggaatcagagaaactgaaatcctcactggaaggaaaagccgaacatttagcagataaactggtgccatataccttcctgggaacagggcttgtatggctgtttaccagaaatgtgacaaaggcagtttctgtacttatggtagatttctcctgtgcactgaaacttgcaatgccattgtccgtgctctctgcaatccgggaagcaagtacctataacattaccgtaaagggaggcaagtatctggaagctatggcggaagcggataccatcgtctttgataagaccggtacactgaccaaggcacagccgacagtggaaaagattgtttccttcaatgatcagtccgaggatgaactgcttcgtattgctgcctgtttagaggaacattttccacattccatggcaaaggctgtggtacgtgaggcagtaaaccggaatctggtacatgaggaacttcactcaaaggtagagtacattgtcgcacacggtatttcttccaagatcggggagaaacatattgtgatcggaagctatcatttcgtatttgaggatgagaatgctacaattccggagggaaagaaagagatatttgagcagcttccggagcagtattcacacctgtatatggcgattgacggagtgcttgtggcagttatctgcatcgaagatccacttcgtccggaagcggttgaggttattgcaaagttaaagaaactcggaatctccaaggttgttatgatgaccggggacagtgaccgcgtggcatctgcgattgcgaaaaaagtcggtgtggatgagtatcattccgaggtattgccggaagataaagcaagctttgttgaggcagaaaagaatgccggaagaaaggtgatcatggtcggtgacggtatcaatgattctccggcattgtctgcagcggatgtcggcattgccatcagtgatggcgcagagattgcacgcgagattgcagatgtgacggtgggtgcagatgatctccatgagcttgttactttaaagaagatcagtaatgggctgatggagcggattcacagaaattaccgtctgattgtaggcattaacacctcattgatcgttcttggcgtggcaggggcatttccaccaaccacatcggcattgcttcacaacacgtccacacttctgatcagcttaaagagcatgaacaatctgctcgatgaaaaggaagaagtaacagaagaaaatgtagcagaagcatttgcataatggaaacaaaactgtctgattttcataaaataaaaagaatgagaataaggcaggaacaaaatgaaagaattatatcctggggatcagggaatctgggtacaatatctgcagctggcattgcagcgtgcaggacagcaggtgatgctggatggaatttttggaccaaagacctgtgcagccgtggaaaaagtaatgggcagcagcggaaagtgtgcggtaaaagaagcacagtggaaccgtctactgccctttttacgtgggtatatcacacacgaggtaaaagcaggagatacctttttctccattgcgaaaatgtatgatacaacgatggagcgagtgatgcatgcaaatcccggaacggatgccggagcattacagattggaagtacggttgttgtaccactcagttttccgttggtttccggagaagttccatacacttccctgcttaccgggtggatcattgagggcttgcaggcacgttatccctatctgcaggtgggaacgatcggaagaagtgttatgggaacacccctgtggtcgctgcagttgggaaatggtccggtagaggtggggtacaatgcttcctttcatgcaaatgagagtattaccacaccggtacttttaaagtttgcggagcggctgctggaggcatatgcagacgaacgtatgtatgaagaactgtacccggagcggctgtttgaagagtattccctgtatcttgtaccattggttaatccggatggtgtggatctggtaaatgggcttttgacggaaggattttattatcgccgtgcggtccgcattgcgtccggattcccggatattccgtttccggacggatggaaggcaaatattcagggagttgatctgaatctgcagtttccggcaggatgggatatggcaaagaaaataaaatttgaacaggggtataaccgtccggcaccgagggattacgtgggacagacaccgctcagcgtcccggagagtattgccatgtttgattttacgagaaaccatgatttttccctgattcttgcatatcacacacagggagaagtgatttattggaagtatctggatgaggaaccggaaggcgcccgccgcattgcggaatattttgcaaaagtgagcggttaccggatcgaggaaacaccggcggcgtccgggtatgccggatacaaagactggtttatcaatttttatgaccgtccgggatataccatcgaggcggggctgggagaaaatccgctgccgatggagcagttttcgaaaatttataaagacaatgtgggaatcctgcttggaggaatgacggaacttgaataaaaaatgaggattacctctggtaatcctcgtaaatttttttgatgtgattgtagattttacttccaatggtagtatcaaacgttttgaccaatgcattgtttaatgcaagtttattttcggattcttccaccgctttatagatggatgtgtatttgccggccggaagtttttcgtcttttaattctgttcgtatttttttgcggattgcttccggaagttttttcttttccggcttctttttttccacaatttcttttgtctcttttacccctttcgtctctttttttgattctttgggaacgtgatccgattttttcttctttttctttgtggaggttcccttttttgaagaaacatcctttggggtggaaggggaagcaatgcttggctggcggaaggcttcgatgtttcttccgcgccagaaatcgacaatactgtcaaacccggtatcctggctgatgatgtaaaccggacctttttcccctttcccgatcaggaatccaagataggtggccagctggaaatccagataatttttagctaccttgtgtgtttcaatatattcgatcaccgctttggacgccatcatttctacatgtgtttcaaaagggatggacttgatgctgtctccgtaaaaaatgacaacacggtcagatgcagagagttttttgatgtctgttacaccatcgttgtgtacattttcatagtctacaagataaatgcccataggtattgttcctcttttccttaagatgtatccattatacgtcaaattcgaagggatggcaagaagggggatagggttaagaaagggtaaaggatagaggagcaggctggaaaacgaattctttatgctgaatgattggttgacggaagtgtggtgaaatgttataattattgaataacaagtttgatattgttggataattttcacaaaatcgaacggctttacgggaaggagaataaagttatgaagaacatgaaggtaagaaccaagctgaatctgattctggttctggtcattttacttgtggctctcgggagtgttgtttccgtcaaaaacatggaagatgtgaaagacaaagcactggaaacgatggatgcatcgtcccgccagagttatgatgattcgatcaaagagcaggtgggggtggtcatctcccttttgacagagataaacgaggaatataaggcaggaacgtataccctcgatgaagcaaaacagattgcggcagaggaagtgcgtcagatgcgttacggagaggctggttacttctggattgaccagtcagatggtacaaatgtggttctgcttggcagtgataccgaggggacgaaccgtatggataccaaggatgcaaaaggataccagatggtgaaagaaatcatacgtgtagcagtggaagatggtggaggatatacagattatgtattcccgaaagaaggagagacaaaaccttccccgaagcgttcctacagtgagtactttgaaccgtttgactgggtggtcggtaccggaaattatacggattatattgatactgccattgcaaagcaggacaaggtattttccagctatgccatgcaaaaggcaatcgccctgatcgcggtatgtattgtgatgcttgcggttgttgcagtacttgtttttatgatcgcacaggatattacaaagtcgttaaagaaagttgtcgcagagattgaagtgattgcaggcggtaattttgcccgcaagatgcagacgaatatgatgaaacggaaggacgatttcggacagctggcaggaacgcttgagacaatgagggaatcggtatgcggattgcttgcacaggtaaagaaggaagctgcaaatattgataacgttgtggaatcaatggataccaatatatcaaatctgaatggggaaattgaggatgtatctgcgacaactgagcagcttgctgcaagtacggaagaaactgcggcatcggcagagcagattaacagtatgacccagcagattgacggtgcagcaaaagagattgcggtacgtgcacaggatggggctacggaagcagaagaaatccataagcgtgcagcacagacgaaggaaacaacggtggagaaccggcggaaaatccagacgatgctggaagaaatccggggaaggctggaacaggcacttaaagaggcaaaggttgtggaacagatcggcgtgcttgcagattctatccttgcgattaccggacagaccaatctgcttgctctgaatgcatccattgaggcagcacgcgcgggcgaggcaggaaagggatttgcagttgttgcagaggaaatccgggtactggcagaacagtccaaagatgccgtggcaaatattcaggctgtgacggaaaacgtggataatgcagtaggaaatctggcaaaggattccaaccatctgctggattttgtagatacggatattgtgaagagttttgacgattttgagaaaatggcagacgattataacatggatgcctctaaaattaacgatctggtatcggatttcagtgcgacttccgaagaactggtagcatctatttccaatattacagaggcgattgacggaattacctctgcatccaatgacagtgctgcaggtacaacaaatattgcacaaaaaaccgtttcgattgcaggcggatcggcagaagtcatgaaaggggttaagacagcggaagcttccgcagaagaactccgcaggaatgtaagcaactttgtgatcgaagaataagaaaataagaaatataaaagggaattttataaaggggaaagtggttcatggactgctttccctttttatctgttcacaaaatgaacacagagtttacattttttacacacgcaaaagcgatacactgtttccgtaaagggcattttgttgtccaaaaaagaaaaggagcatttcgctgtgattgagatcaataatcttgtaaaaaaatacggggatcatacggctgtcgatcatctgtcactcgttgtggaaccggggaaaatttatggttttctggggccgaacggagccggcaaatcaacaacgatgaatatgataaccggatatctcggtgcgacaagcggagagattaaaattaacgggcatgacattttaaaggagccggaggaagcaaagaaatgtatcggttatctgccggaacttccgccactgtacatggatatgacggtaaaggagtatctggattttgtggcagatttaaaacagttggaaaaaagtctgcgtaaacgatatgtggaagaggcaatggaaacaaccggtacgacagaagtggcagggcgtatgatccgcaatctgtccaagggataccggcagcgtgtcgggtttgcacaggcgatcctggggtatccggagatcattatactcgatgagcctacggtcggactggatccgaaacagatcatagagatccgtgaactgatccggcatctgggagaaaaacatacggtgatcttaagttcccatattttgccggaaatttctgccgtgtgtgatcatgtgtttattatttccaaaggaaagcttgtagcgagcgactctacggagaatctggtaaatctgatgtcgggtgcacaggagattgaactgacggtgcggaccggtgccggggaagcagccggatacttacagggagaagaaaacattgcaagggttgagcaggcggatcatgataaaatccgtatttatgcaaagaaaggtgccgatgtgcgggaagaagtcttccggcagatggcagagcataacgttttggtgctggagatgaagacggtgacgaaatctcttgaagatgtattccttgagattacccaggaaggaggtgcacagtaatgtttgctgtgttaaaaagagaattccggtcgtatttccagaatgtgatcggctggctgtttgtggccgcccttatggcactgttcggactgtatttttatgtgtataatctccggcagggatatccgtatctgtattatacgttaagtgccattacgattatttttatgattgcggtaccgatccttacgatgcgcagttttgcagaggaccggaaaaataaaacggatcagctgatgctgacagcaccggtaccggtggcaaaggttgtgctcggaaaatatctggcaatgcttgcggtgtttaccgtggatattgcagttttctgtgtgacaccgctcattttacgggcgtttggaacaattcccatgggcgagagctatattgccatactggcgttctggttatatggagcagcttccattgcggtaggtatgtttatttccgcattgacggaaagccaggtgattgcggcagttctgacgtttgtggtactgtttatcagttatatgatgcagagtctgacaggacttatttcatcggatggaaactggctgacaaagattttaaactgtctggatctgtatgcaccgtttgaaaaattccaggggggctgtctggacattacggcaatcctctattatgtaacggttattgtattatttaatttctttaccgtgcaggccattcagaaacggcgttggagcatcagcaaaaagacattttcgctcagcgttttttcaagcagttttattgtcgtagttttcgctcttgccgtggttgccaacctggcagtcgatgcgctgccgacgagaattacctcggtggactgttcgtattctaaattgtattccattacaaaggatacgaaaaagaccatgaaaaaactgaaaagtgatgtgaccatctatgttctggcagcggaaaaaagcaaggacgcacagattgattccatgctggagcgttacaaagatctgtccgggcatatcagggtaaaatacgtcaatccgaagagtaaaccttatttttataaggactatacggacaatgcaccgaccagcaacagtctgatcgttgtcagtgacaagcgttcgaaagtgatagattattatgatatctatgattatcagtcaaacatggattattccacatattcctacaacaacgaactgaagggattcgatgcggaaggacagattacaagtgccatccagtatgtaacgatggatgcgaaccagctccctgtcgtataccagatcaccggacatgatgaggctacaatcggaagtgcattttcggatgtcatcagcaaatccaatatgacattgtcttccgtggaactgttaaatgaagaaagtgttccgaaggatgcggcagcgattattatcaatgcaccgcagaaagattttaataaaaatgatgcacagaaagtaattgattatctgcaaaaaggcggaaaagcgattatcgtgggaatgtattccgagaccgagatgccgaattttgcatcgattctggatacttacggagtaagctttaccacagggccgatcgcggataatgatgcacagcattattacaatatgggaggtccgctgtatctgctgccaaatgtaaacagcagttcgtataccggaagtctttccggcggatatgtatatcttccgatttctctgggaatcaattatccgcagaacagcacgacggatgacacggagagtacagaggagagtacagaggagagtaagacaacgtatacttctttactggatacttccgatgatgcggttgcaaagaacaatccaaacagtatgcaggattatggatacgaagatggagacgacaagggaccgtttagtgtcggactggcggtagaagataaagtcgatgatgatcacacgacgcagcttgtggtattcgcaagcccgtatgtattcagcgatgatgcaagtcagatgacgacaaacaatgcatcactgttttccgatgtgatcggaaatatgatcacggatacccagtcggccggcagcgtaattccggaaaaagagtacacgctcagtaatctgacagtaaatgcattacatgcggcacttctgggactgctggttaccattattcttccaatcctgttactggccggaggaattgtaatctttatggtaaggagaaaaaaataaagaatgaaaaagcagaaaatacagatgcttgtggtggtcattcttctggtgatctgcgttgttgcttatatttttatcagcaaaaacgcagggaaactggattccacagagaatgacggaccaaatgcatccatgggaaatgtgacagaaagtgttctggaaacagagacagaatctgtccagactacagaaacaacagaaaaataattatttcttgtgcgtaagtttgtataggaacgtataagcccagatcagtaccgggatcacgaaggtggcaaagatagaagctttgaacattttcatggttccggtattgtctgtgatggcgcataccagtgtacttaagtacagtacaaccagtaaaatgatgccgatgatggcaagaatctgttttccttttttcatatgaacaacctccttatgtattcatgatacgggaaagggcaggtttcgtcaagaaagggcttggaaaatggcagacattttgttataataaacatacatgcatcaaggcatgtaaattcgtaagtgataaaggtggtataaaaatggctatattgcaggattggcagaaaattgcctacaatgagaacgcaagtcagggggaacttcagaaattctggcagagatatttcctgttagagaagggtgtgtatgagaaattattgacaaacccggatgaaaaagtagaaggaacggtaaaagaacttgctgataagtatggacttaccattctggagatggctggtttcttagacggaatcaatgacagtctggtaaaagacaatccaatcgaaacaatggatgaaaataccagggtaaatctcgttttcgataaggaaaagctgtacaagaacatggtagatgccaaggctgactggctttacaatcttccgatgtgggatgatatttttgataaagagacaaagcacagactgtatatggaacagaagaaatccggtacggttatcgttggcaaaaaggtgggacgtaatgatccgtgtccatgcggcagtggaaagaaatacaaattctgctgtggaaagaataaataaatttcaaattttgaaatacaaattcccggtatcacaaaaactgataccgggcttttttaaaaagaagaacaggaacagaataagaccatgtggtttggtacatactgatgtggcagcgatgatttaacacaaggaggtatgtaagatgacaaaactggattgtaatgtggtaaactgttcttataatgcagacaactgctgcagacgaacggatattcaggtggaaggaacacaggcaaaaacttcttccgaaacctgttgtggaagttttgcaccgaaaggatgtggatgtcagtcctgtcatacaacagatgtcaaaaaagatacaaccgtcagctgtgaagcgtgtgagtgcaaattcaacgaggatcatgcctgtcatgcaggacacattggtatttccggcggacatgcagacagcagcagggagacagagtgcggcagttttgtatgtagctgctgacaggggcatatgggcggcagactgccgccctgccagtgaaaggagaaaaggaatggaacaactaacggattacagtattaattttccacatttacatatttatctgcaccatgtcggaaaaaatatcatgatcggaaatttttcggtggcatattatggaattgtgattgcaattggaatgttagcaggacttggaatcgcctgctggatggcaaaacggaccggccagaaaacggatacttattttgacctggcactcgttgccattatctgttctgtcattggggcgcgggtttattatgtgatattccgttgggatctatacaaggacgatctgctgagtgtgttcaatctgcggcagggaggtctggcgatttacggaggcgtgattgcggcaatcattaccgtgtttgtgttttcacgggtacggaaactgtccatgggtctgctttgcgataccgcgggacttggtctggtcttaggacaggtcatcggccggtggggaaatttctttaacagggaggcatttggcggttatacggacgggctgtttgccatgcagctgccgctttctgccgtccgatcctcggatgtgacggacagcctgctgcagcatgtggtggaagtaaatggtatctcttatatccaggtacatcccacgtttctctatgaatccttgtggaatctgattcttttgatccttctgatcctgtttaccagacacaagcggtttgatggggaagtctttttgctgtatctggcagggtatgggattggaaggttctggatagaatccctgcggacggaccagctgctgctcccggtcatcggttatccggtgtccatggcacttgcagcgcttcttgtgatcgtatcggtttcctggatcatcatctggcatatccgtcggcacaaaaaaacagcataaaatacatctggatgggaaaatcctccacacgtggaaacgtgtggaggattttttttggaaaaaatacggcaatcgtctatccattttcaagaaagactgggaaaaacccttgatttcagggtggttttagggtattatggatacatagtggtggaaagtggagtaaaaaatccactttgtggtgcaaagtggtgaacaaacagaagttcagaaaatgaggaaggggaggtgagtctgccatgtttatgggcgaatacaatcattcggttgatgcaaaaggcagactgatcgtaccttccaagttccgggaacaacttggcaatgaatttgttgtgacaaagggactggatggctgtctgtttgtttattcccaggaagaatggaaacggattgaggagagtcttcgtgaaaaaccactgacttcaaaagatgcaagaaagtttatgcgattcttttttgcaggagctgcaaactgcgaagtggacaagcagggaagaattttacttccggcgaatctgagggaatacgcaggaatcgataaagaagttgtttccgtcggtgtattcagtcgtgtggagatctggagcaaagaacggtatctggaaaacaacgattttgacgatatggatgagatcgcagagcatatggcagagttgggaattggaatctaaatatggagtttaaacattattccgttcttttgaacgagacaattgaacaattacatattcgcccggatggcatttatgtggatggaacgcttgggggaggcggacattcactggaaatatgcagacatctgacaactggaagactcatcggaatcgaccaggatgcggatgccattgccgctgccacagagagactgaaagattatgcagacagggttaccatcgtaagaagcaattatgcacagatggcggacgtgttgaagaatctcggaatcgaaaaagtggatggaatcattctcgatctgggagtttcttctttccagctggatacaccggaacgcggttttacctaccggagtgaggatgcaccgctggatatgcggatggacaagcgtcagcgcctgaccgcaagggacattgtgaacgattacagtgaagcggaactgttccgcataattcgtgattatggagaggatcggttcgcaaagaatattgcaaagcatattgtacaggcgcggaaagaaaaaccgattgaaacgaccggggaactcaacgcaatcatccgtggagccatcccgatgaaagtacaggtgaccggaggacatccttccaagcggacgtatcaggcaatccgcattgagctgaatcatgaacttgatgtacttcgcgatacgttagataccatgattgatttgttgaatgatgggggaagaatctgtattatcacatttcattcactggaagaccgtattgtaaaatccaacttcaaaaagaacgaaaatccgtgtacatgcccgagcaattttccggtctgtgtatgtggaaagaaatccaaaggacgtgtggtgacaagaaagcccgttctgccttcggagaaggaactcgaagagaacagcagatcaaagagtgcaaaattacgcgtgtttgagcgtgtggaagatggaatggaaagcagggaagcgttatgagcagtaaaaactattatgtaaacgggaataccgtgagagaactggatacaccggttcggcacaatcagagaacacgcaaagaaatcgaagaggcaagacgccgcaaaaaccgtagaaatgcagcgagaaggaatcgccagagagcgatggagatgagccgcggttatgtggtatttcttacggcatgtgtagtgatcactgcactgactgccgttttgtttgtacaaatgcagtcgcagatgacgacacgaatgaaaaatgtggcaaatctggagagtcagctggcagatcttcgcgcggacaatgatgcacgttataaaaatcttacaacttcaacagaccttgaacatatcaaaaaagtggcaatgaaaaagcttggcatgaaatatccaacggaaaaacaggtggtatattataccgtggaaaacagcaatttcatggatcagtatgaggatattccatccaaataacaggagtcagatgtgagaagaaagagaagaagaccggcacagaaatttaaccggaagatgcggacaaaactgatggttttgttttcccttattctggctgttttgtgtggactggtcggcagattgacttatattgaacacacgaaaggggaaacctatcagaaaaaagtactttccatgcagtcctatgacagtaaaacgattccgtaccagaggggagaaatcatcgaccgttccggtacggttcttgctaccagtgtggcagtctataatgtgattttagactgtaccgttgtcaatgacaaagaagagtatgttgatccgaccgtggaagcactggtgaaatgtttcccggaattggatgaaacggagatccgcagaattataaaagagaaaaaggataaacgctatattgtacttgccaagaaagtaccatatgacgaagtacagccttttgtggaattgcaggatgccgtagacaaaaaaggaaacaaagtaaatccggatatcaagggcgtctggtttgaaaaagaatatcagagaaattatccgtttggatctttagcctcttccgtgattggttttacttcttccggtaatgtcggcacaaccggactggaaaattattacaacagtacgttaaacggaatcaatggacgggagtacggttatctggactcggacagcgattttgaaaagaccgttattgatgcacaggacggggatacgctggtgacatccatcgacgcaaatattcagtccatcgttgaagaaaaaatcaaagactggaatgaaaaataccgggacaactattataaaggaaccggaagtatcaatacggcagcgattgtcatgaatccaaacaatggagaaatccttgccatggcagattatccgaatgtggatctgaataacccgagggatctgggaaaatggtacaccaaaaaacagatcaagcgcatgtctgaggatgacaaaatggatgcgctcaatgagatatggcagaatttttgtgtatcctcaacgtatgagccggggtctgtccaaaaaccgtttacggtggcatgtgggctggagacaggtacaatcaacaacaaaatgacatttgactgtgatgggtacgaggattttaatggacagaaggtgcgctgcgtggcgcgctacggacatggaatagaaaccgtccggaagacacttatggattcctgtaatgatgccatcatgcagatgtcatacaaaatcggaaagaatcattttacagagtaccagtccatctatggatttggacagaaaacgggaattgatctgccgggagaggcaaataccgcatctttgatgtatcaggtggaagatatgaaaccgatcgatctggcaaccaatgcattcggacagaactataactgtacgatggtccagatggtgagtggatttgcgtcactgatcaatggtggaacttattatcagccgcatctggtaaccaaaatcacggattcgacaggaaatacgatttccacggtggaaccgaaagctgtgaaacagaccatttcccagagtaccagcgataaaatccgggattatctgcagagtgtcgtaaaggaaggtacgggaaatacggcaaaagtggatggatattctatgggcggtaaaacaggaaccgcacagaagtttccgcgtggaaacggaaaatatcttgtttcatttatgggatttgccccatacgacaatccgcaggtactgatctatgtggttgtgaatgaaccaaatgtggcagaccagccgcatagcgtgtttgcgcagaacattgcgcgtgagatcttagaagaagttcttccgtatatgaatatttatccggatgaaaagaagaccggtgtaaacaagggctatgatgttaccgggtcaaaagacagctcacagtataccggaaagcataatggaaccaagtccagaaatgaaaagaaaaagaagaactaaagacaaaagagttcttagaaaggctctgcagtgcatatgctttaagaaaaggatcgtggtgcttttcatggagtggaataaaacctatcaccgcagaaaaatatgtatcatattcttttctgttgttctgatgtcgatggttttgtgcgggcgtctggtctatcttatgctttttgagggaaaatattatgagacgcaggcaaaagatctgcagcagagagaaagaaaaataaaagccgccagaggcaaaattctggatcgaaatggtgtggtactggcagataacaaatcagtctgcaccatttctgtcatacataaccagatcaaggaaccggaagcggtcattgccatgctcgtaaaggagcttggaattccggaagaaaaggtccgtaagcgggtagaaaaatattcgtctctcgagaagatcaaaagtaatgtcgataaggaaaccggaaaccggattcttgcctatggttatgcaggggtaaaagtggatgaggattataaacggaattatccatacgatacgcttgcctcaaaagtgctggggtttaccggcggggataaccagggaattatcggactggaaagtgtgtacgacaaatatctggagggaaccgatggtctgattctgacgacaacggatgcccgtggtgtggaagttgacaatatcggagaggaacgcaaagaacctgttgccggaaataatctgcgcacatcattggatgcaaatattcagatgtttgccatgcaggcggcaaataaagcatatattcagaaagaagcggattctgtcagtattattgtgatgaatccttccgacggagccgtcatggcaatggtggattatccggaatttcatctgaatgagccgtttcagctgattgaggagtataaggagtatgagggtaccaaaaaggagcaggaatactgtaaccggatgtggcgaaaccagtgcatcaatgatacctatgagcccggatcaacatttaaggtgatcaccgcggcagcggcactggaagaaggtgtggtttctttggaagaccggtttcactgtccgggatacattgtggtggaggaccgcagaatccgctgtcacaaaacgaccgggcatggagcggaaagctttgtggaaggaatcgaaaattcctgcaatcccgtgtttatcaatgtgggacttcggatcggtgccgatcacttttatgactattttgagcagttcggtctgttacataaaacggggattgacctgccgggagaggcttcgaccatcatgcacaagcgggaaaagatcgggctggtggaactggcaaccatctcattcggacagtcatttcagatcacaccgatccagctggcaaccaccgtttcttctattattaatggaggaaaccgcgtgacaccgcacgtcggaatgcaggtggagaatggagacaaaaaagtaataaaaacgtttgattttccggtgcaggagggaatctgcagggaggaaacgtcggaaaaaatgcggtttttgctggaaaaagtggtatccgagggaggcggaaacaaagcatatattgaggggtatgagattggcggaaaaacagccacttcacagaccctgccccgttccgcacataagtacatctcctcgtttctggggtttgcaccggcggatgatccgaaagttctggtacttgtgatcataaggaacccttccggtgtttattatggcggtaccattgcggctcctgtggcaaaggaaattttcgaaaacatactgccttaccttgaattggagcagtaaataccttataatcgtaattatacgcaaagatggaggttgatcgtaatgaaacttgaaggaaaaaaggttctggttgtgggagccggaaagagcggcattgctgcgtcagaactgttattggataaaaaaattgaaactgttctctatgatggaaacaaggatctggatgtagaaaagttatatgaaaaggcaccgaaactgaaaggaatgccggtgcttttgggggagttgacggatgagcagctgcgcgcatttgatgtagcagtcttaagtccgggcgtcccgacggatctgccggtcgtagagcggatgcgtgcacagaacgtctgcatctggggcgagattgaacttgcatattccttcgcaaaaggcagactgattgcaatcaccggaacaaacggaaagaccactacgacagcattgaccggagaaatcatgaaaaattatttcaaggatgtgcgcgtggttggaaatatcggaattccgtatacttccgaggctgccacaatgacggatgaaaccgtaaccgtcgcagagatcagcagtttccagctggaaaccattcatgagttccatccggaaatatccgcaatcttaaatattacgccggatcatctgaaccgtcatcacaccatggattgttatattaagaccaaagaggcaatcaccaccaatcagacaaaggatgaggtctgtgtgcttaattatgaggatgaagtgcttcgggcattcggagagagcgcaccggtgcatgtggtctggttcagcagtgcaagaaaacttgctgaaggattttatctcgacggagaggaaatcttttatgcgcatgacggaaacaccgagaaggtgatcaatgtcaatgatctgaatctgctgggacggcataactatgaaaatgtcatggccgcaactgccatgagtgtgaatttcggagtgccgatggagaaaatcgtggaggtgctgaagcgtttccaggcggtagaacaccggatcgagtatgtgaccgaaaagagaggggttcgtttttacaacgattccaagggaaccaacccggatgccgccattcagggaatccgtgcgatgaaccgtccaacgcttctgatcggaggcggttatgataagcagtccacatacgatgagtggattgatgcatttgacggaaaagtaaaaaaactggtgctgatcggacagacagcagagaagattgaagtgtgtgcgcataagcatgggtttatggataccgtgcgctgtgagacctttgaggaagcgatccgttactgctatgaccatgcagtatccggggatgcggttctgctttcaccggcatgtgccagctggggcatgttcccgaactatgaggagcgtggacggatattcaaagaaatcgttcgtggattagaggagtagtgagtcgtgccgaaacggagacgtggggaaaagaaaacaacatattttgactataatctgttgtttatcattattttcctattgtgttttggactggtgatgctttacagttccagttcgtatacatcagcaaataaatatggggacagtgcacattatctgaaactgcaggcgcgaaatatcgcaatcggtcttgtttttatgttctattttgcaaagaaggattatcatgtgtggagaaaattcggaaggctggcatactggggagccctggggttttgccttgtcgttctggcaaaggtaccggggctgacgcgaagctcccacggacagtcccgctggattcaggtcggaccgatcggctttcagccatcggagcttgcaaagattgccatcattatttatctggcgatgctgatcgagcgtattcccaagcagctggataaggtttcaagcatggcaaaagtaggaatccgtctggtgccgcttgttttgtttgtcgcggtaaacaacctgagtacggcgattatcattcttgggattgctgtctgtatgctgtttgtggcaagtccgaagtacaaagagttttttgtggttgccgtgctgggggtgctgtttattttcgcatttatcaatatcgcgtcttaccggagtgaccgtgtggaggcatggaaacatccggagacagcgggagataagggatatcagaccatgcaggcactctatgcaatcggatccggcaagctgtttggaaaaggactcggacagagcctgcagaagctgggcaatgtgccggaggcacagaatgatatgattttttccattatctgtgaggaactcggccttttcggtgccgtctgtgtcattcttctgtttgtcctgatgctctggcggatgatggtcattgccaataatgcaaaggatctgtacggggcacttctggtgacgggcattatgtcacatattgcgattcaggtagttttaaatattgcggttgttaccaatacgattccgaataccggtgtcattctgccgtttatcagttacggaggtacctcgcttgtattccttatggcagagatggggcttgcgttgagcgtgtcgaagggcatccgtctggatacgatcgagtaggtttgtcatgattaaagaagaacgaagaaaaaagaaaaaaagaaaaaacattctgcaggtgatactgggaatcctgattgtgcttgcgctggcagttctgatcatttttaccgtttttaaagtaaaaaatgtggaggtggagggaaacaaactctacgatgccaaagtgattgaaaaagcagtattaaacgatgagtattcctggaattccctgtatgtattcctgaaatataaatttgtcaataccagtgaagttccgtttgtggacacgatggagatcagcctgaaagatccgcagacgctgcatatcaaagtgtatgagaaaggaatcatgggatatctgtatctctcctcgatcaataagaatgtctatttcgacaaagatgggattgtgacagaattgtctgaccgtgtgattgaggatacaccgcagatccttgggattgactgtaaaaaagtagtgcagtatgaaaagctgccgatcggctcgaagcggctaaagcagcttctgacgctgacgcaggctttaaaacgcaatgatctgatcccggattccattacctatggtgtggaaaatgagccggttctgacatacgggacggttaaagtttccatgggttccctggaatttctgacccagaaagtggagcggctggcaaaaatcaagccgcagctgcagggaatggaaggaacactacatttagaaaactggacagaagaaacgacaaatattgtgtttgacaaaacggaaagttcgaaaaaagataataaaaaatcataattttcggttgattatttgtatgaaaaattatattatagtctatatgagtacgtatgaaacatttttatgtttcacggtgccgcagggctataggaaagaggaggaagaaccatgctggagattcggacaacagagacagatacgagtgccaaaattatcgtgattggtgtaggtggtgctggtaataacgctgtgaaccgcatgattgatgagaatataggtggagtcgaatttatcggagtaaatacagataagcaggcgttgcagctttgcaaggctcctacgttgatacagattggagaaaagcttacaaaaggacttggtgcaggagcacagccggagatcggcgagaaagcagcagaggaaagtgcagaagaattatccgctgcagtcaagggtgcagatatggtattcgttacctgtggtatgggtggcggtaccggtaccggtgcagcaccggtcgttgcaaagattgccaaggagcagggaatcctgaccgttggagttgtgacaaagccatttaagtttgaggcaaagaaacgtatgatcaatgccgtatccggtattgaaaaactcaaagagagcgtggatactttgattgtgattccaaacgataaacttttagagatcgttgacagacgcacttccatgccggatgcattaaagaaagcagacgaagtattacagcaggcagtacagggaatcacagatctgatcaatctgccggcacttatcaatctggattttgccgatgtgcagaccgttatgaaggacaagggtatggcacatatcggtatcggtaatgccaagggcgatgagaaagcaatcgaggcagtgaaacttgccgttgcatctccgcttcttgagacaaccatcaatggtgcaagccatgtaatcatcaatatttccggtgatatttccctgatggatgcaaatgatgcagcaagctatgtacaggatctggcaggagaagatgcaaatatcatctttggtgcaaagtatgatgagaccatgacagatgaagctacgatcactgtaattgcaaccggattggagaatccatccatgaagatgaagccacagcagcaggcgggtggaatcggtggccgtatggtatatccgaatacaaacaatgtccgtccgacaggttccgttggaattgtcagccgtgcagctgcttctggaaataatagttttccgggggtcaataacagcaattatgtcaatacaggtaccggtgtgggaagcagaccagtcaatcagccgcagccacaggcaccggctccttccgcttcaaactattccgggattcagcgtccgaagccggtagagagtaatgtaaagccggtagaaatcaatattccggatttcctgaagaaccctagaagataaaatcgcacaatatgtcgataatttccaaataacaacctcttgtttttgccaaattatgaggaatatttttcttataataggagcagagacaggaggtgattttttatatatgtattctatattgatatctttctgaaacaaaactttctgatgaattttcttgtattatcccttacctgtgtattttgcaaaagtgcagtctgtcaccggaatctgcgcatgttggctgcggcggtttccggcacgggacttgaagcgtttggactgatggtgctgccttatgcaatttccgttctgtgtactgccatcggcatcgtgccgcttatggtttttcttgcgtttggcagggaaaataaaaaacagaggatggtgagggttttaagcagctggttgtctattgtattgttaaacggagtggcaactgcagtttacaatctgacgggactggaaaatctgtatctgtataccgcattggcaacggccggaatcacttacgtacttgtcaaaaatcttgtggtgtcggtgcagaggcaaaagcgacagatgtctgtggttctgtataacaaaacggtgtcggttccatgtatcggattgctggattccggcaatcttttaaccatgccattaagtgggaatccggtacatattgcagatgcagccctgctgcagaagcttgtcgatgaaaaaacggtacaaaaggagattccataccgtgcactcggaaatccgcaaggaaaattgcaggtgtactgcatggatgggatgaaagtggagacggagccggcaaaattctgtgactggaaacaggtatgggttggctgcgcggaaaatggggtgctgtgcaataaaccgtatcagctgattctgcatgcatcggtggcagaccactgtggctgcacaaaagatccatcccaaatgacaaaaaaactgagaaaggagaaacgtaatgttttcactgtttgaactggtgtggaagagaatccgcttgttttttacggatgatgaggttttttacataggaggggcagatgtactgccaccacctttggagcgggaacaggagaaccgctgtcttattgctttaagcgggctgcatggggacagtgaacccatgacgcgcgaagacgcaagaaagcagctgatcgaacacaatctgcgtctggtggtatatctggcacggaaatttgaaaataccggaatctgtgtggaggatctgatctccatcggaacaattgggctgatcaagggaatcaatacatttaatccggaaaagaagatcaaactggcgacttatgcgtcccggtgtatcgaaaatgagattcttatgtatctgcgcagaaataataaagtgaagctggaggtatcaattgatgagccgttgaatgtggactgggatggaaacgaacttcttctttcggatattcttggaaccgatgaagatatcatttaccgggatatggagaatgaggcggagatcatgcttctccgcactgcggttaatacgctgactccgcgggaaaaagaaattatctgtctgcgctatggaatcggaagaaaagacggcagggaaatgacccagaaagaagtggcagacctgcttggaatttcgcaatcctatatttcgagactggagaagaaaattatggtgcggctgaaaaaatcaattcaaaataatgtgtaagtgtgctatactaattacataaaatttgctctgaaatagtaaaatttatatgcaaaataacaaggacagcaggatgaaagggcgtggtttttatgaagattgaatttttaggggcagaccgtgaggtgacgggaagctgccattatgtggcatttggggagactcattttctggtggactgtggtatggaacagggggcggatctgtatgtgaatcaggagataccggttaacccggcaacgattgattatgtgtttgtgacgcatgcccatattgatcattccggacttctcccacttttgtataatcacgggttccggggaaagatttttgcaacaacggcaacctgtgaactgtgtaatatcatgctgaaggattcggcacatattcaggaatttgaggcagaatggaaaaaccgcaaggcgcggcgtgcaggaaggccggaagtgacaccgatgtataacatggaggatgcgcagggggttttagagcatttcgttccgtgtacataccatgaaacggtgcagatctgcgagggactgaccataaggtttgtcgatgcggggcatctgcttggctcctcctccattgaaatatgggtgactgaggatggcgagacaagaaaacttgtcttttccggggatattggaaactgcaaccgtccattgatccgtgatccggaatatcttgaggaagcggactatgtgatcatggaatccacttatggaaaccgcaatcacaatacaccgccggattatgcggcagaactggcaaaggtgatgaattccacgtttaccaaaggcggaaatctggtcattccggcattttctgtcggcaggacgcaggaaatgctttactatatgcgccggatcaaaaccgaggggctgctgccggagtatccgggatttgaagtatatatcgacagtccgcttgccgtggaggcaacaaatatttttcataagagtgtggaagagtgctttgatgaggaagcaagacagctggtacagtcgggcatcaacccgatccagtttccgggactgaaagtggcagtttccagtgaagaatccaagatgatcaatttcaaccagaaatccaaagtgattatctcggcttccggcatgtgcgaagccggtcgtattcggcatcatttgaaacacaacctgtggcgttcggattctacgattctgtttgtcggttatcaggtgccgggaacgctgggctattctctgttaaacggagtcaaaaaggtaaaacttttcggagaggaaattgaggtcaaagcgagcatcgtaaaccttccgggtatcagcgggcatgcggaccgggatcatctgactgcatggattgcaaactttaagaagccgccgaagaaagtgtttattgtacatggcgaggaaaccaccgcggtagagtttgcggaacatgtcaaaaacgatgtgggatttgatgctttagctccatatagcggggatgcgtatgatctgcttaccggagaacagatcgcacagggcagcagacagcttgtggagaaaaagacacagggtgtttaccgtgcaaaatccggcgcgtttgaccgcctgatgattgcgggagaacgtctcattgctgttataaaaaaatgtcagggcatggcgaataaagatcttggaaagtttgcggatcagatcaattcgctctgcgataagtgggatcggtaaatttgagggggaagcgggacttacgtcccgcttttcccatgtccggaataaacggatgaaaatgaataaaaaaacagcacatgggaatcctttattataaatccaattataacggaggaatcccatgtctacgtacaaagttgaaatctgcggggtaaatacggcccagctgccaatactgaaagaagaagaaaaagatgaacttttcaaaaagataaaagccggcgacaaggcatccagagaaacctatatcaagggaaatctccggctggtattatccgtgatcaaacggtttaataatcataatgaaaatgtggacgatctgttccagattggctgtatcggactgatgaaggcaatagataattttgatacgagtgtcggggtgaaattctccacatatgccgtcccgatgattatcggtgaaatccgccggtatctgcgggataacagcagttaccgcattccgcgttcactgcgtgatattgcatataaagccatgcaggcaaaggaacggctggcaaaaaatgcacaaaaggaaccgactctcgaagagattgcagccgaatgtgagattccggtggaggatgtggtgtatgccctggatgccatccagacgcccttaagtctgtttgatccggtttatacggatggaggggacaccctgtatgtgatggatcagatttcggacaagaaaaacaaagaagagcactgggtggaggatttgtcactttccgatgccctgtcacatctgaatgaacgggatgagcatatcatccgtctgcgtttttttgagggaaagacacagattgaagtcgcggatgaaattcatatttcgcaggcgcaggtgtcgcggctggagaaaaatgcgttaaaaagtatgcaggggtatctgcgtacatgatagcggcctgttgtaaaatggttttgttattgctataatgtggaatatacaaaacggagaggaaaagaaatatccggcagtagaaaattgcattcttgctttttgcggtgtactgtgctatactgtcaaccgttgcagattctgtaaacaggggattgcacgaaaaattaccgagtgttcgagaccttccactcgtaaaacaaaactaaaggagacaaatggatatgagagacaaaaaggtaacatttattgttcaggctgctgtgattgcagcactttatgtagtgctgacttttgtagccaacgcactgggacttgcatcccacacgattcaggtacgcttttccgaagcactgtgtatcctgcctgtttttacgccggcagcgattccgggactgtggattggctgtctgcttgcgaatctgctgacaggcgccgtgatctatgatgtcattttcggaagcattgccacgctgctggcagcggtatgtacctatctgctgcgcaatcacaagattgcatgcacatttccgccggttatttttaatatgattattgttccgttcgtgctggtctatgcgtacggtattccggcagtatatttccacggtgtgaatgtaaccatcccgtttaatgccatgacggtcggaatcggagaggtgatttcagtatgcgttcttggaagcattctgatgcgtgtacttgcaaaatacagaaatgtcatgttccgtgccaccgcacaataaaaaattatatctgatagaaggttctggaagtccctgcgagagcaggggctttttattttaagaaattctgtaaataagccagacaattttaagaaaaccttaatgtcattccaaaataacgtatgttatcataaatgacaggaaaccgtaaagaacatttatggaaggagaagattatgaaaattagaaagacaatctgcagtctgcttctggtatgcctggcatttttaggcatattttgtggcagagcaaatgtatatgcagatcagaaacaggcattgtcggcaacggtgactctgctgaaacaggaaaaagactgtgtcgtacaggtggaggcaaaaaacagcggggcggattttaccgggaaggtgcgtctggtgttttccggtaccgacaactccaacggctgcgcatttgaacagcgcctgacattgccgcagaacgggaaaaaacagtatacaatgaccattccgtatgcggatgtcagccagacacgcggaaacggaatcgtggcatttatcgatgaaaagggaaacgttgtggcaaaggaagcatttgccagtatttttggcaaagaaaagcgcggtattggtgtgggagtgctttcggatcattatgatgcgcttggctggatgagcatgagcggccagacctattatcttcacggaaaagaccagaatgtatatctgacacagatggacgcggatacattgcaggcgcagctggatgaactgtattttcttgtgattgattcctacgatgtgagttcacttgggaaagagaatatcaaggcaatcgagaaatgggtgaaaaacggtggatggctgctgattggaaccggagagcgcggcaaagatacactgggtggttttgattcctcatttatggaggtcagctgcaaaagcgtcagcaaagtgggagaagaaaatgaggtatcgaaagaaatgcagcaattgggaagttattccggatttaccgggattgatttttcacagatgccggttgcaaagctgcagcggaacaatacaaatgcaagcaaaagcgaagcttatccggggtgggtgtatgcctgtggggatggtgccatcggtgtatgtgccatttcttttggcgaaaaacagatgcagaaagtttccccggatctgtgttacggaatttatgaccaggtggcaggatattccatgagctattcccagtatgtcaatgacgaggaatggggatggagtggggaaaatgcattcggtgtcattgaccacctcaatacggcattggatttttcctggctgaaagttctgatagtggtctatgtgatcgttgttggaccggtgctttatcttctgctttgcaagatgaaaaaaagagactggtactggttgggggtaccggcgcttggcataatttttatcggtgtggtatttatcggcgggcggaatttaaagctgcatgagacacgggtttattcggtgaccgcacagcaggcggatggaaaaagtaccactggtatcgccacctattacaatgcgtatcattccggggtaaaaccgtggaaggtacggctgaatgataattacgcatatggtggtacaggtctcagtgaatcttatagtatggcatcttccggcagggtatatgaagaccgttatcactatttggtggaatatgacagggggctgtcccttggggtaaaaccgcagagcaattttgaaaatgcctatctgtttgcggcaggaactgccaaaggatgtggaagcatagacaccagtggtctggtgatcacgcagcagaaacaggggggaaacataacaaacaacacgtcctatgatttcccttatcttgtctgcgtgtcggatgatacggtcatggtattttcggatgtaaaagcaggtgaaaccataacgatagacgggaaaagtaaaaaaccactgctgtcccagcagatttcttattttgatgatgtctacagcgtgttatcgcaagacaacatgaatggaaatacatattcgtataagcataaggatatggcagccgcactgtatctgggactgtgccagatccggcggcagaacgatgtgtcgggtactgttgtagtggaaggagtaaccgcagactacggaaaaaccatagagagcaggtgctcggaaatttcgtttggctgtctgtatacgattgccggtcaggaggtgtccaatgcttcaaattagtcatttgtataaaaactacggaaaatttcaggcggtcagggatctgaacctgcatgtgcccaaaggggatctgtttggctttgtgggaccaaacggagccggaaagacaacaacaatccggatggtatgcggacttatgccgccgacagaaggaaccattacgatccatggcgtggatgccctgctgcatccgaaggaaatcaaaaagcagattggttatgtgccggatttctttggtgtgtatgacaatttaaaagtcagcgaatatatggatttttacggttccatgtaccgtatgacttccagggagatcactgcggtatccaatgatctgctggaacttgtcaatctgtccgacaaaaaagaggtttatgtggatacgctttcccgcggaatgaagcagcggctgtgtgtggcacgtgcactcatccacaatccttcccttctggtactggatgaaccgaattccggtctggacccgcgtgcgcgtgtggagatgaaagaactattgcagaatctgcgcagcatgggaaaaaccattgtgatcagttcccatattttgtcggagctcgcagagatgtgcaacagcatcggcattatggatcacggaaaactcgtagaagcaggaaacattgaggatgtcatggaacatgttttcggtggaaaccggatcgtggtttcggttcacggggagatggagccggcagtgcgcatgcttaaggaacacccccagatccgtgtggaatcggtgggagaaaaggaaatccatatctcgcatgccatgaaagaggaagaaatcgcgcagttgatcgcacagatgatacagaatggaattatcgtgacaggattttataaagaagagggaaatctcgaatccctgtttatgcagctgacaggagggcaggaagatgagaattaatccaatggtaaaaaaagatattaaagtacaggcgcgcagtatgcggatctgttgggaaatatttgcttatgaggcgattatggcagttgtatttttctttgccatgtttttgttttcccagcagatgacctattcgtctgcaaacatatacagcagcattgtctggctgtatccggcacttgcggtcacgcagatttttattctgggagtggtagtcccggtgcgcacggcttctgcaatttcgggtgagaaagagcggcagacctttgatattatgatgacaaccagcatgaccggattttccattattatgggaaaggtgctcaccgcgatgatccagagcatgttttatgtggtggcaggacttccgatcgtagcactggcatttgtcatcggcggactctcatggggcaatctgttctggtttctggcggtatcattactggtttcgttcgtttctgcaagtattggaattttgtgttcttccatctgtaaaaaaacgatcagtgccataattttatcgtatggtatctatgtcctgctgtttatcggaagttttcttccctatctggtcacctcggttgtccgcatgtcaggtggtgtaccggaaaaatcctgctgggtgcttctggtcaatccgggcatgtatctgcttgaattttttacctggagtatgaccggaacatccgtggcggaagaactgatcacaaattacgggaaaacactttctgtttcgggtgctgccgtacattatggatggatggccgtttccacgcttttatttgtggcactggcatttgtctttcttctgattgcgatgcggcggatcaatccgatggcaggatatggaagaaaacatgcagggggaaagcagcatggatgaaaaagcatttctgttgcaggaaatccgttacagcaaaagaaaacagaacgtaaaaaagttcctgcgctatgaaagcacaggaattgccgcaggtggaaccatcgccatggtgctggaaggatgtgcggtgtttgtccctttttatacggtgcatgtgtgggctgttttggcagttttatgtggtgcggcagctggaggcatttatacggtaatgaagagatgtaccatggtacaggcagcacagcagatcgaccgtttcgggtttcaggaacggatcgtgacggcatatgggcgtatcggaaaagagggcagtatcgaccggatgcagcgcagcgatgccgtgcatatgttacaggaagaccatgcatggaaaaaggcgcgtgtttgtccggaccgaaggaaacttgtggcaatttttctttcccttgggctggctcttgttctttcgtttgtgccgtcccccgcgcataaacaggtgaaacagcggcatgccatccggcaggaagcccgggaaaaggaaaaagaaatccaaaaagtgatggatgccttaaaacagaccgacacctcttccatgacaaaagaacaaaagaaagccctgcaggaactgatacagtcactggccttatcgcaaaaagaaatgcagcaggcagatacgaagcaggcactggcatctgccgggcagaaactttcttacaagtatggacaggcggcacagatttccgggacggatgcccttgcatcggtacttaaaaatatccaggtgaataccaatacaggaaaccagctggcacagggggatgtacaaagcactacacaaagcggtacgcagcgtggggaatccacgcagtcttcggaaaccagttcccaggattccggggatggggaagattcgggcagtggaaaggacggaagtggaagtggcaatggaagtggaagcggaaacggcaaggggacaggaagcggaaacggaagtggaacaggaaacggaacaggcggtggacgcggaaccggatccggagggggaacacatgattatgtgagtgttccgaataaactcggaaacgacagcagtatcacaaaggacaagggggattcgaagaattccgattattacaaggcgaagaatggtctggcatggaaaggcgaacacgtggatttagattccgtggtcggcgattacacgaaagaggcctacgaaggcattgccaatggaaaatacccggccggcatggaagatgtcatccggaattattttgaaaatctgaactgatggagaggagatcttatgacagaatatgaagtatgccagcagaacaccatggcatgtgaacaggaaattgcaaagggaattatcggacaaaaagacgtcatccgccaggtcatgctggcacttctggcgggcggaaatgtactcttagaaggtatgccgggactgggaaagaccatgctggtgcgtacgatcagccaggtgtgtgatctgagtttccagagaatccagtttaccccggatctgatgccgagtgacgtgaccggtaccaacatcatcgtaaaagaagagcaaaaaagtgcattccggtttgaaaaaggaccgatttttgccaatctggtgctggcggatgagatcaaccgtgccacgccaaagacacagtcagctctcttagaggccatgcaggaacacaccgtgacgatcggaacgaccagccatcagctgccggagccgtttctggtgcttgccacacaaaatccgatcgaaaacgagggaacttatccgctgccggaagcccagctggaccgttttttgtttaaagtgctggtaaaatttccggaccggcaggaattgcggggaatcgtggaactgacggagggaaaccatccgccaaagatcgaaaaggtcatggaccgggaaagcctgcttgcagcgcgcgcatgcgttgcacagattccgattgcggatgccgtcatggattatattctggatctggttatggcaactcatgcagacaatccgtatatccgggagggggcaagcccgcgtgcggcacaggcactgatccgcacagccagggcacgcgcatttatggaaaaccgcctgaatgtctcgtttgaggacgtcaaatgtgttgcacttccggtattgcggcacaggattctgctcagttttgatgcggtatcggaggggattacggaagatgcggtgattgggcagatcttaacagaaaaggaacagggactgtatgcttgatgcgggaatttatgaacagctgtcgcggcttgtaatcgcgatgaaacagaaaagcagccagaatatggcaggaaaccgcagatccgtacagaaagggacttctgcggaattttccgatttccgggagtatatgccgggagatgatctgcgcaggctggactggaatgtctatgcgcggtcggagcgcatgtatatccgggaatatttcgaagaaaaggaagcagtggtatcggttattttagataccagtgcatcaatgcactatggaaaaaagagcaaggcagaactggcacaggatctgtgcgcggtgattgcctttctgactttgcaccatatggaccggctggtgctgtatgacagcagccagatgggaactccgcttgtggtttccgggggaaagaatgcactgccaaaagtacttggatggctgcaggcacgtacattttcggggacagagacggattctttttccgccgtgcgccagatgcagaggcgtggggcgggagttaccgtgatcgtcagtgatttcctgaccgaagcagcgacagatcccacgcaggatcgtctggaaaaaacgatgcagtatctggactttacgaaacaaagacccgtgttgcttcagacactgtgtgcggaagaactgcgtgtgacaatggacggtacgcgcaatctgatagatatggagtccaaagaaaaactgcgcgtgacgatgcgtgcggatgtgattgcgcgctatgaacaggaactgcaaaagctttctgtgcggctgaaaaaaagtgcatcggctgccggaggcacctatatactctgtgattccgaaaaagagagacgcgcgcttattttagaagatttaagacctttgtttgtctgagaaaaatttgaggatggattatgatatttgagagtttgtggccgctggcatttttgctggcggttccggttgttgtgattttatatctgcttgtgccaaaggggacagacacgccagtgtcttcgaatctgttgtggaagaagcttttttataatgaacagtctaaaacgttctgggaaaagtttttgcacaatctgctgatgtatctgcagatcgtgattcttttgatgcttattctggcactgatggcaccgtttgtacagcgtaagggtacaggcagtacggacgtggtgtatctgattgacaccagcggaagcatgaagcatctcaccaaagggggcaatacccgcctaggggaagccgtaagtgagatcaaagagcagattgccgcttcggatggggcaaaaatatccattgttacctgtgacggcacgggaaccaatctgcttgccgtccatacttccgagaaaaaagcattgtatcggacgctggcagacatcaagggcacggacacagccggatcgctttctgatgcactggcaaccgtacagacggtgcagaaaaaagacaaaaagaacgatctggcagatgtcatcgtctataccgacggcattggggcaaaacagacgaaaaatctcaaaagtcagcttcaggcaaccatccgcgtggtgggaagtcccgtttctaacgtggcgaatacgtttctgtcctgcaccaaagacagcagcggggacacgtatacggttgcatcaggcgtgacaaattacagcgatcatgcggcaaatatggagattacgctgtatgagggaaagaaaattcttgaagtgcgtacactttcccttgccgcagacgagacgtatacctgcctgttcaaacaggtgaaatggggaaaacagccactgcataccgaactttccgcagtgacatttgccggcagcagccagaaggattccttaaaagaagataactgtgcttatgcactcaaagaccgggtttccacgagcaaagccacactgatcggggaaggaaatacctatatcgaaaaagcgtatcttgccgtgaccggagagaatctttccaaggcaaaaacaacggatgcacttgacagtgacgatccgggggtctgtatttttgatgcggatacggcagtgcaggaatctaatcagcagaaggcgcggatgatttttgccaaagaaggaaagaacgaggaaaaaaatgtcagtctgtctgccagcgataccgaactgacttccggaatccgggactttgcgctcggggtaaatcagacgtatgtgtatgatctgccggtctgggccacgggctttctgtggaacggaaagcagtgcgccgcatactacggggagcatgacggaatccgggaggtcgtactcggatttgatctgcgggaatcggattttgccctgcagccggagtttccggtatttatgaaccatgcgttgcactatcttgaggacagttcccttctttcccaaaacgtctatgatgccggagataccgtgcagtttcatgcattaaacggtgtggacgtgcagcagattgcagcacctgccgatcaggcaggactgtttaccgtaaaagcgggcggcagaaaggaatcctatattgtaaaatttgcatgcagcagccagtcggatggacggatcacggcaggcgattccggcagccgcaacacgatgcagcggcagcttgtgcgaaagcagatgcgcaatgtcatccttatccttgtgcttcttcttatgatactggagtggatctgttatgtccggcagatgcgttaccgtgggcggttttatcttgcggtgcgtctggtggggcttgcccttttggtgctggctgtctgtggaatttcggtgccgctttcccacgcgaaagacacaaccgtttttctggttgatctgtcggagagcaatgccgcaaatctcacgcagatggagcagtatatgagccggcaggttaaagacatgccaaagaacaatcagtatgccatcgtaacgtttggagccaatgcggttgtggaacagtttctgaccagtgagaaacacagttttcagattctctcggcaccggaggcggatgcaaccaaccttgaggaagccgtttccacaggactttccatgatcccggacaatgcggcaggacggcttgtggtgcttacggatggaaagcagacaaagggaaacatcgagcatacggcatcggcactgacggcaaaaaacgtgcagctgtattcggttctctatgaagatacaaagcaggggagcgatgcctatatcgaaaacgtggaaatgccggagtatctttatccgggtgattcctattccatgaccgtaactgtggaaagcaactatgagaccgatgcgaagctgcagcttttgcagggaacggagatggtcagtcagacaggcgtgcatttaaacaaaggcagcaaccgttttgttttgaaacagaaggtagtcggtaccgatgcgcagcagtataccgtgcgcgtgaaggcaccgaaggacacctgtgaaaaaaacaatgattatggtacgtatgcgacggtggattccctgccaaagattctgcttgtatctggaatgggagaggacagcacaccgtttttaggacttttggatgctgccggatgcaattaccggcaggtatccgcagtcagtgcaccggatactttaaaagagatgctgcagtacaagagcatcattctggaaaatgtgtaccggacagatctgccggagggctttctaaaaaatctgaaaacttatgtgaaagactacggatgcggtctggtggcatgcggcggcgaggacagttttgcactgggcggatatcaggatacggaactggagaaacttcttccggtcgatatgcagctgcgtggggtgaatgagaaacagaatctggcaatggtcatggtgattgatcattcgggcagtatgtcggaacagaccgaaggaggcaccaatctggatctggcgatcgcggctgccaaagcggctgtggatcagctggatacgaaagatgaagtcggtgtggtaacctttgatgatggttacacctggcaggtgccgctggaaaaagtgaaggataaagacaagatccatcaaagcatcgagacgatcagcgaaggcggtggaacgaccatcaaaccggccgtgcgtgcggcactaaatgaaatcaagaagagcaaggcgcagctaaagcatattgtccttctgacggatggacagggggaaaccgaaaattttgaagatatcatcaaggactgcaaggatgccgatgtaactctttccacggtagcggttggagagtcgtctgacagacagcttctggaacgactggcaacgcagtgtaacggccgctattattattccgatatctcaaccgatatcccgaaaatctttgcacaggaagtatttttaaatggagatacctatttgcagaacggacagttttcactgaaaggaaacagcagcaatgccatcacgaaaaatctctttgccgatggctggccgcagatcaaagggtacgtgagtgcctctccgaaaaccggagccaatgtgctgctggcatctgccgaaaaggatgacccgattttgtctgtcatgcagtatggactggggcatacggttgcgtggaataccgatgtgacaaaccgctggaccgccgggctggcacagcagaatgattacgtgcagctgtggaagcggatcatcgattacagtgcgggaaatacagcactcggcgaagaccgtgtggatgtaactactgtaaacggaacaacaaaagttacctattatgccaaagactacgcagagcagacacaggtggaggctgtgtacacggatccggatggaaaaacgcatcaggcgaaactgaccgcaagtgcgccgggaacttatgaggcacagctggatacgacagtctccggtgtctacaatctgagcgtgcagcggaaaaacggcaaaaaaatcgaaaatgccctgaccaccgcagccgtggtacagtattcgcaggagtacaaatttgcgctgacaaacgatagcttttgtgcgttcatcaaacagtatggaaagatgctttctccaaagaagaatgtatggaagaagttaaaagcttccgggcgggcacgggtttgtctgaccaatccgcttttaatccttttgcttttcgtatttctggcagatatcgccatgcggcggtttgcctatgttccgccaatgccacactggacgagaccagcaaaaaaagctataatgacaaaagaaaaaacagcagaagacgggcagccggagccggaagcagaaaaaccaaaggaaaagacaaagaaagcaaaaccggaggaaacggcttcccaggcactcgatacttctgcgctgttaaagaaaaaagaaaagcggaatcattccgtttaaaagaaaacaggagtcattatgcaatcagacagcaatttacgagaaacgttacggagtatcgaccataaaagttatccggcatacaaatccctgcggggaagttaccggtttgcagactatgtgttatccatcgatcatgtgcagggagatccgtttgcggcgccttcccatgtgcgcgtgaccgtggatgcaaaggcagcggcatttccggaatatgccatgaaaaatacacggacgcgcacagcactggcagatgaactgctgcgcacgtttgccgcacagatcaaccactttacatttaaggcgaaaggatcgggcaaaagcggcctgatttcggtaacccactgcggacaggagattctgacccggacagcctgtgaagtgaatgaaaaagaaatcaccgcgcgttttgcggtaggatttccggcaaacggacggacgatcaatgccagggaactggagaaaattctgtttacctatctgccggaatgtgtaaagcactcattttattataaaaatctcgatgcccgcaaaatccgggatgctgtggaactggcagaagaccagcaggcagtccgtgaccagctgaaagaacaggggctggttgcatttgtcgccgatgatgcggtactgccgcgggagagcgggatttcctcccgtccgatgaaacagtccgtggcttttacttctccggaatcccttagggtgacgatgcagcttccgcacagaggtgcgatcaccggtatgggaattccgaaaggaatcacactgatcgtcggtggcggctatcatggaaaatccacacttctaactgcactcgaactgggcgtttacaaccatatcgcaggggacggcagagagtttgtgatcacggatgagaccgccttaaaacttcgttcggaggacggacggtttatcaaagatgtcgatatttccatgtttatcaatgatctgccaaacggaaaagatacccatcatttttcaacggaagatgccagcggaagcacatcgcaggcagccgggatcgtggaaggcatggaggcgggaagccgcctgtttctgctggatgaggatacgtctgcgacgaactttatggtaagggatgcatttatgcagaaagtagtcagcccggacaaagagccgatcacgccgtttctttcccgtgcgcgcgagctgtatgagcaggcaggaatttctaccatcctggtagcgggcagttccggtgcctttttccatattgcggataccgtgatccagatggaccgctataagccggttgatattacaaaaaaagcaaaggcattgtgcaaagaatttccgatttcagaagaaaagccacatccgttcgtcctgccgcacagtcaccggatcatggaaaaagataaaaacggtgccacaaaacgcagggattaccggagcggagccgtgcgcaaaaatgagccggagcggttaaaattaaaaaccatgggaacggatggatttgccatcggaaagcagaccgtggatctgcggtatttagaacagctgatcgacagcgaacagactgcgtgccttggcatgctcttaaaatatgcggtcgaacacctggtggacggcaaacggacaattgccgaagtcgttgtacagttacagaaagaactcgatacgtccggcatgcgctttctggcagaaaacggtatcgtttccggcggttatgccatgccgcgggtgcaggagatgtattcctgttttaaccgttatcgtgtatagaaaaagggaagcacaggagagactatgaaaagagtattagttgtcgttgacatgcaaaacgattttacgaccggaccgctgggcaatgcagagtgtgcagcagtcattccgaaggtcgcggaagtgataaaaacaggcgtgtatgacagaatcattttcacccaagacacgcacccgagtaattatctggatacgcaggaaggaaagcggctgcccgtcgtgcactgcatcgaaggaaccgaaggctgggagattgcgcctgtgatccgtaaggcagcatccttttattccaaagaacagatcgagacgatctgtaagccggcatttggcagtgtgcagcttggcgagcgcttaaagcagtactgcggtgatgcagaggcacagattgatttctgtggcgtgtgcacgggtatctgtgtcatcagcaatgtcatgattgccaaagcctttgttccggaagcgcgcgtgtgcgtgattgaaaaagcatgcgcctgcgtgacaccggagtcgcaccgcacggcgatcgaagcgatgaaaacctgtcaggtagatatacagtaattgtattttatttaagtaagaagaaaagagaagaattatgaagttaaatcagatcatcaccagtctgctggaaacagatatgtacaaattcagtatgggagaggccatctatcaccagttctccgactataaaaccacatggacattcaagtgccgcaataccgatgtgcactttacggcagagatggtgcaggagatcaaagagcagattaaggcgtactgcagtctgcgttttacggaggaagagctggaatatctgaaccgtattacatggatcaagggaagctatattgatttcctgcgcctgtggcagccgcgctatgaggattttaagatttcggatgaggcggaatgcggactttccatcgagacattcggtacctggctgaatacgtctttgtatgagatcccgacactggcgattgtcaacgaagtgtatttccgtatggcgtacgattatgacaggctttatgccagtttccgggaacgtctggagcagaagatcaaagatgccagcggcagatacgagatcggttcgttcagtgaattcggactgcgccgccgtctttccgcagaggcacaggagcttgctgtccgcaagctgaaagaagcagagtttcgcgggtcagaatttgtcggaacgtccaacgtctatctggcaaagaaatacaatctgacaccggtcggaaccatggcacatgagtggatcatgtgtgtcggacagggaaatcacaaacataacccggcgtattccaactggtacgcactcgatgcctgggtacgcgagtatggcgtgttaaacggtattgcactgaccgatgcgattacgaccgactgtttcctgcgggatttccagctgacctatgcaacgttattctccggtgtgcgtcatgacagcggcgatccggtggagtggggtgaaaaaatgatcgcacactaccggaaactggggatcgatccggcaggcaagactttattgttcagtgattctcttgattttgcacgggcacacgaactgtacgaacatttccggaaccgcacaaaggtggcttttggaattggcacctatatctcgaatgatacggaggtaccggcactgaatatcgtcatgaaaaccacgctgtgcaacggtatggatgtcgcaaagatttccgataccccgggcaagggaatgtgcaagaacccggattatgtgcactatctgaaacgatgcatcgactggcgtatgaatcatgacagataaaaattctgatttacagacaaaggaagaaggaacagacctatgaattatacagagtgtatcgaacaggcgagaggccgtatcggatctcactgtaaggcgtgctgggaatgtaacggcagagcctgtaaaaaccagatgccggggccgggagccaaaggcatcggcgataccgccatccgcaactatgacaaatggaaagaaatccgcgtccagatggacacgctggtggaaaaccgtccatgtgatacgacactggaactgtttggcagaacgtttcagtatccgttttttgccggtccggtaggtgccgtgcagctgcattacggagactgtctgaatgatatttcctacaacgatattctcgtttccgcctgtgcggcatccggcatcgctgcttttaccggagacggaaccgacagcaatgtcatggtcgcagcgacaaaagcgataaaaaatgccggtggactgggaattccgaccgtaaagccgtggaatatcgaagtgatccgggagaaaatggcgatggtaaaggattccggtgcctttgccgtggcaatggatatcgatgcggccggactgccgtttttaaagaatctgaccccaccggccggaagcaaatcggtggaggatctgcgtgaagtgaaacaggcggccgggctgccgtttattgtcaaaggaatcatgaccgtcaagggtgccatgaaggcaaaagaagccggagccgatgcaatcgttgtgtcaaaccacggcgggcgtgttctggatcagtgtcctgccaccgcagaggtgcttgaagagatcgcaaatgcagtcgatggctccatgaagatttttgtcgacggaggcatccgttccggtgtggatgtgtttaaggcactggcactgggagccgatgcggtgatcattgcccgtccgtttgtgactgccgtgtatggcggagcgcaggaaggcgtcgaggcttatgtcaataagatcggaagtgagttgaaagatacgatggcaatgtgcggtgtggcttcgctgaaggagatcacacgggattgtgtcagagtgtgagaattacatattttctgaacgaaaaagacaatagaaataggaacttccaaagttataaactattaggaagttcctatttttattaccatttaggaatttatctgtatttttccattgtttcacacatatagatttgatggtgaaaagttgagttatatattaagtgtaaatttacatttggggaatgaagaacatccgtaaaattgttttcctacatttgctcccttttgtgcagttcgaataactagtttcgcaccacattttggacaaagtgggacagagacatttgaagcattttctgttgaagatacagatgctttagtctcttttagaagtctttcatatttaagggtataatcctttcgagtgtcattattcatgttgagtaaactttgagcaatagctatcatttcttttttagaagaaggtaattcttttgagtgagcaactatatcttttatggttgctactaattgatctgcacgtataacttgttgtttgatctcttttttggcataacgatcatttacaattgttttaggattagcgaggacaactagcggcttatagaatgaagaaaaattatattttatagagataccttttaaccaattcgaggtttcaattcgagcttcttttaatacctcataatgccgttgactttgtgtgataggtgaataaattccttctttttgtttggtatgaccatagaaaattgtacggataaaggcaccgttagaatcaatttcaatatttcctacaagatttttacattcaattaggaaaataatcttagcagtaataacaataaaatctatttgtgcaccaagaccggaatgtgtttcaatgtatatatcatgaagtactatcatatccatgttgctgtgcttaagctcaaatagaatattttcctctcctataattccagcttgggtaagggcaatttctttttgaatttggttctgcaaatcaccagaagcaagttgttgcaaagactttaatttatctaaatatgtttgtgcatcgtttgattcttttaagataataatttctggttttgaaaataatcctatataatgaatctcctttatgtaaatatagattaatagtatcatttgataatcaatatttcaagaaataggtaactaaaatatagttttattcaatagaaatatggaaatattagtagtgagagtgtataataaaattatatttaacacaaattagataggttgattatttacaaagggaaaatgcatttattaaaaaatatgaggaaaaatgggaaaatggttggcaacaaacaaatcaaatttggtttgataatggttttgtttttggtttttggagtagtatcatgtactgaaaaaggggcaagattggatgaaaaaagttgttatacagaggaaagttgtgatagctctgaagcagaagaaaactcgacagaagttcacagaaattattctatgaagcgttatgtgggggaaagtcaactttgagagatgcaccggaatgttttggattggataatttcttatacaattataataaaattgcaaaatatggactgaataaaacagaaataaaagatcttcaatcacataaatctgaggaaatggcatattcgagacttacaaagtattctttagcaaagaactgctatctgacagcaacagacagttcactttgtgggtatgaagttatggcatttatctcgtttgataacgattctgaaagtgtaaaattatctgttcagaaacagataattcgagactgtatacatgccattgatagaaaagtgccaaataaatggattgattatgaaattgaaaatattgaaaacaaaggaagtacaatagcttattttaatgaactatttgcgttcgaaggaaagttggaagcaaataatgaaatcagctttataataaaatataatcctatttcacaaatgacagaagatgagtgggattacagagagtatagaataccaaattataagtaaatagcagcaaggaatatatatgagaaaattagaagaaaagtttcgtgaaaatacaacattaaaatactacaatgaaaatgctacaattttttctgctactacacaaatcgtagatttttccataacgcaggataagttccttgcattgttacagccaaatgcatatattttagattttggttgtggatctggtcgtgatacaaagtatttcatggaacatggatatagagtggaagcaacggatggttcagaagagttgtgcaaattagcaagcacatatactggagtttcggttaaatatatgctatttcaggagttggacgagcagaaagaatatgatggcatttgggcatgttcctctattttgcatttgtcaaaggatgaacttaaaaatgttatgcagcgaatgttgtgtgcattgaaggatgatggagtgatttatacatcatttaaatatggaacatttgagggcgaacgaaacggaagatattttactgactttacagaaaaaacatttgatgggtttttaagcggtataagacatgtaaagatagaagaacaatggctgacaggagatgtgagaccaggccgtgagtcggaacaatggctgaatcttatactgaggaaagtgtgacgaatggataaagtattaaagctggaaaacggacaatatgatttgatagaaacagtctcatatccaaatggtggtgcaagctatttttatgtaagagatcagcaggctattattattgatgatgggatatgtaattacaaaaaggatgagaaacctttttcctattctttaattacggacaagcaaaatacatatatgaataaatatgcaaaagtatatcgctttctaaaagaagacatgggaataatcaatgaagtaattacattgccatgcaaaaaggaagaaataccaataaagtatgtggcaaatcgcgaagatcatgcagatgcctctccattggaaattgactttgaaaataattttgcaagtgtatatggtcgtaatagcttgaaatatttacagaaagaatatggtattttggacgaacagggaaataattatttcctggattacttgttaagaacaaagcatggagattatgcagttgaagaaaatggggtaacttatcatcatccgcagcagatcggtttggaacgttatcgcagacagctgcaaaaacaaaatacatgtacggaatggggaattaagttatatcgtttttcttcagaagattgtagatttgaaaatcgaattgaggatgacataaaaactttttttggtgaaaataccgatgagtttgaagaaaatggactccttgctgatcgtccggtaaagttatatgagcatcaggaaaatacgcttgaggaaatacaaaaacagcgtgctgcgggaataaatacatttcttgtggtatttccaacggcaagtggaaaatccaggattgtggaagaagatttgcgtattttttccagaaaaaatacagaatttcatgcgcttattatggctcctaatacaaatattattgatgattggaggcagcgagtgaagaaatcgcttccagatctgcaggagcaaattgaaatttgttcatttgcttatatgatgcggaactatcagaaatatgcgcaggaaaaatataattatattgtagtagatgaggctcatcacgcagtttccccagttttaaaacgtgttattcagtattttacgcctgattttttgattggtcttacagcaaccgatcaacgaccagacaaaaagaagttggagacaatatttggtaattataagacaggcttatctttggttgatgcgatgaaaaagaaaattgttgcagaggcaaatgtatgtcgtattgaaaccaatctggatttgagtcatattcgattcaatggcaaagattatattaatgctgatttggaaaagagtattcgtgtaaagtccagaaatgaattgattgcagatgtgttatacaactatttttcggaaggaaaagctgggcagttgcagggagtcgtgttttgtgtaaatacaaatcatgcacaggagatggagcgtgtattaaatgcgaatggtctttcggcaaaggcatataccagaaaaacaaaaaatccagatgaagttatgcagcagtttcgagagaaaaaaatacgttttttgtgtgcttgtgaaatgatttcggagggatgggattatccggaacttggaattctggtaatggcgcgtccaacactttccaaggttctttatatgcagcagattggcagaggacttcgacgaacaaatacaaaaacaaatgtgtttgttattgatgtagtagatgagtatggtgccatggcaaaaccgtgttccatgcattcaattttttctaatccattttacactgcatttggaagtattttaaaaagagattattccgtgggagatatgatagaagtagatggtctgcatgaaacagtagaacgtattgtgcaggtggacattgaaactttcgaagaaaaatatggtgattacttaaatcaggaacagctggcgagagaattttatttaagtacgggaactattaccagctgggttaccaaaggcaaaatttctccggatgaaatgattgcttttggaagtaggaaaatttatctttttgcaccagaacatgtgaagcagattcgtgaggaaaataatattccagaacatacagaggaaacgatcaaaacggacttctttgattttctggaagaacgtgattacagtctttcttacaagatgccgtttcttctttcattcctaaaaaatatgaatgaaattggagatgcaaaaattgataatgtgctcacagattatattgctttttaccaagacaggattgataagggacttccagtagatcggtcaagttgtccatataatgcagaacgattgaaagatcggaaatatattaaaaacaatatgctgacaaatccttttgaaaaatttgagcgtaaacggttcctgtattattcaaaggatttgaatgtaatttctatgaatcatgcgctttttattaaaatgagtaagcaagattttgaaagagtgaaggtgcagatggaagaggatttggagaaatattatgaaagagttaaataaaaagagttaaataaaaagagttaaataaaaagagtgtctgacaaaattgcagtaaagaaactatttatatgtggaaaaataattatggcaattaattgactacaaatatgctttaaattagaatagataaaagaaaaaatataatttggaaagaaatgggaaaatttttatggatataaataaaatcgttttagtaataacatgtgtattttctggtatttcagtaattgtatcatttttaagtctaagtaatacgagaaagatagcaaataaaaacggatatataaataccgtaacggcatcaagagaacggtgggcgagtagtttgcaaagtaatggttcctcctatttggctattgtagattcaatatttttacagagagaaaatagaatacaaaaatatgaggagctattaaagtatcaatatgcaatggctatttcattacatgattatgacgatgataaagaattaaaaagtaaaatgaaagaaattcagaatcatatatataaatttgtagcgtcaaaaaatagtgattctttagaaaatgaaattgcagaggttcagaaattgaaagatgagatttatttgcttataaatagaaaacatcaagaggagtggaaaaaacagaaatacgaagtggcgttagaaaaataattatacagcaaataattcgttcaaaaatatctttattttctgaagaatctgaataaagttataatcataaattattgatataatagtgcatttaaggtagaaattgaaaaaagaaaatatcaattttggtgatatacaaaggtggtgatctcatgttaacaaatgacaataatgtcaggcgcaatgacttatcattacgcctaaaatacataggtatcaaaaccagaatatttaaaatagctccctttaagtatgtgattttatgttccaatataccagacgattttgaaaaaataaagacatattttgatcgttccataaggtatgttactttgcagatatcattatcagatcaggtgccggaatattatatagaagaactctctccaattgatatggaacatccggtggatgattttcgggcaacagcgaggaccagagctgagatagaagaatatatttatggaagataccatgattttgacattagaaaaattgttccgagtgaaggcggcataaattttcatatggatatttatgttggaagtgatgtgagtgacaaacagatcgcaaggttgcaaaaggaactgacagaagttgactttggaacggatcagattcaggtacttcgtacaacggaccctccggaagataaaacaaaattaaatccgcaggacagtgttatgtggttaaatacgaacaagagttatccgtttacagttgctgagacagatttctggtatgacaatatagaggcaatttatgatggctccgtgaagagaaaggatttatctttttgcagagatggcgaactgaaatgctttgtgaatgcgtctgtttttccggtgatcaatctacgcagccttttattattatatgatacggtgtatcttgctttgccaattgaaaattttttggatgagtttttggaaatgcagggcatgaaaaagaaagagctggtccaacttgtttcaatggggaaagtagttcttttgttaggaaatgatgagacgaggtatgatcggcaggttattttggatgcttacaaagagtcaccggattctgtaattggaagaagagctatgaatgcgatgatgattgcacagttggttgagatgaaaaatcagtatgctgtcaattatccgatggcttatgagatggcatcgcaacttgcaaaatatggaaatcagaaacaggatgaagtggcacttcatatatcagaactgttggcatggccatatagagtagtgggagaaagttttggcattttacaaaattcgagtcctatggcagtcagtaatttcggcattaatcagttggcatataattttttcagagagcatgatcagaagagtgcaattgaatttgaatttatttcaaaggcggaatcggcacatctagccatggctttggatgcaacatattttccgtttcgtgcagaaaatgataataaaatatatacggatgaggcagagacttctatgatggaaggaatgatgaaggtatattggtatgcaccagagcaagtgaagcggatgcagtcgatttggaatacaaattatacggaaagaaatatgctggaattctttgacacaaaagaaaatattgatattttgcgtactgcaaacatggcagacaagtaccagacacctatgaagttccgggctattttggaaaatctggagaagatggaagaaacagatcgaagacaaaagattcgggagtataataatattttggcagaggcttcggaacgaactgcgaaatcgacaagtattgtcgatttcatgcttggaactaccggtttcttaaattttggatcttatttgaatacgatactgaatttgctcggattattgaaaggcgttccagatatgatgcctggtgcaacggagcgaaaggatttgcaaaaattccgttcgattgcaaaagaactgggcacagataatccggagaaaacaggagaggaggtttatcttcttgatcgtatttctccagtggctaatttaagataaaaagtaatttatgcagactctctgcataaatggattagaaccattccggaaggcatcgatttgggaattatttataggttatactggaaataaaaattacattattagataaataacaggaggcttacatcatggaacgagtagaaaaattcttaaaagaagcagaaacatattatttagcaaccgtagaaggcgaccagccaagagtcagaccttttggtacagcccacatttttgaggggaaactttatattcagacaggtaaggtgaaagaggtatcaaaacagattcatgcaaatccaaaggtagaaatctgtgcatttaaaaatggagagtggctccgtgtagcaggagaacttgtggaagatgacagaagagaagccagacagtcgatgcttgatgcttacccatcattacagaagatgtattcagcagacgatggaaacacagaggtattttattttaagaatgcaacagcgacattttcatcatttacgcatgatccggaagtagtgaagttctgatgacaaaggatgagtggtacaggcagttgtttgagagactgggcaattccaaatttcgaagcagctttcatttgaagcagaaagacatagattacataaaccaaaagggacttgatacgatcagacaacatgcaaaggactttattgcaaagagagaagctcccgcatttatagcaaatgatggcaaacagactcctatgaggggccatccggtatttattgcccaacatgcaactgcaacatgctgcagagagtgtatccggaagtggcacaaaatgcagccgggcagggaactgagtcaggtgcagcaggattatcttgtagatataattatgacatggattcaaaaagaactggaaaggcagaaaaagaaattatgaaaatgcagatatttgtagatgcagatgcgtgtcctgtagtaggcattgtagaagaaatagcagagaaatatagcattccagccacattgctgtgtgatacgaatcacgtattatattcagactatagcgaagtgatcgtagttggtgcaggagcagatgctgtagattacaagctgattagcatttgtcataaaggggatgtcgtagtatctcaggattatggtgtcgctgctatggcacttggaaaagaagcgtatgccattcaccaatccggtaagtggtacacgaatgaaaatattgaccagatgcttatggagcggcatcgtaacaagaaggcaagacgcagctcgcataagaatcatatgaagggaccaagaaagcgtacagaggaagatgatgtacgctttgctcagtcttttgaaaaactcatacagatggcaaaatcaaaagaaggtgctcagagtgggattatttaagaaaaagacagttataaagacttatgataaagaaaacaagaagccggtaattaaggcaagcatctgtaacggtgagcaggttgccggttttaaggacatccatacaggtaagatcgaagaggttatgctgattaaaagtcaggcggatcttgatgaattcaagaaaatgtatggaatagatggtgagatagaaaaggagtattgatatgagcatattaggaaatatactttggaaagcagtttttcaaaattgcaaagttatccctgatgccatttggtgcagaggtaatctgacaggcaggggagaacttttttgtgagtttgaaagaataggcaggaaagatgtgtgacataacaaggttacagatggatgagaaaggaaaacacgatgaacatatatgatgaattggaaaatttaaaagtcagggctcgctccaatccggaacttgcgcaggcgttgttagccacgcgggaaatgaaaaatccggtttccgcattctgtcgtattgcacaggagcatggatgcaccttttccgctatggatctggtctctgccggtgaggattcttacgcagcaatgcgtcgctccacgaatggaggcggcgagaattcgccgctgttgcagggagaggatgatctgtacgagatgtttttaattgaattgatgtaaaattgagagataatgaaataaattacgattacgaaggatggaaaaatacattttgtatttatttttctgtccttttgtgttatattggaagcaaagatggagggataccaggatgaaggatatctatttaacaaattattctgttaatggaatcaagacattggataaaacggtttcattgtctttttataagaaaacaatcaataaggaaccggatacgcaggaatataatattaagggaatttatggaatgaatgggtctggaaaatcggggatcgtgacttctgtggaaattttgcgcaatcttatcattgatacaggatatttgaataatccggttgcacagaaacatttggatgctattgtcaataagaaagttggggaactttcgatagaagcagagtttatcgcaaagagtggtgcacagttgcttctttttcagtatggaatcaccttgtctaaaaataaggcaggtaaatttacaatatcacacgaatgtttaaaagaaaaaaatgcgacatcaaagaacagttctctggaaatcatttatgaaatttgtgatggtgaaatcatttttatgtatggtttggaggaagaaaatggttttgtggttgaaattagaaataagacgatgaatttgttgaccacgggatctgcatgtgcattgatttatgtaaatatgttgtgctcaggggacgataattatttcttttatagagaggataaagttgcacggataataatgaatgctatcagtgtgctgttttcatttggacataagctgcatgtgtatttagatgagtcagatgatcataaaccatacatgatacaaaataccattctctcttgtgacgatgctgattcgcaaaatgcaaaattgtattcgttgataggtaatatttttgagttacagaatgaaaacataaatgtaatattcagtaaccgaaatatgattgcaaaaacaaggcttgataaatttatagaaacaatcaataaattatatgaatttctccatatttttaaatcggatctgatgggtatagagattgataaaaaagaaaacggcgatttttggatgtgtgatttggttatggtgtatgattcctacaagatttatgcagaatttgaaagtaccggaatcaaaaaactgattaaattatttgtctatgtaagagaaatggttcgtggtggaattgtttttattgatgaatttgattcgaaccttcatgatgtttatttgtgtgcattgttggaatatttgatggaatatggagaaggacagctctgttttacaacacataatgttggaccgatggatgttctgaaacagcacaagaagtcaatagactttttgtcagaggatcatcagatttatccatggaagacaaatggcaactattcaccttcaaaattatacagaaacggtatgatagaaggttctccgtttaatgtagatgcgattgattttatcggagtttttggtacaggtgaggaggatgaatagtggggaggcagtttatttttgttgttgagacgaacaaaaaatgtcagtccgactggatgtatatcaaggacacgattgagcatttttatgcgtttgatcgaacacaggtaaaattaagtgttgtatatatggacggacggggaaattatgagaaaaaggaaaaagatgttcaaaatctgatttcacaatataaggctgcttctaagaaaaatcaatccagggtaatatattgttttgattgtgataattttgacacgaatgcagaggatgaaaattttctgaaaaatgcaaaacaatattgtgaagaaaatggatatggatttgtttggttttgcagggatattgagcaggtatatataggaaagcaggtagagaaaagtaaaaaacaaaaagaagcggcgacatttaaggcgaagaagcttatcatggatgtgaatgctgacaaattgttacagcatcattatcgcgtgagcacgagcaattttatgaaaattatggatcaatttgatgaatttacgcgaaagtaggattatccatgattagatgaggatacaaaaagacatgaaacccagaacacaaaaatcaatggaattatataacaccctcctgaaccgtggctttccacaggagttttgtgagcagatttcactgaatctgaacacagactggacggcacagaggatgcttggctatttgtcacattacaggaaacttccgatggcggaaatcgtggacgagatgctggcaattctaagtgaccggaaccggattatgcagaagcatgaatgggagaatacaaatgcgaaatggaatgaatttttaaaccagggatttcgaaaagaggattgaaaaataatatgaaagaggttttttatgagttattggaaaaaatttaaaaagaagtatatgggggatcgtgcgttttaccgccattatttattgctggcagtgccaatgatcctgcagaatgccatcacgaatctggtcagctttttggacaacattatggtgggacagctgggaacggaacagatgtccggtgttgcaatcgtaaaccagctgatttttgtgtacaatctggcaatttttggagcggtgtcggcggcaagtatttttggtgcgcagtattttggcaatggggatcacaggggacatatgcattcgtttcgttttaagctttatgcgacgctgcttgtgtcaggacttaccatgttgctgctgcttacgaagggatcggatctgatttccctgtatctgacggatactgcgggaaatggagcaaccgatgtggcacttcaatatggaaagcagtatctggtgattatgctggtgggactggttccgtttgcagtgaaccaggcatatgccaccaatataaaagaaacgggacagacacttgttccgatgctggcaagttttgtggcggtgggaaccaatgcagtgctggattatctgttgatttttggtgtgggaccatttccggaacttggggtgacaggggcggcacttgccactgtgattgcccggtatgtggaagcggttattgttgtcttctgggcacatagaaaccgggagaagaaccggtatctggaaggggcttatcgcggatttggaatcccggtgagcgaactgaaaacgatactgatcaaagggcttcccctgatgttcaatgaggttttatgggcggcgggcatgaccaccgtgacccagtgctattctgtgcgcggacttgatgtggtggcagggctgaatattgccacgacgattaccaatttgtttaacattgtctatatacagttgggagcgtgtatcagtattgttgtgggacagtatttgggagccggagaattggaaaaggcaaaagacgcagacaacaagatgattgttttcagtgtcttctgctgtgtgattatggcagcaatcatgtttctcgtggggggatttttccctgatatttacaatacgacagcggaaattaaggatctggctacaaagtttatcgccgtttctgcgctgattatgccgttttgttcgtttagtcatgcgtcttattttacgcttcgttccggtggaaaaacgatggttacgtttttatttgattcggtgtttacctgggtggttgttgtgccggttgcatttttgctggcacacggcacgggacttggaattgtaagtgtttattttctggtacaggccacggagctgatcaaggtcgtgatcggatactgcatggtacgaagcaacgtctgggtggtaaaaatggtataggtgatcagggatcagaaactcatgctacggcattatttataaacaattgttaaatgtttgaaaaatatttggaaaatggacaacttttgcggaagaatcggttataataatttcatctgataatttaacgaaaaatacataggaagcggatggaattattatcatggaacaggaaaacagagtcagaatggaacgaattgcagcagatccacagtccgggctgtctgcagagcaggtaaaaagaaggtttgcacagggagaaaacaactataaagtagagtcttccacgttgtcggtttcggaaattgtgcgttcaaatgtctgcacatattttaatcttgtatttgctgtgattgcggttttgcttgctattgtgggtgcatggtcggatatgctgtttcttccgattattgtggcaaatacctgtattggtattatccaggaggtacactccaaaaaggtgctggataaattatccattctgaatgcaccgcatacagttgtaatccgtgacggaaagcggcaggagattccggcagatcagctggtgctggatgatattgtggaattttcggcaggaagccagattccggcggatgcgaaagtggtatccggagagctgcaggtgaacgaatccctgatcaccggagagtcggatgaaattgaaaaacgggagggggattccctgctttccggaagttttgtggtatccggaaaggcatgtgcacgtcttgagaaggtcggaaaagattcttatatttcaaagctgaccctgcaggcgacgaaaagcaaaaagggagagcagtcagaaatgatccgctccctgaattatctgatcatggtgatgggaattattatcatcccgatcgggattgctctgttcgtgcagtcgtttatttacaatgagggaacgtttcatgacagtatcaccggtatggtggcggctatcatcggaatgattccggagggactgtatctgctgacaagtgtggcacttgcggttagttccgtgcggctggcacagaagaaggtattgatccacgatatgaaatgtattgagacgctggcgagagtcaatgttctttgtgtggataaaacaggcacgattaccgagccggggatgcatgtctatgatttttctgttctggatggggcagatcagctggaaatttcccagctgctggcagattttgtggcagcgcaggaaaaagacaatgcgacgatggaagcactcaaagcgcatttctccaacggaagtggtatgcgggcaagggaagtgtattcgttttcttcggaaacaaagtattccggagccgtgatgaacgatgggaaatcttatgtgatcggagcaccggaatttgttctgcgggggcagtttgcccagtatcaggaacagattgccacctacagcagcaaaggctaccgtgtgcttgtatttgcgcaatatgaagggacgcttgaccggaaaccgctgacagagccggtacttccgctttgttttgtgatgcttgccaatccgatccgcaaaggggcaaaggaaacctttacttattttgcggaaaatgatgttgatatcaaggtgatttccggtgacaatccgctgacggtttccgtcattgcggcagaggcggggattgtgggtgcggagcgttttgtcgatgcatcgactctgaaagaaaaagaagattattatcgcgcggtggaagaatatacggtattcggccgtgtgaccccgagccagaagcggatgctggtacaggcactgaaagaacataaaaaaacggttgccatgaccggagatggtgtaaatgatgtgctggcacttaaagatgcagactgcagcgtggcgatggcctccggcagcgaagccgcttctaatgtggcacagctggtacttttagattccgatttttccagaatgccatcggtggtcgcagagggacgccgtgtggtaaataacattgagcggaccgccgcattgtatattgtaaaaaatattttctccatgctgcttgctattttctccgtgattctgatgctggattatccactggaaccatcacaggtatcgctgatcagtatgtttacgattggtattccgtcgtttgttctggcactggagccgaataaggagctgatccgcggacatttcctgaccaacgtacttgtgcgggcacttccggcaggactgacggattttatcgtagtaagtggtctggtgattttctgccgggaatttcaggtagatctggattgtctgtctacatcatgtaccattctggttgcaatcgttggttttatgattctgcaccgcattgcaagaccgatgaataccggacatattgtaatgctggttggtgtgattgcaggatggattctttgcatgctgtttggcagaagctttttcggaattacgggaatttccaaacagtgtgaaatgctgatggtaatttttgcaattattacggaaccggttcttcggtatctgagtctgattgttgagtggatttctgcgagatgccgcatgatccatgcccgtttttcgagggcgtaaaagtggggctggttcttgcatgcatataaggaatcgtatataataaaagacatactagtagaaaagcaggtgtggatgtgcagaagagaatcaggcagatagccgcaggaaaattcgaatcggatcagccttcgctttctatttcggacgaggaactgtttcttacggttacagaaggacaggaatataccggggaatttgaaattaccagtgaaaaccatattccggtgaggggcattgtctactccacccacccaaggatggagtgcctgactccccagtttgaaggcgaaaatatacggattcggtatcagtttcatagtaagggtctcgttgaggggcaggaggaaaagggtgcgtttgtgattctttgcaatcagagtgtacacagcctttctttttgtgtatccatatcccgtttatatgcgcagactgccgcaggtgcgattcgcagtctttcggattttacggcactagcaaaggaaaactggcaggaagcatatcagctcttttatcacaagagttttcccaatattctaaaagcaaaagagacaaaagaaaagatgtactatcaggggattcttgcggcaaaaccatcgtcgcagaatctggaagaatttttggtggcagccggtagaaaagaacagatccattttacaatttctgagacagactgccggtttgatgcgcttaccgaaagccagcagcagaagatcgaaatcaaaaagagcgaatggggatatttggaacttgccatcacctccgatgccgcgtttgtacagccggcacagacgcagattacttcggagaattttctggggagtacgtttgtcctgaaatacatcgtggactatgaccggatgtatgccggaaacaattatgccaaaattactttttcctcggtatatgagacaaaggttctggagatttatgcgcacaaaggggaaaaacaaaagtccaaagaacaaaaagaacatgccaaaatcagggaatgtcagtccgggctggtagaactgtatgaggcattccgcctgaaaaaaattgtgacaggtgtgtgggcaaatgagtcggtagaacgtttaaaccagctgcatgccatgcttccggatcaggtgatgtatccgctgatgaaagcacaggcactggtgatcaatcaccagaaacaggaagcggagtggattcttgaggaatttaaacgggaatggcccgatcaccatacaccggagtgggggtattatctttatattatgacacttctggaacgggaaccggcatatgtggaccgcatgacgcatgagattgagatgatttttcatgaaaatccggattctgctttgttattctgggttctttcgtttctggaagaggaatattacaacaacagtgcgcacaaactgcgtgcaattgcgcactgggtgatgagtggctgtgtttccccgtacctgtatctggaggcatacgatctgatcagccatgacccgtatctgctcacaaaactgggaagatttgaagtgcggattctgcgctgggcaatccgtcatcaggttctgacgaaggaactggcagcacagatttttgaagtggtggaaatgaatcagggatttcatccggttcattttgaactgatgcaggcagcttacgggacagaggaaaaaccggaatatgtgggacagatctgcagttacctgataagaacccagcagtttgatacaaaatttcaccactggtatgaaaagggaatcgggcttgaacttcggattaccggattatacgaggcttatctgatgtcactggatgaacgggagattgcatcggttccgaaaattatccggatgtactttcagtatgacagtaatcttccctatcggaagatggcaattctttacaacaatatcattgcgtcaaaggaaagcgaaccggaaatttatgaacagtatcgccgggtgatgagccgttttgccatggaacagatcgagcaggaacatgtggacgataatctggcggtggtttatgaggacatgctcgaactggggctggtgaatgaagaacttgcaaaatgtctttccaatattctgtttgcgcataagctggtaattatgcagccgcatatggtccgcgcgattgtataccagaagcagatgaaagatccgcagatcgttccgattgtaaacggatgtgcctacgtgtcccttttctgcagggaatatgccattttgtttgaagatgggaaaggccaaagatatatccacagtgtcccgtaccggctggattccctgatggatgccggatcgtatctggagaaatgtacggcactggcaccggaggaacttccgtatattgtttcccattttggggaaaagccggatcatcatatgtttgatgccaaagaggaaaaatttttccggagagtgctgtttgcacaggagctggatacggaataccagtcgtatttttccagggagattgtgcgttattatcagaaaaaagagcaaaaacccctggtggaacaatatctggaacaggcagattatgagcagatgccgcaggcggtgcgtcagtatatgatggaatcccttgcggactggcggatgtatgaccggttgtatgaacagatgcaggaatatgggctggatcagatcggatcatcggcaaaggttgcagttgccacctatctgctggatgcgatggaagagagggagcaggacgaggaactgctgcttttatgtacaagtgcgtttttaaacaaaaaatacaatgacaggattctgcagtatctgagtgatttttattccggaccggttgagaccatgcttcgtttatggagagcagcacaggattttgaacttcggacaagagatctggaagaacggattcttgagcagatgctgtatacggatatggatcttatgcaggcactggaggtatttgcgcattattatgaaagcggtgggcaggaactgattgttcttgcagtcattacggtatttgcgcagaactattttgtaaaagaagccgcgctgccaagacaaatccttgccataatacggagacggtatcagagcggaaagaaactaaatgatgcctgtaaacttgccctgctcaaatcgttttccgggatgtcctctttgcaggaggcacagtatgaagccgcagatgtgctgctggcagagttcaccggaagaaatatgaatttttcattttataaaagactggatcggcggctggtacagaaatatcatttgtatgacaaaatttatgtggaacaccggacaaacccaaagaaacatgtcgtgctgcactacagccgggatgaggacggggagcagtttcacgaagtggatatgccgaatgtctatgccggtatttttgtggaaacatttgtggtatttttcggggaggagatccagtattacatcaccgaagaatataaaaataaggtcgtctcgacggaaagcaatcgtctgacctgtaacgatatctatgcacagaaagatgaaagcaggtacaatctgatcaaccagatgctgatttcagagactttatccgatgaagtttccatgtttcagacgatgaaacagtacgcaggatatgatgaggtgacgaaaaaagtatttaagcttttgtaagcaggatgggagaagagatggaagccaatacctgttatcttggcatcgaactgaacgactcgtatgccatggtaagttatatgcaaccgaatatggaagaaccggagacggtcagcacgattgccggcagtgaaaattaccggattcccacgctgcttgcccgacgcaaaaatgtcggcatgtggtattatggggaagatgccggaaggatggcaaagaccagtgaggtgatttgtgtggattcccttcttcgccgtgccgctgcatcggaagtgattaccattgcaaaagagagttatgatgcagtagatctgctggcactgtttattaaaaaagtgattgaactgccgcagaaactgggaaatacttcgcatgtgaccggaattgtcctgacggtggatcatctgacgaaagagttgatcggcattttccggcatgtggcagaacttttaggattgtcgcaggaaacatttgcggtgatcgatgacaaagagagtttttatgcgtttgccatgaaccaggagaaatctttgtggatgcacgatgtgtttttgttttcctgcgggaagaatgccgtcagttcctatgatctttcgagggatatgcatacgaagccgcagatgatcacgattcacgcaaccggggcacaggaactgggagaggagaaagatgaggcgtttgcaaggcttctgactaactgttttgcaaaccgttcggtatcttcggtttatctggtcggggacgggtttgacggagaatggatgaaacagtcactggcagttctctgccggggacggcgcgcgtttctgggacagaatcttttttccaaaggggcatgctatatggcccgcatccgtgaaatgggagaaaactggccattcatttacatgggcgaaaacgagatgaaatttaatctgagtttaagtgtcgtggaaaaagaaaaaaagaaggttttaaatcttgtcagtgccgggaaaaactggtttgagataaaaaatacatgtgaggtgatcctaagcggcacgccgcaggtggaatttttaaagcagcttccaagcagcagtactccccagatacagacggtggaacttgaggatcttccggttcgtccggaccgcacgacaagactccggattacggccagtccggtggcaaatgataagattgaagtggaaatccgggatctgggatttggtgaatttttcccggctaccggccgggcatggaaaagtatcataatgatgggataaacgtatgggtgaattattactttgtcatgaaacaattgcggctctgccctattatatagaggaaaccgggataaacatatattccatggaagaactcagctattatatttccggaaatgtgtatcttctggatcattctttcatgtgcgagagtttatgtacatgggtggaaaaacagatgcatcgtgtcgaactcgcacaaaaactcagggagaatatccgcacggaaggaaaattgtccgattttgtttttgccatattgcaggatacggcatactgtaccatgaaagaaatgcaggagatcgtttttgcggtccggcaaatggaacagaagtcggattttgaatgtgacaagatccgggcagaccagctgatggagaaggaaaaatatctggcagctatttaccggtataaacatctgttagacgaagcagatacgaaagaaaccagtgaggttctgcggggaaatatctggcataacctcggaacggcgtatgcacgtctctttttgtttgaagaggcggggcgctgctttgagaaggcatatgcatttaataaacaaaaggaatctctccgggagtgcctgatgtgctgccgctgcaggcatgatgaggaagcgtttgcggaaattgcaaaaaaatatcaggtggaggagagaaagcagcaggaaatcagaaatgaaatttccatcgcatgtaagagcgaaaaactcgaacagtttgaatcccatctggaagaattagcgcagcggaccgggagtgtccaaaaggcgaaggcaaagaaagaagtaatggatgtgattgttcagtggaagaaagattatcgaaggagctgcaaggtataacatatgattttttcaaatttatttcatagaaaaaagaataaagaaagtgagacaggaagtttctcacaatatgatcagagtgagtatgcaaaacttgagacaaaaaacattgtaaaagaattgaatctgtcggacgcggcgcaggcaaagaaatatgtagtggatttgtgtaagcagatgattcaggcgtctaaggatattgaagacagtaaatcggaatatcagctggtgacaaattatctgacagatattcagattcttgaagacctgacggacgcagagcgtaaaccgattctcgagtgcgccacacaggtcgcaaagctggaaaagcaaagaaccgattttctgaaaaccaaacgccggctgacagatacgcagtttgcgcagatgcaggaggaagaagagaatcttccgggagtgatccgccggctgaaagccaatgaggcagatctggatgcgatcaagagaaatatggcatatctggaaggaaaaaaactggaatggtccatgcaacggtcagattccgcaaaggtacagaaagtaacccgtaccgcagcgtgctatctgttagctgtgtttattacgttgtttgcttttgtgggaatactttcctggtatctgaacagggatctgcagctggttttcaccattatgggatttgcagctgtgggagcgggcgcgtttattttgatccgttaccaggattccacaagagagatccgtcaggcggatgtcaaccgcaatcaggcgattactttggagaaccgggtaaagatccgctatgtcaatacgaaaaacgcggtggatttcatctgtgaaaaatatcatgtccgcaatgcgaaagaactggaatttttatatggacagtatcaggaggaagcgcgggaaaaggaaacattccgtaaaaccagtgatgatctggattattatacgcagaatcttctgcagtatctgacacggctgcggatgtatgatactcgtgtatggctgacacacgcaaatgcgctggtcgacagccgggagatggtagagctgaagcatgaactgctgacaaggcggcagaaactgcgggcacgtatggagtacagtgtgggaagtatccatgagatgaagggtgaggctctcaaaaatatgagcaagctcggaaacaatgcttatcagctggagcagatcatccgcaagattgaggcgatgaatccggtatttaagtaaaaataatagtgatttattgcgttttcttttgagatagccgcccagtgtgaaaggggcggctatctcctgtcttatcgtgtagtgttttgcatacagtcaaaattgggattgaaagcatagtagtttttgctgtccagttcttcctgcagcagacgaagagcctcgccaaaacgttgaaaatgcacaatttcacgctcacgcaaaaagcggatcggatcagcaacttcctgatcttttgccagacgcagtatattgtcatacgtttttcttgctttttgttctgctgccatatcttccaccagatcagcaatggcatcaccacttgactgaaattcggtagcggaaaatggaactccacccgcagcctgtggccagacacctgcggtgtgatcaatataatatggtgcaaatccggaagcttccagttctttggcggaaagtccgcgtgtcagctggcggacaatcgcaccaatcatttcgaggtgagcaagttcctcggttccgatgtcagtaagtacaccggcaatccgcggatttgcaaaagaaaaccgctgggccagatagcgcatggaagctcccatttcgccatcgggaccaccgtactgacttataataaaagatgccatcttagcatttggtgttgaaatggaaatcggatattgcagtcttttttcataattccacatagcttatttcactccttcccatggcattggaccgtcattccagtcccagtcctccagcggctggctgccaaatgcggacaacggttcgaaacgttcctcgtatgtctttttagctgaattgtataattcgttgcactgattgtaataagagagtgcctgtgcgtcatccggatgggtgtccagataaagaagcatatcataggcacaaaagcccagtgccataacccagcggtacaattccgaccggttcattggctgagaagatggtcttgtcatcgccgccgccctccctgcatcatattcatattgcattttccggtaaatggtttatccagttccggaaaaattgtgcctgcggcaagcccgcgcatgggatcgtaggttttgccgaatgtctgccagggaacgtagcacatgccaggtacctgatggctgccattgtctgtttccggcatcgtattaatagttgcattcatggatttctttttcctttctgatcagcatatactgtatgatatgtttcgtttgcgttatgtgtgtatttgttatataataaaacacatgacagaataaggagagaaacgcgatgagtaaagtaagaacaagatttgcaccaagtccgacaggaagaatgcatgtgggaaatcttcgtacggcattgtatgcatacctcgtagcaaagcatgagggcggagatttcatcttaagaatagaagataccgatcaggagcgttatgtggaaggcgctgtagatattatttaccgcaccctgcagaaaacaggcctgatccatgacgagggaccggacaaggatggcggctgtggaccatatgtacagagtgagcgccaggcacagggcatttatttaaaatatgccaaagagctgatcgataaaggagaggcctattattgtttctgtgacaaggaacgcttagagggactcaaaaaagtagttgcaggaaaagaaattcatgtatatgacaagcactgtctgcatctttccaaggaagaagtagaagaaaaacttgccgcaggcgtaccgtatgtcatccgccagaataacccgacggagggaacgacaacgttcgaggatgagatttacggggatattaccgttgacaatgcggagctggacgatatgattctgatcaagtccgatggatatccgacttacaattttgcaaatgtggtagacgatcatctgatgggaattacccatgttgtccgtggaaacgagtatctttcctcttccccgaagtacaatcgtctgtatgaggcatttggctgggaagtaccggtatatatccattgtccgctgattacggatgaaaatcatcagaagctgtcaaaacgatgcggacattcttcgtttgaagatctggtagagcagggatttctgacagaggcgatcgtgaactttgttgcattgcttggatggagcccggcagataaccaggagatcatgacactcgaagaactggtagaaaagtttgattaccatcatatgaataaatcaccggcagtctttgactataccaagttaaaatggatgaacggggaatacatcaaaaaaatggactttgacaagttctacgagatggcacttccgtatatcaaagaagtgatcaccaaagattatgatctgaagaagattgcacatatggtacagacccgtatcgagatcttcccggatatcagggatcacattgatttctttgagaaacttccggaatatgatgtgtcaatgtacacgcacaagaaaatgaagacaaatgcacagacttctcttgaagtgttgcaggagatccttccggtcttagaggctcaggaagattacagcaacgatgcattgtatcagacacttcttaagtatgtagagcagaaaggctgcaagaacggatatgttatgtggccgatccgtacggcagtatccggcaagcagatgacaccgggcggtgccaccgaacttatggaggttcttggaaaagaagagtctcttgcccgtatccgtaaaggaatcgagctcctttctcaggcacagtagaacattctcacgggagaacgaatgaactataataaatcccagcagcaggccatccgccataaggatggcccgatgcttgttctggcaggtcccggttccgggaaaactgcggtaattacccaaagaacgaaacagttaattgaatatgagaacatagatccgtccaatattcttgtgattacatttacgcgggcggcggcacaggagatgaagcagcgttttcttgcagcgacaggagaagagagaacgaaagtgaccttcggtacgttccacgccatatttttcatggtgctgaagctggcgtatcattttgattccggaaatattatatcggaggagcagcgatatcagtttatgcgggagattctgtcttatcatcatctggaataccgggatgaaggggaatttatcggggatgttttaacggagatcagccgtgtgaaaaatgagcagattccgctggaacatttttattcttccagctgtggggaggaggttttccggaagatttaccgggaatatgatgagcggctcaaaaggaaccgcctgattgattttgatgatatgctgacatacacatatgagttgttttcccagcggaaggatattctttcggcatggcagaaaaagtaccgttatattctgattgatgagtttcaggatatcaatctgatccagtggaagatcatgtgtatgcttgccgcaccggaaaataatctctttgtagtgggagatgatgatcagtccatctatcggttccgcggttcaaagccggaaattatgctgggatttcaaaagatatacccgcaggcaaagattgtgaatcttgaagtaaattaccggtgtgagccgccgattgtggaggcagctatgcgcctgatcgcacacaatgaagaacgttttccgaaaaagatccgtgccggaaaagccgggaaacagaaggtgcgttttcagtactttgaggactgctataaagagaatgcatttttggcagaagatatccggcagactgtgcaaaatggggttccgctttcggaaatcgcagtactgtttcggacaaacatgcagccgcgtgccctgatggaatatatggtttttgccaatctggcatttcagacgaaagaccggattccggatatctatgagcactggattgcccgtgattttttcacttatatccgcatcgcacagggaagtgacagcagggccgatttcctttctattatgaaccggccgaagcggtatatcggcagggacagcctgcccgatgaaacggtatgttttgatgagtggatgaaattatatgaggagcagccgtggatcgcggagcggatcgaaaagctgtggtatgatctgaaacatttgtcccgtctgagcccttatgcggcaatcaactatatccggcggggaatcgggtacgatgattatctggcagagtatgccgaataccggaatgcgaataaagaagatttttatgaagtggcagatgaaatccttgcgagtgccaaagggtaccgtacatttgaggaatggtttgcacatatagaagaataccggcaggagttaaagagactggcgcaggaaaagcgcaggaatcagaatgctgtgacatttgcaacactgcacagcgccaaggggctggaatttacaaaagtgtatctgattgacgtcaacgagggcgtaatgccttataagaaagcagtattaaagcaggatgtcgaggaagaacggcgtttgttttatgtgggaatgaccagagcaaaggaatccctgaccatctgttcggtaaaaaaaatgcgtggcaaagaggtggaactgtcgcgttttatcaaagaagccggtaaagagccgtaaaaaacctgcatcgggtattcgatgcaggtttaaaaaagttactcttcgtcttcgagtgcattgaagtagtcatcatcgagcatttcatcgaagcggtcagcagcggcttcgtactcgtcgtcatccgtgatgctgtcgatctgtggaatgccatcctcatcctccgcatagcggtagagataaacggtgccttcatccggatcagagccgtccggattgagcggcatcagtgcaatgtagtcctgttcatttacgtcaaaaatggtaaggattttgcattctacttcgccttcatccaaatcaagtgttacacgaatatcgtcaatctcatccggggtaacgggtgttgctttttctttatctgccataagatacctcttttcttaatcgttttttgtgccttatatcattataagcgaggagtaaggagcttgtcaattcgaaaaagtgatatacaaagttttttaaaaagggtataatgaaaaacatgaaaatacgagatacgaaaaaacgaacagagaataaaaggatcagagaaggagattacgcaaaaccgggagtgacgattcagggagaatggaccacttttacgtttgatgcggaaaaagaggacagctgttttgtggtacttaaggatatacagaccgaaaaagaagaaaagatagctgttccggcagaatactgcatgggatcggtgcgctctatcgcagtggcagatctgcatctggaacatctgatttacgattttaagatcaatggaaaaaaggtaatggatccgtgcgcacatgccatcatggggcgtcaggtctggaatgacagttcacgcagcaggcagcagtatgaggtgcatggggcatttgatgtgcaggagtttgactggggggaggatgtatgtccggaaataccgagagaacagatgattatgtacaagctgcatgtgcgtggttttacgatggattccggtaccagaagtgttccggggacatttcgtgcgcttatgaaccggattccttatctgaagaaactcggtgtgacaacagttgaacttatgccggtgtatgagtttgaggaaattgaactgccaaagcagcagaaacttccggaatatatccgttggaaagaaaaacagacggatcagatccgtccggcagaaaaaataaaagaggctccgagcaaagtgaattactggggatatgagcccggaaattattttgcggtgaaggcatcgtatgctgccgatccgctgcatgcttcctgggaattcaggatgctgatccaccggctgcatgaaaacggcatggaatgtgtgatggagatgtattttccggagaaagtgaatcataatctgattttagaagcgcttcgttactgggtgcgggaataccatgtggacggaatccatctgcttggggaacatctgcccattacggcgattgtgcaggatggcatgctcagccgtaccaagattttttatgtggattttgaggaaaaagcatgtgcggcaagccggaaatatccgaatctgtatatttacaaagaggagtatcagtatccaatccggcaggtcttaaaccatatcaatggaaatatgcgtgattttgccgatcagcagagaaaacagggggcttttttaggctatatcaattatatagcaagcaacaacgggtttacgcttgcagatctgtttatgtacaacgataaacacaatgaggaaaatggagagcagaatctcgatgggagttcctggaatttcagcaataattacggcgtggagggaccgaccagaaagcgttatatcaatgcgctgcggaaattaaactggagaaatgcggttcttatgcttatgctggcacagggcgttcccctgttgtggagcggtgatgagatgggaaattcccagaacggaaataataacgcatactgtcaggataatcccaccggctgggtgaactggaagaatgagaagtcccatcgcagacagatcgaatttctgcagcaggtaattgcgtttcgaaaagaacataccgtgctttcaaatccgatgccattccagttttcggattataaatcgctggggtatccggatctttcctatcacgggacaagtgcgtggatgttagaaccgacaccggatcatctatgcctgggaatgctttattgcggggcttatgcccaaaacgaaaaagagccggatgtctatgtcgcctataattttcttgccgcggcaacggaactggctttgcctaaaccgcgaaaagggaaagaatgggttgtctgtattgacagcggagaagaggatgctgcgtttttggacgcaccaaagcccgtaagcggaggaaaaatcattctccggccacagaccatctgtgtgctggagagcagggagatgaaaaaacatgggtaatgcatggaaacatttttgcacaattacacatcacaaaaatctggtgcttgtcggttgctttaagatcggactatacaggcaggggctgctgcatgatctttcaaaatattctccgacggaatttctggtcggttgcaaatattatcagggaaccatgagtccgaacaatgcagagcggaaggaaaaggggtattccctggcgtggctgcatcacaaaggacgcaataaacaccatctcgagtactggattgattatgatatttcaaaagaaccggggaaagaacattcggggatggcaggaatgaaaatgccggtgtgctacgtggcggaaatgtttgttgacaggatcagtgcatccaaaaactaccagaaagacaaatacacgaaccggagtgcactcgattactatatgcacggcagatcgcattatctgatccatccggataccgaggcactgatccactatcttttactgatgctggcagtgcggggggagaaggaaacatttgcatttgtaaagaatgaggtactgaaaggaaacgttccttatgagagggaaagcctgatccggcgcatacaggaactggcaccggaagaaaaaatataaaagggaaaagcacagaatgccttctgctgacatagaatattagaaagctgttggaaaaggtgctgtgtgaaaacatttttggttcccctgacactggaagaggaaacagactgtctgtgcagattaaaaaatggcgagcaaggggcaaaggaagaactggtgttgcacaacatgcgcctggtagcccatgtcgcaaaaaaatatgtcagttcggaagaagaacaggaggatctgatttccatcggtacgatcggactgatgaaagcagtagacagtttccggccggaatacggaaataaatttgcaacgtatgccatccggtgtgtggacaatgaattgctgatgcatctgcgatcaaagaaaaaacagcgcaaagaagtttctatgtttgaaccgattggtacagacaaagaaggaaaccagattcagcttgtcgatgtgctggagtttcatgataaaaatgtagcggatgaagtgacaaaaagggagcagatgaaaaaaatccgtacctttatgaatgatgtgttaagcgagagagaagcatttatcattcggcgaagatatggaatcggaggaaatcaggaactgacccagagagaaatcgcgcgggcacttggaatttcccgttcctatgtttccaggattgaaaagagagcactggaaaaacttaaaaaagtgataagcgaataaagtcgttgcaaaaagatgcattttatgataaggtaaatgcatcttttttcatgcatgtgtctgtgcaaaattcccatttgttggaatgaggtgaatatgtatagccaaatcaggacatccatgctggatggaatctgcgcaatgccggtacaggtagaggtggatatcagcatgggaatgccggtgtttgatatggtaggatatctttctccggaggtgcgggaggcgaaggaacgagtgcgtacggcgcttcacaattgcggaattcttctgcctgcaaagcggattaccgtaaatctttctccggcaaatataaggaaaaccggaaccggatttgacctgccgattgcggttgcactgctggttgccatggggctggtaaaaccggaaaagtgcgcggacacgattttttccggggagttgaatttaagtggacagttactgccggtccggggaattctgccgatggtttcggatggagtaaaggaagggattcataaatttgttgttccggctgataatcttatggaaagccgtctggtgcagggggcggatgtctgcggattttctgcattggaatcggtgatcggctatctgcaggatggcggttataaagagccggcatatgcaggccggcggcagaacagatcccatgggatgccggatttttccgaagtaaatgggcagcagtttttgaaacgggcagcggaaatcgcagcgtccggaatgcacaatatgcttatggtcgggccgccgggagccggaaaaaccatgatctccgagcgaatggctacaatcctgccgccacttacaaaaaaagagcagctggaggtttcaaaaatatacagtgtctgcggtctgctggcagactcccggacactgttgcaggaacggccgtttcgcagtccgcatcatacggtcagcatggcaggacttgccggcggtggacgaagtatccggccgggagagatttcactggcacatcatggcgtgctttttctggatgaactcccggaattttccaaatcaacgttagaagtgctgcgtcagccgttggaggaacatcagattcatttgacgcgcgcggtcggcagtgtgacctatccatcggattttttacttctggcatctatgaatccatgcaattgcggatattatccggaccggaaccgatgcagatgcacacaggcatccctgcagcggtattttgaccgcatttcccagccgctcattgaccgcatggatctttgtgtggaagcgcctatggttacttatgaagaactgacggaaaaaggcaataatgagagttcaaagaccatccgggacagggtgtgcgagtgtcaggaacgccagatttttcgattcaaagacgaaaatttttctcacaactgtggaattccggcagcaaaattaaaccagttctgtaagctgggagaaaaggagcagcggtatatggaaaaaatgtttcataaactgtcacttactgcgcgcacctatcataaaatcctccgggtggcacgaacaattgctgatacacaaaaggcggaaaacatccgtgtctgtgatctgacagaagctgtgtgttaccggagtatcggggataaattctggggaggtatggaaagatgagcatgtatgcgtactggcttgcaaataccggactgaccgtacataaactgacgggtcttatgacagaaggaatcggtgcggaagaactgtatgccttgcaggaatcccaaatgaaaaaaatccgggttctggatgaaaaggatgtggaaaaaatcacacaatccaggcggcactgggaggtacaggagcgctggggaaaactgcaggaggaaggaatcggttttgtctgcgtggaagaagcacggtatccgcaaaagctccgccagattttagcagcgccttatgcgctgtattatattggcaggctgccggaagaaacgcgaaagagtgtggcaattgtcggggcgcggacaagaagtgcctatggaagccagattacagggaaactggcgagggcacttgcacagaaccggatggatatcatcagcggcatggcgatggggattgatgctgatgcgcatagcggagcactggaagaaaacggggatacctatgcggtactgggctgtggcgtggacgtgtgttatccgaaaagaaaccggtatttatatgaaaaaatgcaggatcggggaggcattttgtcggaatatccgccgggcacaccgccgctgccgggatattttccgcaaagaaaccgtatcatagccggacttgcggattacgtgattgtgatggaggcaagaaaaaagagcggatcgctgattactgcggactatgccatggaacagggaaaggaagtgtatgcccttcccgggagagttacggatgccctgagcgaaggaaccaaccatctgatccagcagggcgccggcatttttgtaagtgtggaagatttcctgcaggaactgcaattacagccccaaaatataacgacacaaatagactttagaaaaaatcttcttgaaaaagacgaatcgttggtgtatgctttattagatttttatccggtgggtcttggaaccctgatcgaaaaaagtccctatggtctggtagaaattctgccggttttagagaggctggaacagaaagggttcattcaggagaccattccgaattattatataaaaacaatttagatgatataaggagcaccaaatggcaaagtatctggtaatcgtggagtcaccggcaaaggtgaagacgattaaaaaatttctgggaaaaaattatgaggtcatggcaagtaacgggcatgtgagagatcttccgaagagtcagctcggattttctccggaaaatgattttgagccgaaatatattacgattcgtggaaagggagagattcttgcaaagttaagaaaagaagtaaagaaagcggataaaatttatctcgcaactgacccggaccgtgaaggagaggcaatttcctggcatttaaccaaggcgttgaaactggacgacaaagatgtcagcagaatcagttttaacgaaattacaaaaacagcggtaaaagcatccttaaagacaccgcgtgagattgatatggatctggttgatgcacagcaggcgagacgtatgctggaccgtatggttggttaccggatcagcccgttgttatgggcaaaagtaaaaagagggctgagtgctggtcgtgtacaatccgttgctttacggattgtgtgtgaccgtgaggaagaaattgatgcatttattccggaggagtactggtctttagaggcaagcctcctgccggaaggtgagaaaaaaccgattacagcaaagctgctggacaaaggcggcgaaaagtttgagatttcttccgaggaacagatgaatcaggtgcttgcggaattaaaaggcaaagaatttaaagtctgcgatatgaaaaagggagagcgcacaaaaaaagcgccgcttccttttacaaccagtactttgcagcaggaagcttccaaagcgctgaatttcccgatctcgaagacgatgcggattgcacagcagctgtatgaaggtgtggatatcaaaggacagggaacggtcggtatcatcacctatctgcgtacggattccgttcgtatttcggaagaggcggatgaagcagcgcgtgcctttatttccgaaagctacggagaggaatatctgtctgacggagaaggaagcaagaagagcaatgcaaagattcaggatgcgcacgaagcgatccgtccgaccgatattaaccgtattccgtccgagattaaagagtcgttaagccgggatcagttccgtttataccagctgatctggaaacgctttgccgcaagccgtatggcaaacgcaaagtatgagacaacaaccgttaacattgcggcgggagattatacattccgcgtttctacttccaaagtagcttttgacggatttatgctggcctatacggaagcggatgacgaaaagcaggaaaaacaggtacttttaaaatcgattgataaagatacaaaattaaaactcgaagaattcgatccgaaacagcattttacacagccaccggcacattatacggaagcttcgctggtaaaaacactcgaagaactcggaatcggacggccgagcacctattccccgaccatcacaacgattattgccagacgttatatcacaaaggaaaataagaacctctatgtaacggagatcggttcggttgtcaattccattatgaaggagtctttcccgaccattgtagatgaacattttaccgcaaatatggaatctcttttagacagtgttgcggaaggtcatttaaactggaagacggttgttgcgaatttttatccggatctggaagaggctgtggaggccgcggaaaaagatctcgaaaagattaccattgaagatgaagtgacggatgaaatctgtgaagtatgcgggcgcaatatggtaatcaagtatggaccgcatggaaagttcttggcatgtccgggattcccggagtgccggaataccaagccatattatgaaaagattggtgtcgcatgtccgaaatgcggaaaagacgtggtcatcaaaatgacacgcaagggcagaagatactatggatgcattgattatccggaatgtgatttcatgagctgggggcgtccggtggaaaagaaatgtccgcgctgtggaggctatatggtagaaaaaggaaacaagcttgcatgtgcggatgaacattgcggttacacggaagcaaaagaaaaagaaacagaatagtcgtaaatttttcaaaaaatattgaattgtctgataaatagtgctacactcatgatatctgtgataaagacaggaggaaaaacatgagtgttcaacttctagacaagacaagaaaaataaataaactgcttcataacaataattcgtccaaggtggtatttaacgatatctgtgaagtcctgacgggaattcttgattccaacatccttgtaataagcaagaagggaaaggttttaggttccagtgtatgcaaaggggttgaggaactgcaggaactgatcgtggatgaagtcggcggatatattgatgcagaactcaatgagcgtcttctgggaatactttccacaaaagagaacgtaaatctggaaacgctcggattcggagatgaatccaaaaagtaccgggccatcattaccccgattgatattgccggggagcggctgggaaccttatttgaataccggtgcgaaacggaatatgacattgatgacattattctgacagagtacggaacaacggtggtagggctggaaatgatgcgttctgtaaacgaagagagcgcagaggaagcgagaaaggttgcaatcgtaaaatctgcgatcagcacactttctttctcggaacttgaggcaatcacccacatctttgatgaactggatggcaatgagggaattcttgttgcaagcagaattgcggatcgcgtgggaattacccgttccgtgattgtaaatgcacttcgtaagtttgagagtgcgggcgtgatcgaatcgcgttcttccggcatgaaaggaacttacataaaggttgtcaatgacgtggttttcgatgaacttgcagaactgaaaagaaaaaatgcaaaataaaggatggaaccgagcggacagcaaaaggacttgtatgtaaatataagtccttttttgtcattttatgtaaaaaactacttgtattttgcttgatttatactataattagtatgatacgataatagggaatactagataaggaggcacaaaattgctgagtacagatgctttcaattatgtgaatgttctggataaagctgccgatgcgagctggagcagggagaacattctgactaacaatattgcaaatgtaaacactccgggatataagagaaaagacctgaattttgaaaatacattaaaaacagaactgggccgctgcaagcatgagtccctggattcgaaaatgaaagacgtggatctttccagactgaatccatcggtttatgtggacagttccaattactcctatcggctggatggaagtaatgtagatattgatacagaagaagtggagctggcatccgaacagatccgctatcagggaatcacagccggaattaacggacagtttgaccgtatgcgttccgtgattaagtaagggggaaagataaatggctttatttcaggcgtttaatatcagcgcgtcaggcatgaccgcagaacggttccgtaccgatatcattgcggagaacattgcaaatgtaaatacaacatcaacagagagcggcggcccgtaccgacgcaaaattgtaaattttgcagaacggaaagttaccccgttttcccaatattatgcaactgcatcgcagaatccggcaatcggaaacggtgtaaaagtaacttccgtaaaggaagatacggaaacagatttcgtgaaagaatatgatccttccaatccggatgcggatgcggacggatatgtatcttatccaaatgtaaacacggtcacggaaatgaccaatctgatcgattctacccgtgcatatgaggcaaatgcgactgcgtttgatgccacaaagagtatggcaaccacgggactttccataggaaaacaataataaaaagtaagttatacgagagaggacaaaagcatggatatcacacaattgtctggagtttcttctgactatctgaatacattcgcaaaaaaagaggcacttgttccgggagacgatgacagtttcagcgcggtgctttcaacagcgatgaaatcagtagatgaaaccaatgacctgcaaaatactgcggagtcggaagaagtacggttcgcacttggggaagccgaaaatccacatgatctgctgattgcagagacaaaagcaaatgtagcattgcagtatacggttgcagtgcgggataaactgattgacggatacaaagagattatgcagatgtcaatctagtaagtgaggaacgaaaacatgccagaacagttacagaaaatccttgaccgtgtggttgagtggtggaaaaaattttccaataaacaaagaatgctgctgatcagccttaccgcagtggtgatccttgcgctggtgatactgggagttgttgtatcaagaccgagttatacaacactgattgactgccagaacgcaaaagaagccagtcaggtaaaagatctgttggacggcgaaggtgatattgattataaggtaacggataccacacattttgaagtaaacaaaaaagatgagaacaaggcaaactggcttttgggatccaataatattgatacaacgggatttgacctgtcagatccgaacatcaaggattatatcgacggaagcttttctaccacggaggcagataaacagaagcttgccaaaagctatatggaagataaactggagaatgtgcttgctgcgaatgacctgattgattccgcaaaggtcacactggatattccggacgatgacggtacactgatttcgcggatgcaggaaagttctgccagcgtttcgcttgccctgaatggttctatggattcggatcaggcgtattcggtggcgcgccttgtggcaaccgcccttggaaatgattcgacagacaagattaccattctggatcagaagacatccaaaatcttgttttcgggagcagaccaggatgatgatgccacggttgtttccgacagtctggacatcaaagaccgcattaagaattccgtggtcaatggtatcaaggatgtaatggtcaagtccggtatgtattcggacgtgcaggttgcaccgaaccttgatattgatatgtccaaggtggaaaaggcggttcacaattattcacacaatgatggacaggatcagggagaactgacagaaagctctgagtataattcagaggcaaaaggtggacaggctgcaactccgggaacggattccaatgatgatacgccaacctatgtgacaccggatggcgagattacagaatcttccgtgtcggatgtggataaaaaatattcgccgaatgaggaaattataaaaactatttcaaacggtggagcgatcaactatgataacagttccattgccgtgactgccacacgctgggttgtttatgatgaggacgaattgaaagattccgggcagctgaaagggacaacgtttgaaaagtttaagagcgcacacagtgatccggtacaggtggatgcaacgcaggatgaaattgaccttatcgcaaaagctaccggaattcagtctagtgcaatcaaactggtctgttatgaaagaccgcagtttgtggaatcccagaagaagggattcggactcaccgacattttacagattctgcttgcggtgctgatttttgcgttgctggggtatgttgtattccgcagtaccagaaaacagaaagtggaagagccggagccggaactgtctgtcgatgccctgctggcggctacttcagataacgacgatgaaaatctggaagatatcgggtattcggaaaaatcagaaacccggaaacttattgaaaaatttgtggatgaaaatccggatgcggcagcacttctgcttcgcaactggttaaatgatgattgggagtaatttatgaacaacgactcatatactggagtacagaaagcagcgattcttttgattacgctgggaccggaaaaggcggcaaccattttcaaacatttaaaggaagatgagattgaagaattaacgctggaaatagcgaatacaagaagcgtatcgccacagaccaaggaggaagtgctggaagagttttatcaggtatgcctcgcacagcagtatattgcggaaggcggtatcggatacgcaaaagaacttctggaaaaagcactcggaaacgacaaggcacagggagttattgcaaaacttacagcatctcttcaggttcgtccgttcgaatttatccgaaagacagatccggcacagctgctgaactttatacaggatgaacatccgcagacgattgcgatgatcctttcgtatctggctccggcacaggcgtcccaggtactgggagctctgccaccggaaaaacaggctgatgttgcaaaacgtattgcaactatggatcgtacttctccggatgtgatcaaggaggtagaacgcgtactggagcggaaacttgcatctcttgtaaatcaggattacaccatcgtcggtggtattgatgcaattgttggcattttgaacagtgtcgaccgtggaacagagaaacatattatggaatccctggaaatcgaagagccggagcttgcagacgagatccgcaaaaagatgttcgtgttcgaggatattcttctgctcgacgaccgtgcaattcagcgtgtgctgcgtgatgtggaaaatgcagatctggagcttgcgcttaagaatacaacggaagaagtacagaatgtgatctacaagaacctgtcaaaacgtctggcggcaatgatcaaggaggatatggactttatgggtcctgttcgtatgaaggatgttgaggaggcacagcagaagattgttgctgtgatccgtaagctcgaagatgccggagagattgtaatttcacgtggcggaggtgacgatatcgttgtctaatttactgaaacaatgttatgtcgtcagttcgggaactggtacaagaattatcaattccaatgacggggtacgccagaaattaaaagaactgcaacaggaacaggctccggaacaggtagatgtatcagcagaggacggacaggagaatgcaccggctggtttctcacaggggattcaggcaaaaaccgtgcagattgatgtggaagccctgcgcagggaagcacttgaaaaggcagctgtggaggcagatgagattacttccacggcaaaagaagatgcagaacgtatccgtggggaagcggaagaaaaagcccgtaccctgtacgaagaacaaaagaaactcggatacgaagagggtgccagatgccgggaagaagaattaaacagggaacatgagaaggcgatggagtctcttcatgcacagaaaaaacaactggaagaacagtatcatgaaaaaatgtcggtgatggaaaaagacattgtggacgctgtgattcaggtatttgataaagtgtttaagattcagtttgaagagaaacgtgaacttttacttcagctggtaaatggagcattacttgacattgacccgggagataaaatacggattcacacgaaccggagcgatgaggaaatcctcaaagaacatcttgcacagatgcaggatattgtaggaaaagatgttgccattgaatttataaaggataataaattatcggatggacagtgcaaaatagaaacaccgtatggcgtggttgactgtggggtggacacacagttgtctgcactgctgaaggatatacgttcactggtataaacgggagacaaatttggttaaagaagcggaaaagtatttacagctgatggaccgccagtattataagagttatggaaaagtagtcaaggtagtaggtcttaccattgaatctgtcggaccaaaggcacgtatgggagatttgtgtaaaatttacccgaacgagatggaagaggaatatgttatcgcggaagtggtcggttttcaggattccagactgatcctgatgccggttgacagcgtggaaggggttggaaccggatgcattgtggaaaataccggacatcccctgtcggttttggttggagaagaactgcttgggcatacgctggatggaatcggacgcatgacggatggaacggaagaaattcacggttcgtattatccgctggaaaatacgccaccggatccgatggatcgccggattatcagcgaggtactgccgcttggtgtaaaagcggtggacggactgattacggttggaaaaggacagcgtatcggtgtgtttgccggttctggtgtcgggaaaagtaccctgcttggcatgtttgcaagaaatacgaaggcagacatcaatgtaatcgcactgatcggcgagcgcggcagggaggtccgggaatttattgaacgtgaccttggtccggagggaatggcacggtccgttgtcgtggtcgcaacgtcagataaaccggcactgatccgtaataagtgtgcaaagacagcaacggctgtggcggaatatttccgtgatcagggaaaagatgtactgcttatgatggattccatgacacgattttcccaggcacaaagagaaatcggacttgcatccggggaaccaccggttaccagagggtatccgccgagtgtgtacgcacagatgccaaaacttctggaacgtgccggtacaaatgaaaaaggatcgatcaccggactatatacggttctggtagatggagatgattttaatgagccaatcacggatacggcgcggggcattctggatggacatattgttctcgaccgtaagctgggacataaaaatcattatccggcaattgatattttacagagtatttcccgtgttatgaattccatcgtaacaaaggaacataaggcacttgccggaaaattaaaacaggtgcttgccacatacagtgaagcagaggatctgattaatatcggagcctacaaaaacggatcgaatccggatattgattatgcaatccgaaagaataaagaagtaaatgaatttctgtgtcaggatacggaagaaaagtttgcttttgatgaagaagtggaactcttaaaaaaggtgtttgacgactgatcaatggacagaggttttaaatggcaaaatttgtttatcgtatgcagaacatactgaacattaaacagaaactggagacacaggcgaaaatgacatacagcctggcaaaccagaaatatctggagcagcagaagattctgcaggaatatatggtgcgcagagtcggatatgagcagcactggaagaaactgatgcagggaaatttaaatctgcaggaagtcgaacatgcgcgggcagatgtaaatgccatgaaaacgattgtcagacgacagatggtagaagtccacaaggcggaaaaagaactggaagatgccagaaaccgcttaaaaaccgtgatgcaggaacgaaaggttcaggaaaaattgagggaaaaggcatttgaagaatttaagcaggaacttgcagaagcagaaacgaaagaaatcgatgaacttgtaagttatacctataacaagggtgaacagggagaatgatatggcagacgaaagaaaccttgtcgacgaggaagacgcggtaaaggaaaacagcacaaaaaatcgaagagaaaagaaaaaacgggaaaagaaagaaaaaaaagaaaaaaagaatgccaaaggaaacgcaccggaaccgggagaagatgaggatgaaaagggaggcggcaggctgattcttgtcctgacaaccattttaatcattgcgatatggatgggaattataggaattctgattaaaaccgatgtcggaggatttggatcaacggtgttatatccgcttttgaaagatgtcccttatgttaataaaatcctcccacagccggaagaaacggtggagcagaccgagggcacagagcatcagtatgggtctttaagcgaggccatcagccagattaaagaactggaaaaagaactcgatgaagccagcagtacaaataaaaatgacaaaaaaaagatcaaggatctgaaggcacagatcaaggatctttcaaaatacaaagaggatgaggctgcctttgaaaaggagaaggaaaaatactacgaggaggttgttttttccgatcaggcacccgatatacagcagtataagacatattatgagagcattgatccagaaaatgccgaagtcttatacaaacaagtggttgaacagattacctacgatagtcaggttgaagattacgcaaagacatattccaacatgaagcctcaggaggcggccagcatctttgatacgatgacggacaatctggggcttgtggctgacattctcatgaatatgggaacacagcagagggcggatattcttggcaagatggatgcaacgactgcggcgaagctgacagagatcatggaacctagcaagaaaaagtaggaaatctgtaaatgacagaaaggaggaacgtgtttgacaagtgcaaatgtatttaatttgaattctgtaaagcagggtcaggtattaaatgcaaatgctgcaaaaggcagatcaaaagctgaaaatccggatgcggcaggcgtgtttgcttcactgatgggcagtaactactctacaaattttaatatgccgtccgtgaatacaaaaataaacaacaatgtattacagcagacaaatgcggcagataattacgaccggtatcagtatcaggataataccatccgtcaggcagccggagatgttgtcacagacgtgattaacaattcgacagatactttggatcagttccagagtgatgttgtcaggacggtggccgaacaattgggtgtttcggaagattctgtaaaagatatgatggagtcgctgggacttacagcttttgatctcctgaatccggaaaatcttgcacagcttgcaatgcagctgacaggagagacttctccgatggatttactgatgaatgaccagtttcaggggctgatgcagcagattgaccagctgggaggacagcttgcaaatgagctggaacttcagccggcacagatggatgaactaattgcgcagatggatattctgcagacaccggaaactctgaccgatgaagaaatgcagatattgaacgatgcggcaggacagcagacaacagcagatactgtttcgacagatattatgccggagcttgcgcagaccgatgaggtacagccgatggataaacaggcggatgtatttcagaaagaaccaaaatcggatgaagtacgcacacagcagccacagacaaaggagacaaagcagacagcagaacaacagacgatggaacagcagacggatgccggagatgcagattcgcagacaggggatcaggtgaagtcggcgcagccggaaaaaatgacggcagaccagaccagctctgatgtggcaaagacacagactgccatgcagatgcaggataccgccggggtacagacgatggcgcatgcggcggatgtaacatccgagacatcgtatatttctgtggataccatggatttgctggaacaggtggcagagcagatccgtgtgaatgtttcgcaaggaacttcatcgatggagatgcagctgaatccggaaaatctcgggaaagtgtatgtaaatatttcttcgaaagaaggcatgatccatgcacagctggcagcttctaatgaagcagtccgcgcagcccttgaaacgcaggtggcagatctgcggcagaatttaaatcaggcaggtgtcaaagttgacgccatagaagtaaccgttgcttcccatgaattcgaaaagaatctggaacagaaccaggagaatgaaaagcagcagggagaacggcagcaggagcagtccggaggcagaagaagaaatttaaatctttcctcactggatggattgtcaggattgatgacagaagaagaaactcttgcggcacaaatgatgcgggagaatggaaactccatggatgtaaccgcatagaaaggagaaaaaatggcagatacgacaacttccgcactgaattgggcgagtgtggaaaacggaaaagtaaaaacaacaaaatcgaaaaaaagcgatgagtccaacaacggaaccatgggatacgaccagttccttacattactttgtgcggaaatgcagtaccaggacccgctcgagcctaccagcaataccgaatatgtggcacagcttgcaacgttctcacagttagaggcaatgcttggcatgcaggatacacagaaaaacgagatggcaaacaatctggttggaaaatatgtaatcttaaaggtttcggacgaaacaaccggaaaaacttcttatgtggacggtaaagtagattatgtcatgtatcaggaagacggatcacagatgctcagtgtcaacaataagctgtattccatcgatacgcttgatacggtggccgacagtgattactatgaagcgattggttatgccaagaccatttcaaacatgctggcacagcttccggatattgaaaatattacgaccaagtattccggtgcgatagaacagatccgtaaggtatacgatggcatgacggattatcagaagagctttgtaagtgagtctgatcttgcaaaactgaagaagtatgagcagaagatcaaagatctgggtggagatacctcagacgatacaaagacggatgataccaaaacagatacggatacgaaaaccgatgataccaagactgatacggataccaagaccgatgacacaaaaacggatgactcgaagacagagaatggttccgatcagaagagtgacgagacaacaggtgcataggaaaggggagaaaaaagatgaacccgatcagcaaacagttttcgtcgatcgaacaggtaaccggtcagtatttaaaacagaaaaacgtaaccagtccgtcaaagacgtcggatgtttcattcgaagatgtcttacggcaacagcaacagttaaagttttcaaagcatgcctcgcagcggctggaaagcagaaatatcagcttatccgaggaacagaatgccagactcgaagacggagtggaacaggcacatgccaagggaattaaggattctctggttttggtggattcacttgcttttattgttaatgtgccaagtaaaaccgttgttactgcaatggatcagacggaaacacaatcaaatatttttacaaatatagatggcgcagttattatgtaaccggaccttatggaagttacaggaatcccgactgacagaaggatttcaaaaccatattgccatctaaggaggtcaatgtactatgatgagatcattattctctgctgtgtcaggtcttaagacacaccagacgagaatggatgtaattggtaacaatattgccaatgtaaataccgaagcgttcaaagcttccagcgtaagattcagtgaactgatgtaccagacaatgtccaccgcatccggtggggatgcgtcaaccggtacgggtggtgtcaatgccaagcaggttggtcttggtgtaagcacggcatctaccatgatcaatattaccggggcaggttcttccgagacaaccggatacccgtttgatttaaaactcagcgacagccagaccacaaacttctttattgtcagcgatggaacaaataccatgtttacccgtgcaggttcgttctatgtagatggaaacggctacctgtgtatgagttctaccggatatacggtacagggatggcaggtagacaaaacgacaggtgagatccacaaagatacggtttctcccctgcaggtgatgtcaccgtccaacacgacatccgctccggaggcaacgacagaggctcatgtgcatggaattctggataaggaagataccgatgtcaccggaaaagacggctatgttatgactcttggattttatgatgatctgggatattcctatacggctaagtttgcggtatcgacaccgaagacaactcagggattaggcactggaaataattattttatcagtttaacggatattattgattcgaagggaaattctattgtcacaaaagacgaaaatggaaatgcaataaaagacgaagctggtaagcgtaagatgcttgattcgatctggggagatgacgggaaacaggatgatacgaatggaccgaagggctattatatgaaatatgattccaataagggtacatttgtaagtattggcgatggttcgaatacaacagctggtacgaaggctgtaacggcgaaatccttaaaactttctgccctgggaacacagtatacaacaaacaatgcagacggaacgacacaaaaatccaattttaaggacatcaatgtagatttttccacttccaccaatgtaggccatggcggaaagtcaacactgaaagtagaaaaaggaacttctgttggaaaagaaaccggtaagaagaatggtgcaatgatcggacttgctgtagaccagagcggtaagatttatgcaagctatgacaatggtaacaacgaacttctcggacagatcgcagtggcacagtttgccaatgcttccggtcttgaaaaaattggtgataactgctatcagacaaccttaaactccggcgagtttgacggtgtgggtgtagctgtggatgcggatggaagcaagatcaattccggacagctggaaatgtcaaacgttgacctttctggacagtttaccgatatgatcattacgcagcgtggatttcaggcaaattcgcgtgttatcacagtttccgacacattactggaagaattaatcaacttaaagagatagtttgaaaaatagttgggaaatggttttttgactgtttcccaacatttttttgtgattttacaccctttttaacaaaaaggaagtagacaagagagagaaagtttagtaaaatcatataaaagggtattttgatggattttgtcggaagattcatcggaattcctaattttagaaaatggaaggtgtagttcatggatatagcatcactgctttcaattatcggcggaattgccatggttatctttggcgtcctcagtagtaacagttttgacatcactgcgatgcagatgtacattgatccagcgtcggttgttatcacgtttggcggatcaatctgcagtacactcgggtgtttcaaacttgcagatggaatcaacggattcaaatcaatttcactcccgttcaaggataaaacatatgatccgtcacagaccatccggacaattattgacatgtcaaatgtcggaagaaaagaaggtctgcttgcacttgaagaagctgcaaacggaattgaagacgaattcctgaaaaaaggaatcatgcttgtagtagatggtaccgatccggagctggtccgtgggattctggaaacggatatgatgtgtctggaaacccgtcacaaggatgtgattaagttttgggaaaaatggggcgagatgggtcctgcctggggtatgattggtaccctgctcggactgatcgccatgttaaataaactttccgatccgtctgcgatcggaccacagatgtctgtagcactggttacgacactgtacggttctctgattgcaaactggttatgtaccccgattgccggaaaactttccgtaaacaatgatatggaagtggtaaaccgtcagatcaccattgaaggtttgttgtccattcaggcaggagaaaatccacgcgttattgaggaaaaattaaagtcattcctttcaccgtctgtaagagagggtgttcttgaaaacggcggaggaggtgaagagtagtggcaaaaaagaaacaggaagatccgccaaaaggagcgccggcatggatgaatactttctcggatctgatgaatcttttgctctgcttcttcgtactattgttttccatgtcgacagtagatactgacaagttagaggcggttgttgcatcactgcagaacgccatcagcatccttccgaccggcggcacaagcattggagagggagagatgatttctgccggtgtccgccagctggaatttctggattcttactacaatgagatggcaaattccaaagcagagaataccgatgagcagacagatggcaaactgtctgcacaggaacagtacgagcagcagcaacttgcggaatctgaaaagatggcagatgaaatccaacaggaacttgataattcacagctgtccggaaaggtggatgtggatttcaatgcagagtatgtaaaactgaatctgaatggttccattttgtttgcatccggtaaggctgatctcgttaaacaggcagtcccgattgtaaacaagcttggaaagattcttgaaaaatataacaggaatgtgatagagatagaaggacataccgataatgttccgatccgctattctgcaaaatatgaaaataacgaggttctttcggtgtaccgtgcacttgctgtcacggatcagctcagaaaaaataaaaacttaaatcccaagtacattaagtttgcgggaagaggagattacataccggttgctgacaacagtaccgcagagggacgtgcgcagaaccggcgcgtagaaataaaaatttataactcattcaattcaaatgtgaaagaaaataactaagaggagtaagcaatgaagaagaatttaatttcagtcgtaattctggcacttgtgtttgcaaattttgttttgacagcacttttgatgttttcggtattaccggagacaaaaaaagcaaatacgctgatcgaaaaagtgtgttccgcaattgatctggatttaaacagtggtgcggctaccggaaccagcaatatttccattgatgatcaggaaatttataaagtcagcgaaggggaagacctgacaacaaaccttgcagaaggaaaagacggaaagactcattatgcagtactgaatgtatcacttgttctgaacaagaagagcgacaattacaagaaatacacacaggatttcctgacaaatcaggatgatacaatcaaaaatgatattatcaaagtggtaagtggatatacatttgagcagtttaaccagaattcagatgcaattaaggacacgatccttgaagatatgcagaatttattcggcaaagattatgtgatcggagtaaacttctccaaactgacagcacaataggatttttacaggtggtgaaagactgatgggtgacgtattatcccaaaatgagatagacaacttgctggcggcacttagtaccggtgagctggatgtggatgaaataaaagacaataatgaaaaaaaggtaaaagagtacgattttgcccgtccttccaaattttccaaggaacatctgcgtaccatggaaatgatatttgaacattatggcagacttttatctacgaacctgcccgtatatttacggaaaaatgttcaggtagaggtggtgaattcagaagcggttacgtattctgaattttccaatgcactgtcaaatccggttcttttgggaattgtgaattttgcacccctcaagggaaatattattttggaaatggcatcgaatctggggtatgcgattgttgaccgtatgctcggtggcagaggagatcctatggacaaagtccgtgagttctcggaaatcgaacttttgattatcgaacggattatgattgtgtgcgtcaaccttttgcgggaaccatgggaaaacgtggcggatattcatccccggttagagagaattgaaaccaattcccagtatgcacagattatttctccgagtgaaatgattgcgattgtgacaattaaccttaagatcggggaagtggaaggcctgatgaatgtctgccttccgtatctgacccttgaggatgtcattgataagctgaatacgaagtactggtattcaaatctgcagaatcaggacaataccgattacacggaatccattgagaccctgattcggcgcgcacagataccggtcaaagctgttcttggaaacagtatgatatcggtaaatgattttgccatgctgcagccgggagatattatccggctggatcgcaaggtggaggatgaattggatatttatgttggaaatattcggaaatttactgcacttcccggatcatcgggggataaatatgcagtcagggtcacttcggtgatcagagaggagcaataaactatggatggagtattatcgcaggaagaaattaacgcactgctgaatgaacctggagcagaagcgagtgattctgcggaaaatgaactgtctgatgcacaaaaagacgcgatcggagagattgccaatataagtatgggaactgcggcgacaacgttgttttcgctcgttaatcataaggtggaaatttcaactccagttgtttcttacggcacatgggatgatattgtacaggaatacgaaaaaccttgcgtgtttatccgcattgcatataccgtaggactggatggaagtaatattcttgtcctgagggaacatgatgtaaaagtcatcacggatctgatgatgggaggagatggaaccaatacagatggcgaacttggcgaattgcatttgtccgcaatcagtgaagccatgaaccagatgatgggttctgcggcaacttccctttcttccatgttaaaccgcaagattgatatcagcccgccaaatgcaacggtgattaatctgcaggaagacatcgatgaagcggagattgattccttccttaccggaaagtttgttaagatctctttccatatggaaatcggggatctggttgacagtacaattatgcagctgtatccgatttcatttgcaaaggatatgtgtgatggagtggcaaaaacgatggaaatggacagtcagagtgtgacggccgattcctcagcagcaaattccggcaatccggcaggggcacagccagcagctgctgccgcagcacagcagtcacagcagatggcttcacagaatacagcacaaatggggcagccgatggggcagccgatgggacagacgatgatgggaaatactatgatgaatcagaacatgggacagccggttaatgttcagccggcacaatttagcgcatttgcgggtggaaaccttggaaattaccagccggaaaatattgatctgattatggatgttccgcttcaggtgacagttgagcttggaaggacaacaaaatccatttcagatattctggatctgggaccgggaaaaattattgagttgaataaactggcaggcgagccgattgatgtgcttgtcaatggaaaatatgtcgcaaagggcgaagttgtcgtcattgaagaaagtttcggtgttcgaatcacggaaattgtcaatgcttcaagaacaggcggaaagtagaaacagacatgacaaatgtgttactgacaggttctctggaaagctttatacaacttttgggtgcactgtttatttttgctgttgttctggctgctacatatcttaccaccagatggatgggaggtatgcagcgtggacgccagaataataagaatctgcatgtgatagagacaatcagtgtcggcaataacaagatgatcagtattgtggaagtcggcagtgtctatctggttgtttctgttggaaaagaggaagtacatcttctggcacagcttacgagggatcaattaaaagatttctcttttgagctggaacagagtgggaaaaagcaggattcttttgcggaaattctcaaccagttaaaagacaagttaccaaagaagcaaggataaagatgagcaaagggaaaaagatatactgcattgcaagttttgcgtttgcgtgtgcggttttaatacttacaattacattatgcatgatgcatccgggacgtgtctatgcaagttccatggacccggacagtattacaaagattacacagaaagatacacagggagcagatcataatacagacaatgccaatggattgtcaattacatataacaatgattccggatcggtttccacaccgatcaagatgcttctggtgttgacaattctatcacttgcaccatcgattctgattatgatgacttcgtttacacgaattatcattgtacttcatttccttaggactgcgatcggaacgcagacgacaccacccaatcaggttttgatcggtctggcattgtttctgacattttttatcatgtggccaacgttccagcagatcaacaaagaggcaattcagccactcgataagggagaaatcacacagtcggaattttttgaaaaagcagaagggccgattcgtgaatttatgatcaaagatgcaaagatccagataagggatgtgaatctttttgcggagatttccggagaaacgtataaagatacaaaggaattgtcggatgttccgtttaccacactggttccggcattcattctgagcgagcttcggaaagcattcattatgggatttttgatttatattccgtttattgtaattgatatggtggtgtcatccgtactgatgtccatgggtatgatgatgcttcctccgacaaccatttcgttgccgtttaagattttgttgtttgttctggcggatggatgggatcttgtcataaaatccctcgtccagacattttattaggaggataccgtatgatttcacagggtgcagttcttgatattgcaagagatgcaatttataccattctgatcacgtcggcaccgctgcttctggtttctctggtggttggtctgattatcagtatttttcagacggttacatccattcaggagcagacacttacgtttgttccaaagattattgcggtatttgctgcaatgatcctttgcggctcctggatgttaaataacatgaccgaactggtggagcgtctgtggtcgaatttcagtacctatctgagtatgtgatttgataaaaagatatggttaattatgtatttacacttgaaaattttgaatattttctgctgattctggtaagagttacctgttttgtgtatgtggccccgttattggggcagcagggaattcccaatcagattaaaatcggattttcattttttgtctcattgcttttatacaatgtagtagatcggccggagctgacatacgcaagtgttgtcgggtatgcggtagttgtgatcaaagagggaattacgggactgctgattgggtatgcggcaagcatctgtaattccattgttttgtttgcaggaaatattatagatatggatattggtctgtccatgtctaccgaatttaatcaggacatgggaacagaaaccacactgacaggaaatctgtattattatctggttctgcttcttttgattacatctgatttttatacctatctggtacgtgcggttacggattctttttccgtaattccgattgcccaccagaaatttgcatgggatcatctgttatctgcaatcacacgctatatgggagattcattcatcatagggtttcggatttttcttccgttttttgcctgtattatggttttgaactgtgtacttggaattatggcacgtgtggcaccgcagatgaatatgttttcaatcggtatgcagctgaagattctggttggatttgttgttttgtatctgatcgtgttcctgttgccgaatgtggcaaattatatttttgatgaaataaagacgatggtgaagcttgttgcagaaggtttgtattgacgaaaaaaatcagaatcgaatattgcattataatctgcaatggtttgcaaaagacggcgaaggcggcgagaagacagaacctgcaaccgccaagaaattaaaagatgccagagatgaaggtaaggttgcaaaaagccgcgaactgaattcggcatttgatctgattgttttgtttctatgcctgaaaatttttgtttcctttgtgggaggaaaattcatagatattttttcttatatctatgaaaatatgccggattttgttaaaataaatgagggcggattgtccgtgcaggcggcagcaggcctgattgcctcagtcaccttgaaaagcctgatcattatgcttccgtttatggcgtttggatttgttgttacgcttctggtcagcattgtgcaggtaggatggaaagtttccacaaaacccatgaaaccggaactttccaagctgaatccattgaacggattcaaacgtatcttttcgaaagattcgctctttgaactggtgaaatccattttaaagattgtgattatcatatatatcgcgtatacttccataaaagataatgcaaatgatctgtttgcgttgtatgatctgggactgaatcaggcggttgcgcttgtggggactctgattatcaatacgggaataaaaatcagtattgtttatcttgtgattggtctggctgactttatctatcagaaacataagtttaatgaagatatgaagatgaccaagcaggaagtaaaagatgaatacaaaaatacagagggagatccgcagatcaaaggacggcagcgccgtaaaatgcaggaggtatcccagaagcgaatgatgcaggatgtgcccaaggcggatgtggtcatcacgaacccgacgcattttgccgtagcattgaaatacgaggcaaaagtcagttctgccccggttgtccttgcaaaaggagaagattaccttgcgcaaaagattaaggaagtggcgagggagaataaaattgaaattgttgaaaataagcctctggcacgtatgctctatcacaatgttgatgtgggagcagaaattccgccggagctttaccaggctgtggcagaagttcttgctgccgtatacaaggccaaaaatatacagtagtgcagttatacaacaaacaggtgcgaaaggaggttgtgcaggatgctgaagaaagcggatatcggtgtaggtttatatcttttggcggcagtagttttcttcattgttccaattccatccgtattgctggatgtgatgcttgcatttaacatttccatcgccttaattattgtatttaatgtattgtttgttcgggaagtactggatatgtctttcttcccgacattacttttgtttacgactatttttcgaatttctctgaacgtatcttccacccgtctgattcttctgacgggagatcctggtaacgttgttaagacattcggttcgttcgtcggcggaggaaatatggtggtcggttccattgtatttattgtcctcgtattgattcagtttattgttatcaataaaggttcggaacgtgtatccgaagtaaccgccagatttacactcgatgccatgcctggtaaacagatggcgattgatgcggacttaaataccggtgcgatcaccgatgcggaggcaaaggaacgacgggaaaagattcagagagaatctagtttcttcggcgcgatggatggtgccacaaagtatgtaaagggagatgctacggcaggtctgatcatcacctttattaacctgatcggcggaaccattatgggagttatgaatcagggacttggatttgcagatgccattcagcagtatggtctgctgaccatcggtgatggtctggtgtcccagattccgtctcttctgatttctcttgcaaccggtatacttgtcaccaagggatcaaacgaggcagacttttccggaattctggtcaagcagctttttggaattccgagggtactttatattgtaggttccgtgctggttttcctcggaatttttactccgttaaatccggttttatttattgcacttggtctggtgtttatcatcgccggcaaaaatatcagcaagaatatcggcgaagaaaatattgaggaagaagtacagcaggcggagacggaggcggaagagatccggaaaccggagaatgtggtttccctgcttcaggtcgatccgatcgaactcgaattcggatatggtattattccgctggcagatgtaaaccagggtggagatcttctggatcgtgtggtaatgatccggcggcagattgcactggaacttggtacggttgttccgattatccgcctgagggataatatccagttaaatccgaaccagtatattatcaagatcaaaggcgtgcaggtaacggaaggagaaattctttttgatcattatatggcgatgaatccggggtatgtggaggaagaaattacaggtattcctacatttgaaccgtctttccatcttccggccatctggattacggaagcgcagagagaacgtgcagagagtcttggatacaccgtagttgatgcaccgtctatcattgcgacgcatttgacagaagtaatccgaagccacatcgcagagcttctgaccagacaggatgtacagaacctggtcaacaacttaaaagaatccaatccggttcttgtggacgagctcacgccgaaacttcttggccttggagagattcagaaagtactgcagaatcttttgcgggaaggcatttcgatccgggatcttttgtctatttttgaatcgctggcagatcatgcacagacatccagagatacggatgtgctgacggaatatgtaaggcagagtctgaagcgtgcaatttcgagcaaatatttcccgtcgaacgaaacgaccagtgtcattacgctcgatccgaaagtggaacaggagatcatgtcttcggtcaagcagacagagcagggtgcatatctgacgatggacccggagaaaacaaaagcaattatggattccgtgcggacagaaaccgagaaactcgaaagcctcggaaagaatccgatcattattacatcgccaattgtgcgtatgtattttaaaaaactcacagaagattatttcaaagatctgattgttgtctcttacaatgaagtagaatctgatgtggagctgcaatcggtagggatggtgacagcataaatgacaattaataaatttcagggaaaaacacaggaagaagccattgcaaaggcaaaagaagaatttggagaacgcgcggtcattatgaacatccgtgaggtaaaaccgaaggggctgtttcgtgcgtttaagaattcaacatttgaagtgactgcggcaatggaggaaaaagaacatttttccaatgccatgcaggcagcacagatgacacagagtatggcaaaagaaggaaaactgcacgacatgatcaatcttgcggcggatgaaccgattaccattccgaaactgcaggaacaggaaggtaacgcacaggcagccagacaggagccagcacgtatgccacaatcacagaatctggtacaggaaaatgaagagaaaaaattagaagaaagacttgaggttttatctgaccgtctggaaaaatctcttggcgggaaaaatccgaaggagccggagacaccaaaggggccgtcttcggaagaactcaattttgtccggattctctacagcacgctgttgaaaaacgaggtgagtgaacagtatgtcaatcagatccttggcgaaattgaaaaatttatccgcccgggacacagtgtggatacgattctttccaatgtttaccagaagctgattttgcgtttcggtcagccaaaatcactggatttaagtggggcaaaaccgcatgttgtattttttatcggacctaccggtgttggcaaaaccacaacaatcgctaaaattgcgtccaaatataaggtggattatgaaaaaaaagtagcgtttattactgcagatacctaccggatcgcagcaacagaacagctacaggtgtatgcaaatattcttgacgcacctatgtctatcgtgtattctaaagaggaactgaatgaagcaattggaaaatatgcggaatacgatcttgttttcgttgatactgctggattttcccataaaaatgaggaacagaaagaggatatcagaaacctgattcagggagttgaccctgaatatacaagtgaagtatatttagttctcagcgctacaacgaaatacagagatttgcttgatattgtagatacctatcacacaatatctgagtttaaactgatttttacaaaactggatgagacatcaacgtatggaaatttgctcaatattaagctgtattcagatgcggaactgtcttatacgacaaatggacagaatgtaccggatgatattgaattatttgatacacaaaagatcgtgaaacaattattagggggcaattcgtaatggatcaggcagaacaattgcgaaatgtaataaaactgcacaatcagaataatcagaataatgcacgggtggtgacgattaccagcggaaaaggcggggtcgggaagtcgaatcttgcagtaaatcttgcggtatgtctcagaaaagcaggcaagagggtgattatttttgatgctgattttggtctcgcaaacgttgaggtaatgtttggtgcaatcccacagtataatttgtctgattttatataccgtggaaagtcaattcgtgaaataatcacacctggacccatggatatcgggtttatatccggtggctcaggaattatcggattgaacaatcttacaaaagaacagattttatatatcgtaaattcgattgacacattgaatgaactggcagattttatcctgattgatacgggggcaggaatctcggatcaggttttggaatttgtcatggcaagtccggaggtattactggtatccacaccggaaccaagttccctgacggatgcgtattcgcttttaaaagcattgtaccgcaatcccgattttgtggaggaagagacaaccatccacatagtaaccaaccgggtaaattcccgggacgagggacaggcaatttatgagaaagtgaattccgtagtgtctaagtttttacatggaagtctgaattatctggggatgattccacaggatgctgctttggaacgggcggtaaggcagcaaaagacagttaccatgagtgatccgaatgcaaaatccgcaaaggcaatttccagcctcacagatcatctgttaaacggcacccggcagaagacaccggtacggtggggaatagcacagatgttttccagttttttatcaaaccgaaaatagggagatgaataattatgaaactttcagatgtgattactccgggagacaaaattgatattaaaatgctgcatgaagcgaaccaggaagataatggaggagagatcgcgaaaatctatcaaagtgcggtcagcgacattttttcggatcaggaattggaaatttctatgccgacaagtggtggaagaatggtgttatttcaactggagagggagtgcagcattgttttttatacaaaaggcggtatgtataactgcacagcagttgtgaagaaacgttatcgcaaagaaaatctgtatctgctcagaattgtgattacttccggattacagaaatttcagcgccgggaatttttccggattccttatacgacaccgttaaaatattacgaaatatcggaacagacggcacagatgcagacaacggaagaattgtttacggaaattcaaaagccggaatatattgatcaggtacgtgagggaacgattcagaatatcagtggcggtggaatccgctttgtctctggacaatggataaaacagaaccaaaatattcttctggtgatcagactgacaaatgaatattcggatgaaactttttatcttccgggacaggtgattgcaacagaaaaacatccagcgatagaggaaatgtacattcaccgggtaaaatttctgttccgggatctccgggaccgggaaaaaattgtacgcttcgtttttgaggaagagagaagaattcgcaggaaagaagttgggtgactcatatgaaaaaaaacattttagtagttgatgattctgcactcatgagaagggtcatgtgtgatataatcaattcagacagtaaatttcaggcaacggactattgcagagatggtcttgaggcatatgagaaactgaagcataccagctatgacggtgtggttctggatgtgaatatgccacgcatggatggactgcagttactcgaaaagttacaaaaagaaggcatacgtgcaaatgtggttatggtaagtacacttaccgacagcagggaagcagatgttaccattttagccatggagcgcggagcaattgattttgtggcgaaaccgacaaacatcatagaggcaaaaggagaggcattcaaaagacagcttcttggcgtattgaatgctgttcttgcaacacaaaaggcagcagaaagtgtccgtccggcagtaaaaccggctgcaaaagcaccgatgatgcgcaaagcgacaggcggaaagaacaaactggttgcactggcttgttccacaggcggaccgaaagcgttacagagtgtgattccgtttcttccgaaagaactggatgccccggttgtacttgtacagcatatgccgccgggatttaccaaatccatggctgacagacttgatgatctgagcaaaatcagggtgaaggaagcagaacatggagagcggctgcaaaagggatgtgtttatattgctccgggcggaaaacatttgaaagttgcaaaaaccgcagacggaaacaacagcattgtactcgatgatgcaacaccggcaatcggaggactgaagccgtgtgcaaatcttatgtatgattcactgacgggaagcagctatgatgaaatcgtatgtgttgtcctgacaggaatgggagcggatggaaccaatggaattctttcgctgggaagatcaaaaccgattcgcgtaattgcacaaaacgaagaaacctgtgtggtatacggaatgccaaaggcaatctatgaagcaggtgtggtagatgaagttgtaccactggatgaagttgcacagacaatcacaaaaaacgtgggggtaaaataacatggatgtaagccaataccttgaaatctttatcgatgaaagtgcagaacatttacagacgttaagtgactgcatcatggaactggaaaaagaaccggataacaaggacgttatcaatgaaatcttccgtgcagcccattctttaaaaggaatggccggtacaatgggatttaagagaatgcagcacctgacacatgatatggaaaatgtgttccaggaagtccgcagcgagaaaatccaggtagacagtcagatgattgatctgctgttcaagtgtctggatgcaattgacggatatcttgaaaatattaaggcaacctctgatgagggtgaggaagacaatgaagtcattatcaaggaactgaacaatttcctcgcaaaagcaaacggagaggctgctgccgcagaggcagcacctgcagaaacagaaaaagaagcagcggcgccgacagacaatggagaccacaaactgtatcttcagattgatctgacggatcaggagcgggatgccgttatgactgcaaaagacagtggaatgcatatttacggcatgacggttatgatccagaaagagtgccttttaaaagcggccagagcttttttggtattccgcgaagtggaggcttttggagagattcttgtatatcgtccgagctctcaggatattgaagatgaaaagtttgaacaggaattcagcttttatgtcgcatcaccggaaagctttgacaagatccagaacgctgcaaagaatgtttccgagattgaagatgccgttggagaagaactgactgatttttcaccacgcgtaacagaaactgagacggaagaaaagaaagaagaaaaaccggcagagacaaaaacggaagtacaggctgaaccaaagaaagcaccggaaaagaaaaaggctccggcaaagaaaaacggtgtaggaaaaccggcgacaagccgtacggtccgtgtggatattgaaaagctggatgctcttatgaaccaggtatccgagcttatcattgcaaagaacagtctggtatccatcagttcaacggaagagggaggctttaccaatcagggattccatgaacagattgaatatctggagcgaatcactacaagccttcatgaatctgttatgaaagtccggatggtgccaattgagagcgttgtaaataaattcccacgtatgattcgtgacctgtcccgtacattgaataagaagatggaactggttatgaccggtgaagataccgagctggatcgtaccgtagtggatcagatcggtgatccgttacagcatttgcttcgtaattctgcggatcatggtctggaagacaccgagcttcgtatccagagaggaaagccggaagttggaaatattttcctgaatgcatatcaggaaggaaataacgttattatccaggtgggtgatgacggtaacggaattgataccgaagcggtaaaagcaaaggcaatcgagcgaaatattattacaccggaacaggccgaagtcatgacacagaaagagatcataaatctcctgtttatgccaagtttttccatggcaaagaagattacggatatttccggaagaggcgttggtcttgacgttgtaaaatctaacattgagcagcttggcggtgatgtggaagttaagacaaaacttggggaaggaacaacatttaccgttcgtcttcctctgacacttgccattattcaggcattgatggttgaagtccgcgatgaaaaatatgccattgcccttgggtccattgcaaatattgagagtgtaccggtcagcagcatcaagtatgtggaagcaaaagaggttattcatctgcgtggaagcgttattccgcttgttcgtctggacaaacttctggatattgaaccaagagaagaagaaccggaaagccttaccgttgttattgtaaagaaaggcgacagtcaggtaggacttgttgttgacgatctgatgggacagcaggagatcgttattaagtctttaggcaagtatatcaatggaaataagctgatcagcggtgcaacaatcctcggtgatggtgaagttgcgttgattctggatgcaaacacactgatgtaatgggggtgaatgacgatggctattgcaaacaatcagattgaaacaaatgagaataaaaataaagaaaaagaagtaaagcagtatatcgtagttcagatcggttctgaaaagtacggaattgatatcagctatgtcgataatattgtgcgtatgcagaaaattacccgtgtgccaaaggcacaggagtatttcaagggaatcatcaatcttcgaggcgaaattgtgccggttatgagtatccgtctgaaaatgggacttgaggatgatacctttacttcggcatcccggatcattattttaaagatcgaagataaagggtctttaggtgtgattgtagatgaggtttgtgaggttgtaaatctttctgaggatcagatcgaaaataacaatatcaattcaaaccatgtaaaagatacttttatcaatggtattggaacaagtggagatcagctgatttccctgtttgaaatcaatgcgattgtagacgaaaaagataacacataagacaactgagtatagtgaggttatgcctcactatacatggttattggaggaaaaagatgaacgattttacattggataatgtaaatgaaatgtatattgacgtactgcgcgaaattggaaatatcggagcgggaaatgcaacaacttctctggcaagcatgatcaatgaacagattgatatgaatgttccgaaagtagaattgatggaagcttctaagctgagttccgcaatttgtccggaagacgagattattgtcggaatttttctggaagtaacacatgatattacaggcagcatgatgtttttaatgcgcatggattccgcccattatcttgtgaacaaactgatgggaagagacccggaaaacgatgcaccttttgatgagatggatttatctgccatgaaggaaatcggaaatattattacggcttcgtatctgtctgcactttcaagtatgacaaatcttacgattttaccatccgttccatatattgcggtggatatggcgggagcgattcttagtgttccggcaattcagtttggacagtacggaaataatgcgctgctgattgaaacagaatttggcgatgaacgtatgattaatggatattttatcctgatgcctgaggaagagtcctatgcaaagattttatcctctcttggaattcagctatagaggagatcgtagaatatgggagaagtgatcaaggttggaatggcagacctgaaaaccgcaaaagctccgaatacactcacgacactggggttgggctcttgtatcggattaacactttatgatccggtgacgaaaatcggtggattggtacattatatgctgccagacagcacaaaattaaaaaataataccaatattgcaaaattcggggataccggaatccgtgaacttttaagacaggttctggctttgggagcaaatcagagaagacttgtggcaaagatcgcggggggcgcatgcatgtttgaaatgagcggactttcgtctgtgggaaatgtaggcgcacgcaatgcggaagaagcaaaaattattttgaaagaattaaggatcccgctgatcgcggaggataccggtttaaattacggacgtacggtagaactggattgtgagaccggagatttcagaattaaatcggtgggaaaagaaattaaagtaatatagaggggcagaagatgaaaaccaatggtgtaccggctattattatgttggcggcagggtttattgactgtgtgattgcaattcttacgcacatgtcactttggaattttacaagacagctgttactggtacttgtcctgttttatgtgatcggttgtgtggtaaaaatgatcattgaccgaaacttcaaggatatggaagatgaccagaacggggaagaaacggaagagtctaaagaggagcaggaagcggaaagctctgaggaacaggaaaatactgaacaggccatagatgcacaggagcagtcgcaggagcagccggaggttcaggaggaacaacaaacaaagtaattaaccggggcggaatgatgtagatgaaaactgcggataaagaaaaactctgggatgcgtatcgtcagaagaaaacgcaggagaccagagaacagctgataattgaatatgcgcagcttgtaaaactcgtagcgggaagactcagcatgtatcttggacacaatgtggaatatgatgatttggtcagttatgggattttcggactgattgacgcaattgataaatttgatctggaaaaaaatgtaaaatttgaaacatatgcgagtttgcggattcgtggtgctattttagaccagattcgtaaaatggactggattccaagaagtgtccggcagcgacagcgcaaaattgatgaagcgatgaaacagatcgagatgaggaccggtaaaacagcttcggatgaagaacttgcaaagcagctggggctgacggatgaggaactgtgcagctggcagacacagcttaaggtgaccaatgttgtgtctttgaatgaatttgaagaaaacggtccggagccaatgattgattcggcgcatccggtccggttttcacagccggaagaagtggtagaggaagcagaattaaaagaaaaactggcggaatccctggaacttctgacggagaaagagcggcgcgttattgaactttattattatgaagatatgaccctaaaagaaatcagtaaaatattggaagtgtcagaatcacgtatttcccagttacataccaaagcattaaacaagatgcgtaaaaaaatgggtgtttatatgaatattctgacggagtaggagcggatctatggcaattgcaccaatcaattatgctacgatacagcgtaccgcagacatcgagacatttaaaaaccagcaggatacaaaaccgatggtggatcagcagaatattcaggtgcaggtggatcacagggaggatgttctgcatcatcaggtcatccatccggaagaaaatgagcagctggataatcacacagatgccagggaagaaggaaaaaacaaatataaaaaacagggatctgtgagaaaaaaaacaaacaaagaaacgaagcggacgggtggcaatccggttggcggcagttttgatatgaaaatctgagggaaaatatatgacgggtgtggaaattacactgattctggttggaatcatttttgttctcgtaagcttttttgttcaggaaaaacttaccccgaaagatgtacaggagataaccagattaagtgagaaggaattaaagattattgtcgagcgggaactgaaaaatgcaaatgacaaggtagaagatgcaatcgatgcagtggtagaacagtcccaggagaatgccaagcgtctgatggaaaaagaaacgaatgagaaaattatggcaatcaacgaatattccaatacggtgattgaatcaatgaataaaacgcataatgaaattctctttttatataatatgctcaatgacaagcatacggaactgaccgggcttgcatcgcagctacaacagttttcggagcaggtaaaacatacacaggatgaaatgatgacacatctgacggaaacggtaaaagagcctgaaccggcaagaacggaagtgtcagagcctgtggaggaacagccgcagcagatttcaccaaaagcatctgtggcagaggaaaccgataacggaagcttcaacgatcaggtacttgcacttcatcaaaacggagtgtctgatgtggaaattgcccgtaagctgggacgggggcttggagaagtgaagctggtgatcggattatacaaaggggaagatgtcagtgagatttaaatattatttacgtggctgcggacttggaattctggttgcctcgctggtatttattgtatcgttacatgcacacggcggagcaatgtcggatgaaaaagctatgcagagagcttcggaacttggaatgatcatgccggatgacacacagacgcaggaagcagaaacgcagacaacagaacttccggtaaaggaaacgaatcttccggatacacaaagaacgacacaggcagtgacacagaaggttccgcagaacgatacacaaaaacagacggagcgtgatacttcttcggaacagaatgacacaccaaaagagtcggagaaaaaggcggaagaaaagaaaaaaacacaggactctcaaaagaaagaagaagagaagaaaaaagcgcaggagaccgagaaggaagaaacaaaaaaggaaaaagtctccattacaataaaaggcggagaagtgtgcagggagattgcacaggatctgcaggagaaaggacttgtcagggatgcggaagatttccgcaaatatatgcaggatcacaattatgcaagatatatccgtgtggggacatttacgctggaaaagggaatgaactatagcgagattgcgaaagtactgacaaaaaaatagtataataaagcttgcatgaaagcctttggtatgatataatgccaaaggctttaaattttattaaacacatgtatggaagctgccggtgccggatctacgcttttccggtggcagactaataggaagtacatggaagaaatcaaccaaacggaggtaattaaaatgagcgtaatttctatgaaacagttacttgaggcaggtgttcatttcggacatcagacaagaagatggaaccctaaaatggctccatacatctacacagagcgtaacggtatctacatcattgacttacagaagtctgttggcaaggtagatgaggcatatgatgcaatttccgatatcgctgctcagggaggtaccattcttttcgttggtacaaagaagcaggcacaggatgctattaagactgaggcagagcgttgcggaatgtactatgtaaatgagagatggttaggtggaatgcttacaaacttcagaaccatccagagccgtattgcacgtctgaaagaaatcgagaccatgtctgaagatggaacatttgatgttctgccaaagaaggaagttattgcactgaaaaaagagtgggataagttagagaagaaccttggcggaatcaaggatatgaagagaattcctgacgctatctttatcgtagatcctaagaaggagagaatctgcgtacaggaagcacagtctttaggaatcacactgatcggtatcgctgatacaaactgtgatccggacgagttagattatgtaatcccaggtaatgatgatgcaatcagagccgttaagcttatcgtttccaagatggcagatgctgttatcgaggcaaagcagggaactgaggaagttgctgcagaagctgctgaggagacagtagaagaataatttttgcataatcattcgagaattggaggaaaaaaagatggcaattactgctgctatggttaaggaactgcgtgagatgacaggcgcaggcatgatggattgtaagaaagctctgacagagacaaacggagatatggatgccgctgttgacgttttgaaaaaaagcggtgcagccaagatggaaaagaagcagagcagaatcgctgcggaaggtatcgcaagagttgcagtaaacggaaatgttgctgttgtagctgaggttaactcagagacagatttcgttgctaaaaatgaaacattccaggagtttgttcagacagttgcagatacagcacttgcttctgatttaaacggtggagcaaacggcgaagatatcgaggcacttcttgcaacaaacggactcagtgatctgcttgttgagaagacagcaacaatcggagagaagttatctgtgcgcagattcgcaaaggtaaccggtgatgctgttgcttcttatattcacggtggcggaagaatcggtgttgttatcgctgcagacggtgcatctgatgatgctgcaaaagaggctcttacaaacattgctatgcaggttgctgcaatgaacccacagtatatcagcagaaacgatatttccgctgaggaacttgcaaagatcaaagagatcacaattgacagtgcattaaatgatgcaacaactcttccaaagcctatcttaaacaaattactggacaaggcaatcggcgagaaggtatggagtgatgaggatatcaataacttcgaagagcataagagcaatatgaattatgtctggaatttcctttccgatgctgcaaaggttcagctgggtgagctggctatggcagataaggcatctatcactgctgagaagatgttcggcggtcttgtagaaggtcgtgtatccaagcagttaaaggagatctgccttcttgatcagacatacgttaaggcggaagatggcaagcagtccgtagctaagtatcttgagtctgtttccaaggatcttaaaatcaccaagatgattcgtttcgaagttggcgagggtatggaaaagaaacaggaagatttcgcagcagaagttgctgcacagatgaacgcataatccgttcacagagtcaagctgtgtgaaaacacaaaaggagtcgtggttttggaaaaataaagaaaccgtggctccttttttataacaattttacaacaacagggaattaaatctttacaagttttcaaaatatgttaaaatagaaaaggatatttcccggtggaggaacaggatgagtacaaaagattcagaagctctggagcagcagcgccagaggagaaatcgcatcaaccgtatgaagacgggaatcattgtgacgattacggtatggatgcttgtctcactgttggcaattatccttctgacggtgcaggtagcacgtttgagcagccatgtaaagagactggagaaagcgggacagacaaccgtttcgcaaaatattccggattctgaaaatgtgcaggctgcggatacagaaagcagtgggcaggagacacagaaatctgcttacgataaagttgtgacggggattgattccggggacaatatggcaaaagcgggagatgcacataaagtatatcttacttttgacggcggaccggatgaaaatacggacaagattctcgacgtattggataaatacggagtaaaagcaacttttttcgtagtaggggatgattccaaggatatgcaggaggtctataagaggattgtaaaagacggacatacacttggaatgcattccttttccaacaaatacagtacaatatatgcctccacagaggcatttgaacaggattttgataagatttcctcatatctgaaagacgttacgggagttaatagtctctattatcgttttccgggaggaagcagcaatgagatcagcaatgtaaatatggctgaattcgttcgtatcttaaatgaaaagggaattacatactttgactggaacgtttccgcaggagatacttcatcggattatacggtggatgatgttgtgacaaatgtgacagaaggagtaaaaagatacaaaacctcggttgtgttattacacgacggagatgacaagtcaacaacggtagaggctctggaatctttgattcagaaactgcaacagatgaaagctgagattctgccgattgatgaaaatacaaaagtcattcaatatatcaaggcagatagtgttgaataagtagtatgagtggaggaagcacgatgggattatttaaagattttaaggatgatttttctcaggcggtcaatgaaatgatgccgggagcagacgctccggaaaaagaaaacaaagcagaagatctggtagttaacactctgggagaagatgtggatgtaaaatccgaattatccaaactggatggtttactggagcaggtacagaaggacggcgggtctgatacacaaaagttagagtcggagcttccaccaattcacaaagaggataaaaaaccggtgatcacaccagctgtggacccggtaatcaatacatttaatgaggagaaaaaaattatgagcgacacaacaatggaaaccccaaagccaacagcaccagtgatgaataacaaagtgaatccggatgcagtttcagatgagacatctgttataaccgcaggaactgttctgaccggtgatatcgcgtctgacggatcatttgatattcagggaaccatcaacggaaatgtaacctgtaatggtaagctggttgtaaccggaaccattaacggaaacagtgcagcttcagagttttttgctgatgtggcaaaagttgagggagaagttgtaagttccggtacagttaagattggagccggttctgtgatcattggcaatattgcagcagcttctgcagttattgcaggtgcaatcaagggtgatatcgatgtacagggacctgttgttgttgatacatctgcggtagtcatgggaaatatcaaatcccgttccgtacagattaataacggtgcagtaatcgaaggtttctgctctcagtgttatgctgatattgatgtacagggactttttgacggaaagtaaaattaatcataggagacagatacgatgaaacgtattttattaaaactcagtggagaggcactggccggggacaagcgtcatggatttgatgagccgacagttacggttgttgcaaagcaggtaaagcaattggtagatgcaggtgtacaggttggtattgtcatcggaggaggcaacttctggagaggacgtaccagtgagacgatcgaccgtacaaaagccgatcagatcggtatgcttgctacggttatgaactgtatttatgtgtcagaaattttccgttccgttggaatgatgacttccgtgcttaccccgtttgagtgcggatctatcacaaagttatattccaaggatcgtgcaaataaatattttgcacataacatggttgtattttttgcaggtggtaccggacatccatatttctcaacagatacggcaacggtacttcgtgcggtagagattgaagcagatggaatttatcttgccaaggcaatcgatggtgtatatgacagcgatccgaaagtaaatccatccgctaagaaatatgatcaggtttccattcaggaagtcattgataaaaaacttgcggtcgttgatttgacagcatccgtaatgtgcatggaaaaccacattccaatgtatgtattcggacttggtgaaacgaacagcattgtaaacgcggtaaacggccagttcaacggaactgtcgttactgtggactaggaggatatagtatatggacgagagattacagatttttcaggataaaatggagaaatcccttgccaatttaaatgaggagttcgcgggaatccgtgcaggacgtgcgaatccgcatgtgttggacaaacttcgtgttgattattacggaacaccgtctccgattcagagcgttgcaaatgtcagtgttccggagccgagaatgattcagattcagccatgggaagcatctatggtaaaagaaattgaaaaagccattctcagttcggatctgggaattaacccgacgaatgacggaaaactgattcgtctggtatttccggaactgaccgaagagcgaagaaaagagctggcaaaagatattaagaaaaaaggtgagggtgccaaggtcgctgtgagaaatatccgcagagatgcgatggatcatttcaaaaaagtaggcaaggcggaggatatttccgaggacgagatcaaggatctcgaagacggaatccagaaactgaccgatcagtatgttgcacagattgacaaggctgtggatgccaagtcggatgaaattcttacagtataagatgtttaagggacataagcctgtggctatgtccctttttcacttgcaggaaagaggggaacaagattgatgaaaattccaaaacatgtggcgattatactcgatgggaatggaagatgggcaaaaagcaagggtatgccacgcaattatggacataccgttggcgcaaagaatgtagaaacggtttgtcaggctgcagatgagcttggaattgagtacctgacactgtatgcattttccacggaaaactggaatcgtccggacagcgaagtggctgcactgatgaaactgctggagagttatttgaaaaactgtatccgcacggcaaataaaaataatatgcgggtacgtgtgattggggaactttccagattatccgaaagttttcagaaaaagattcaggaactggaagaagtttccgcggcaaatacgggactgaatctgaccattgccatcaattatggaagccgggatgagatgcttcgggccatgaagcatatgtttactgatataaagaatggcagaatcgcggaggaggaaatcaatgagaaaatcttttccggatatctggatacaagggaacttccagacccggatttactgattcgtacaagtggagagcagcggctttccaattatctgctgtggcagcttgcgtatagcgaattttattttacggatgttccgtggccggattttcataaaaaagaattggaattagctgtggaagcgtataataaacgagacagacgctttggcggacttaaggaggaagaataggatgtttaaaacgagactgttaagcggaatcgtgctggtaattctggctctgtttttgattatttcaggccatgaaattttattatttgcaacacttgccatttcctgtatcggaatgtttgaattatatcgcgtgttcaagatggaaaagaccgttctggcaggcgttggatatctggcggcaatcgtttattactgtaatttacagtggaagtttctgccggatcttatgattttatttatggcatttttgattctgttaatgtttgtatttgtatttgcatatccgaaatttcatgcagatcaggtgatggcagcattttttggattcttctatgtagcggtcatgctttcttatgtatatcagatccgtacgctggagagagggttatatcttgcctttcttgtatttttatgttcgtggggatgcgatacctgtgcatattgcgtcggaatgctgatcggaaagcacaagatgtcgccgaaactcagtccgaaaaaatcggtagagggtgcagtaggaggtgtggcaggtgctgcgcttctgaccgctttatattgttttattttccgtagcccgatgcatctggaacgtggagaaattgtaattcttgctgtgattgcggcaattgccggactgatttccatggtaggggatctgacagcttctgccatcaaaagaaattatgatatcaaggattacggaaagttgattccaggtcatggaggaattctcgaccggtttgacagcatgattattactgcaccaatcatttatttcctggcgcttcatatgctgtaagaggtgaacgatgaaaaagatagcaattttgggatcgacagggtccattggaacacagacactttctgtgattgaagaacatgcagatgattttgaagtgaccgcacttgcctgtggaaacaatatccgtctgctggaagaacaaatgcggaaatttcgcccaaagcttgttgctgtgtggagcaaagaggcagcagcttcccttcgggtccgcacggcggatctgggcattcctgtggaaaccggaatggatggattacttgcggttgcaacttatgaagagtcggaaattctggtgacggcgattgtcgggatgctcggaatccggccgaccattgcagccataaaggcaaagaaaacgattgccctggcaaacaaagaaacgttagttacggcaggacatctgattattccgcttgcagcggagtatggagtgtccattcttccggtagacagtgaacatagtgccatttttcagtctttgcagggaaacgaagaaaattcgatcagtaaaatccttcttaccgcatccggaggaccgttccggggcagaaagaagcaggatctgctccatatacaggtggaagatgcattaaagcatccgaactggtccatgggacacaaggtgaccattgattcttcgacacttgtgaacaaagggcttgaggttatggaagcaaaatggctgtttggcgtacaactcgaacggattgaagttgtcgtgcatccgcagagtgtcattcattctgctgtggaatatgaggatggtgcagtgattgcgcagcttggaacgccggatatgcgtctgccgattcagtatgcactgtattacccaaagcggaaacatttatccgggaagcgtctggatctttttgctcttcgtgaccttacgtttgagcgcccggatacggataccttccgtgggctttccctggcatatgatgctgccagacggggaggaaatatcccaacggtttttaatgccgcaaatgaaaaggcagtggcaatgtttctggacagaaaaatcgcttatccggaaattacggaaatgattgaagctgcaatggaagaagtcagctatatcgcacatccggatttagagcagatcttagagacagagcaggcaacatatgaatatatagggggcaggtggtaaaaaaaatgaaaattgtatcatttcttatcgcatttgtaatatttagtattgtaattttatttcatgaactggggcattttttgcttgcaaaggcaaacggaatccgggtaaatgaattttgtttcggccttggaccgactatctgtgggatacaaaaaggcgaaaccaaatactgcattaaggcatttccgtttggaggagcctgcatgatggaaggggaagacgaagattcgacggacaatcgtgcatttggtaaaaagccggtatggggacgtatgagcgtcgtatttgcaggacctttttttaactttattcttgcatttattttcgcgtttatcctgatgagctgtgtgggatatgataagccggttctttccggggtaatggaaggatatgccgcagaaaaggcaggtcttcaggaaggggatgagattatccggatgaatcatttttcggttcatttcagcagagaaatcactgcatacggaacatttcattccggggaaaccattaaagtcacttatgcaagggatgggcagaaacatacgacaacactggttccgaaactggataaagagaccggaagatatctgtacggatttcagaccatgggaaatgtccgggtaaagggaaacgtgctcacaaacttaaaaaacagtttttatgaggtgcgatactggatttataccactatccagagtctgaaaatgcttgtgacacgtcaggtatctccaaacgaactgagcggaccggtcggtatcgtaaaatcaatcggagacacctatcagcagtctgtaaaaaatgacgggtattactatgcacttttgaatatgctcaactggacgattcttttatctgcgaatctgggcgttatgaatctgctgccgcttccggcactggacggaggccggctgttatttctgattattgaggcgatccgcagaaagcggattgatccagacaaagaaggcatggtaaatctggttggtattgtattgttgtttggactgatgtttattgttatgttcaatgacattcgaaaactatttatctaagaggctagaggcgttatgatggagagacatatcacaaaggaagtacagattggaaacagatggattggaggaaatcatccgattgcgattcagtctatgacaaatacaaagacagaggatgttgcggcaacggtggcacagattaagcagctgacaaaagccggttgtgaaattatccgctgcgcggttcccacccaggaggcagctgcggcgctgacggaaatcaaaaaacagattaccatcccgctggttgcggatatccattttgattaccggcttgcgattgcagccatggagcacggtgcggataaaattcgtatcaatcccggaaacattggaagtcgtgagcgtgtaaaagcggttgtggatgtggcaaaagagcgccggattcctatccgtgtgggcgtcaacagcggatctttagagaagggtctcgtggaaaaataccatggtgtgaccgcagagggaattgtggagagcgcaatggataaagtgaaactgatcgaagatatgggctatgataatcttgtgatcagtatcaaatcctcggatgtcatgatgtgtgtcaaagcacatgagctgatcgcaaaacagacggatcatccgctgcatgtgggaatcacagaggcgggaacactgatcagcgggaatatcaaatccgcaatcggtctgggactgattttaaaccagggaatcggggataccatccgtgtttctctgaccggggacccgttggaagagattaaatccgcaaaactgattcttcgtaccctcggacttcgcaaagggggcgtggaagtggtttcctgtccgacctgcggaagaacccgcattgatctgatagggcttgccaatcaggtagaaacgatggtttcggaatttccgcttgatatcaaagtggcggtaatgggatgtgtggtaaacggaccgggagaggcaaaggaagccgatatcgggattgccggaggtgtcggcgagggtctgattatcaaacatggagaaatttacaaaaaagtaccggaagcagaacttctgccggcactgcgttatgaattggaacattggagtgaagactgatgtcaaaagcatttcgtgaagcctttccgacactgaaactggaggaagaactcgaagggctgttagatacaactgaagtgacaaaaataagtgcgaatcatgaacatactcatattcgcatttatttgcgtgcaaaaagacttattttcaaaaaaaacatatggaaacttgaaaaagcgattaccgaacagatttttcagaaccgggccatacaggtaaagatcatagagtcttatgagctttccgaacagtataccccgaagtctctgatagaggtgtataaggacagtattttagatgaactgaatgcctacagtgtgctcgaatacaatctgttgcggacggcggacatggaatttccggaagaggaccgtctgattctgacgatggatgagactattattgccaaaacccgtacggatgagattatcgaatttttagagaaagtgatctgtgagcgctgtggaatgaatctgaaaatatttccacaataccggaaaccgcaggagagcaaataccggaaaaattccgaagaacagatccggcaggaagtggcaggaattgttgcgcggacgaagctggttatggaaggaaaatcccaggaaacggaagaaaaagagaaaactgtcgaaacagaagaaaaaacaaagacaattgcaaaaacggcaggaaatcgtgcagacacttcaaaaaatggtacaaattatgcaaaaccaaagcagaagtttgaaaagcggggagagttccgccggaaattcgagtcggataacggcaaaaaatccatgaatccggatgtaatatacggaagagacttcgaagaagagagcatggagattgagaagattgacggaccgatcggagaggttgtgatccgcggaaagattctgtcggtagatacccgtgagatccgcaatgaaaagaccatcattattttttccgtgactgattttaccgatacgattgttcttaaaatttttgcgagaaatgatgatgtaccggagctgttaaaagaaatcagcgggggaaagtttgtgcgtgtcaaaggtgttgcaaccattgataaattcgacagtgaacttaccatcggttctatcgtcggaatcaagaaatgcgccgattttacaacggtccgtatggataccagcgtagaaaaacgcatagagctgcactgccataccaaaatgagtgatatggatggtgtttcagatgtcaaagatattgtcaagcgtgccatgaaatgggggcataaggcgattgccattaccgatcacggggatgtgcaggcgttcccggatgccaatcataccgtaccgtccgattcggattttaaagtcatttacggcgtggaggcatatctggtcgatgatttaaaggggatggtgacggacagccagaaccaggatctggatgcagattatgtggtattcgatttggagacaaccggatttagtccggagaccaaccgcattatagagatcggggcggtgaaggtgcagaacggaaagatcgtggacaaattctcaacgtttgtcaatccacaagtgccgattccgtttcggattgagcagctgacgtcgatcaatgattccatggtgattgatgcacctgtcattgcagacattcttccggaatttatgaaattctgcgagggatgtgttatggttgcccataatgccgatttcgatatgagttttatcaagaaaaactgccaaaggctggatattccatgcaagccgacgattgtggatacggttgccctggcgcgtgtcctgcttccgaatctgaaccgttttaagctggatacggttgcaaaagcgctgggcgtatccctggaaaatcaccatcgtgcagtggatgatgccggatgtacggcagagatttttgtgaagtttattgagatgctccgggagcgcggtatgtctaccctggacgaagtgaatgcaatgggaacctcatcggtgcagaatgtacaaaagatgccgacttatcatgcgatcattcttgccacctgcgatcaggggcggacaaacctgtataagctgatttcgctggcgcatatcaaatattatcaccggcgtccgaggattccgaagagtgaatttatcaggtaccgggatggacttctgatcgggtctgcctgcgaagcgggagagttgtaccgggcaattttaaatggccgtccggaggaagaaatttctagactggtaaacttttatgattatctggaaatccagccgctcggaaacaatgcattccttgtaagagatgaagattctccggttgcgtctaatgatgatctgattgagatcaataaaaagattgtccggctcggtgaacagttccataagccggtggtggcaacctgtgatgtgcattttttagatccggaggatgaaatttaccggagaattatcatggcagggcagggatttaaagatgcggatgagcaggctcccctttttctgcggacgacggaagagatgctgaaagaatttgcctatcttggaagtgaaaaagcagaagaggttgttattacaaacacaaaccggattgcggatatgtgcgaaaaaatttctcccgttcgtccggataagtgtccgccggtcattgaaaattcggaccagatgctgcgtgacatctgttacaacaaagcacataaaatgtatggagatccactgccggaaattgtgcaggaacgtttagaccgggaattaaattccattatcagcaatgggtatgctgtgatgtatatcattgcgcagaagctggtttggaaatccaacgaagacggctacctggtcggatcgcgtggatcggtcggaagttctttcgttgcgacaatgtccggtattacggaggttaacccgctgcatgcgcattatctgtgcaaacattgccagtacagcgattttgattcggatctggtaaaatctttttccggccgaagcggatgtgatatgccggataagctctgtccgcgctgcggaaaaccgctttccaaagaagggtttgatattccgtttgagacgttcctggggtttaagggaaataaagagccggatatcgacctgaacttttccggagagtaccagagtaaggcacataaatacaccgaagttatcttcggggagggacagacctttaaggcaggaacgatcggtacgctggcggataagacggcattcggttatgtcaaaaattattatgaagagcgcggcgtacataagagaaattgtgaaattgaccggatcgtacttggatgtgtcggggtgcgtcgtactacgggacagcatccgggtggtatcgttgttcttccgatgggggaacagatttatacatttaccccggttcagcatccggcaaatgatatgacggtcgatattacgaccacacattttgattatcactcgattgaccataatcttttaaaacttgacattctcggacacgatgatcctaccatgatccgtatgctgcaggatctgacgggcgtagatccgacgcagattccattggatgataaggctgtcatgtcgctgtttcaggatacttccgcacttggcatcacgccggacgatctggtgaactgccagctgggggcattgggtatcccggagtttggtacagactttgccatgggcatgttaattgatacacagccaaaagaattttcggatctggtgcgtattgcagggctgtcccatggtacggacgtatggcttggcaatgcacagacactgattcaggaaaaaaaggcaacgatttctaccgccatctgtacaagggatgatatcatgatctatctgattggcatgggactggattccgaggaatcgtttaagattatggagaatgtccggaagggaattgtggcaaaaggaaaatgcgacaaatggccggaatggaagcaggatatgatcgatcacaatgtaccggactggtatatctggtcctgtgagaagattaagtacatgttcccgaaagcccatgcagccgcgtatgttatgatggcatggcgcattgcctactgtaaagtgttttatccgctggcttactatgcagcatatttttctatccgtgcgaccgctttcagttatgagctgatgtgtcagggaaaagaaaaactggaaggatatatgcatgagtacgaaaagcgcaaggacgagctctccaaaaaagagcaggatacctacaaagatatgcgtctggtacaggaaatgtatgccagaggatttgaatttcttccgctggatatctataagtcagaaccgcatcattttcagattgtggatggaaaactgctgccggcgctcaatacgattgacggacttggcgataatgcggcagttgcgattgcagaagcggcaaaagacggaatttttctttccaaggatgattttagggaacggacaaaagtatcaaagacaacaatagaactgatgagtgatctgggattgtttggcgatatgccggaatccaatcagctttccctgtttgattttggcgcgtaatgttatggaagttttgaaaaacaaaagaggaggaaccgcatttttgggttcctcctcttttacagtcttataaatttattttttgataacgccgggatggaaagcggtgagtgttcccggatgatcggtcggtgtacagaacacttcttttgtcttaaaatcggtaaaatagatgtaactggaagtgacgttgatattggagtaattgccctgtgccagttcctgatatccactgccgtcatttttgatcatacaaagggccggattgtcttcggaatagcgctgataaaaaatactgcttccgtatacattgtagagatccagactgtccttggtaagtgtaaccggatgaccggatttcatattggtatgtaccagggcgttgttctgatccacatccatataatagacattgtcatcactggttacaatcggtttgaaagaattacattcatagactttgcttaaactgtcactggcggtatccagctgatagatggcaccgtcactttcggttccgctggtataaatatactgacccagcgtgctgcatgtaaaaatgtaaggcgaatatacttttttgcgtccttcgccatcgattccgatcttgtaaagcgttgtagcatccttgtcatcatagtgcagataataaatgtagtttccgacaagcgaggcatacaggcagggatctttgtctaaaattttagtgttttctccattctggtcaattctgcacagactgtttcttgcgtaggagaagaaatcaaatccggttccattattttcattattgcgtacatagtatacataatggtcatcggcgttgatatacatgacacggtcataactgagttttttcagatgattgccgtttgtatccatggaatacagccggtaatcgtcatccggattggcaaaataaacggttccgtttttctcacaaaacaagccggcattgtaaaggtttccggcagtatttccgttgacatagcttgtgttgtatttgatcttacttttctgatggctgtaaaagcccagtcctgcaaatactacgaccagaacagcaattataattatgggcaaacgttttttcataatatcgagtcctccttggtaagttgtatcttgccttttatacctttgtgttataaaattttatcataaatcatgaaggagcgctatatgaaagatttactagatatccgaaaagatattgataaaattgacgaacagatcgtaaaactctatgaggaacggatgaaactgacctcggatgtggctgaatacaaaataaataccgggaagcagatttttgacaaggagagagaggaatccaagctggcaacgctgcagaaaaaagcggaaagtgattttaccagacacggaatccgtgaactttttgagcagatcatggcgatgagccgtaagaaacagtataaactgctgacggagcatggaattatgcctccgcaggagtttgagccgattcacacgttggattattccaatgcaaggattgtttttcagggactcgaaggtgcctacagccagcttgccatggaacagttttttggagaaaactgcaataatttccatgtggagagctggaaagatgccatggaggccattaagaacggggaagcggattatgcggtactcccgatcgagaattcttcggcaggaattgtctcggaaaattatgatcttctggtggaatatgataattatattgtcggggagcagatcatccgtattgatcatgcacttttaggactggaagatgcggatgagagagatatccgtaccgtgtattcgcacaaacagtcactgatgcagtgcagtgaatttctggacagtcatgcggactgggaaaaattcagtgtcagcaataatgccgttgcagccaagaaggtcaaagaggatggggagatttcccaggcggcgattgccagtgcaaaaaatgcccagatttatgggttgaaagtattacgcaattccattcagaataataaaaataattcgacccggtttattgttgtgacagggaaaaaagtatataccgatcaggcagaccggatcagcatctgttttgagatcaatcacgaaagcggtgctttatatcatgcactgtcgcattttatttataatggactgaatatgacaaatatccagtcacgtccgttacagaataaaaactgggaatatcgtttctttgttgattttgagggaagatttgaggatcatgcagtgcagaatgcgctgcgcggacttcgggacgaaacaattgcattccggattcttggtacgtattagtcagaattggtgaaagaaggtgggcgtatggcaattcacacatttgcagcaatttatattggcacatacgatgtgagcctgaaggtatttgagtttacaaacagaaaaaagtttcatgaggtggatcacatccggtcccggcaggaactggggaaaggtgcttacggcaccgggacaatcggatatgagcaggtggaagaactctgtgaaacactggcacagtttaaagagatcatggaaagctacaaggtagacagttatgaagtctgtgcagccgccgcactccgggataccacaaatgagatatttgtccttgaccagatttatcttagaaccggattccgggtaaaggtgttaagcaactcggaacaccgttttatcagttataaagcggtggctggcagtccggtgtttgaggagatgataaagacgagtgcagcagtcgtggatgtcggcggggcgagtgtgcagatcacattattccgtgacgggaaaatgatcacgacacaacacatggaaacaggcattatgcgcctgcggaatctgcttggagaccgcggatactccctgaaaatgtatgaaaaccagattgaggaatatgtcaataaaaaactcgagggatttcgctccatgtacatgaatacgccggtggattatctgatcctgatcagtgactatgccggcggcctggtcaaaaaaattgaggaaaaaggcggaaaaagcaggcaggtaaagctggataaattctctaaatttatcgataaactgctcaaaaaaacgctggaggagatcacagcggaattaaatctttcagatgagagggaaccgttaattattccggcacttgtgctgtataagatgatggcacagaatgtgaatccaaaagaggtatgggtgccgggagcaaacattcaggatggtatggcatttgattatgcacagcacaataaactgctggcatcgacacatgattttgatgcggatgtcatttcggcggccacatttttatcggagcattaccacagtttttctccacacattcagacactttccaagctatccattaagatttttgatgcgatgaaacaggaacacggacttggaaagcgagcgcgtctgctgcttcaggtggctacaatcctgcatgactgtggaaagtatgtcagctttgcggaagcgtcggagagtacgtatcatattatcatgtcctcagagattatcggtctgacccatcaggagcgcgagattgttgcacagatcgtgcgctacaatactcttccgctggatccgtatgaggaagtcgctgatgtattgagccaggaagagtatctttgtgtggcaaaactttcggcaattcttcgtgtggcaaatgcgctggatcagagtcataaacagaagtttaaaaatatccggatcgcggtaagggagagaaaactcgtgattacggtcgaggcatttgaggatattgcgctggaacaggcattgtttgacgcaaagacctcttattttgaaaatgtatacagcatgaaacctgttttaaaagagaagcgtatttataactattagatcggagggcttttatggacacaaaaatagattttaaagatccggcatattatgaaaaccgtgagctcagctggattaagtttgaccagcgtgtattaagtgaagcaagagataaatccattccgcttttggagcggttgaaatttgtcagtattacttcttccaatctggatgaattttttatggtaagggtggcatccttaaaggatatggtacacgcaaaatataaaaagcgtgatatcgccggaatgaccgccacggagcagctttccgccatcaataaacaggcgcgggaactggtcaatatccagtacagtactttcagccgttccctgatgccgcttctgcgtaaagaaggaatttatcttctggatgcacatgaggatctgaacgaggaacaggcgcgttttgtggatcgctattttatggaaaatgtatatccggtactcaccccgatggcagtggatgcgtcgcgtccgtttccgctgatccgcaataagacactgaatattgcagcacttctgaccggaaagaaaacggaggatgagactgtgtttgcgaccgtgcaggtgccaagtgttctgccgcgtctggtacagattccaagcgaaggggaaacgaagtctttcattctgcttgagcagattatagaacgcaacataggcatactgttttccaattacaaggtattgtgtgcgtatccgtaccggatcatgcgaaacgcagatctgacgattgatgaggatgaggcatcggatttgctgaaagagattgagaacaaattaaagatgcgtcagtggggagaagttatccgtctggaaattgaagagaaggtagataaaaagcttctgaaatttttaaagacggagctgaaagtgtcggatgaggatatttttcagattgcaggtccgattgatctgacttttttaatgaaaatgtatgggattgacggatatgaccatctccgctataaaccgtatacgccgcagcaggtgccggaaattacaccgggaagtgacatttttgccgcaatccgcaaaggggatatttttctgcatcatccatacgaaacctttgatccggttgtggatttcatccggcaggcatccaaagatccggatgtcctggcgattaaacagacactgtatcgtgtcagcggaaattccccgattatcagcagtctggcacaggcagcggaaaacggcaagcaggtgtcggttctggttgagctgaaagcccgttttgatgaggagcacaacattgtctgggcgaaaaaactggaacaggcaggctgtcatgtgatctatggtctcgttggccttaaaacacacagcaagatcgcactggtggtccgccgggaagaggacggaatccgccgctatgttcatctgggaaccggaaactataacgattcgacggcaaaattatatacggactgtggaatctttacctgcaaagagtcgatcggggaggatgccacagcggtatttaatatgttatccggatattccgaaccgctggcatggaatgagctggtgctggcaccatactggctgagggataagtttttgcggctgattggtagggaaacaaaaaacgcgcagcagggaagggaagcccgtatcgtggcaaaaatgaattccctctgtgatccgggcattattgcggcactgtatgaggcatctgcaagcggtgtaaagattgatctgatcgtgcgcggaatctgctgtctgcgcgtcggaattcctggagtgagtgagaatatttccgtgcgttccattgtgggaaattttctggagcacagccgtattttctatttttataatgacggcaatccggaagtatttatgggaagtgcggactggatgccgcgaaatcttgaccggcgtgtagagattgttttcccggtgattgaggaggaactcaaagaaaaagcactgcatattctgcatgtggaattggaagataatgtgaaagcgcgtgtgatgcagccggatggtacgtatgaaaaacttgacaagcggggcaaggttctgataaactcgcaggagcagttttgtgcggaggcaaaagcagcagtgccggatcagaatccgggaaacaaccagcggctgtttattccggcagaaccggcggaataaatttacagaaaacagttgacaataccgtaatcaggtggtatagtcaaatggttgttaagaaacaagtagagtatccactctcacctaagcgcaatcgggcgacttagtgttcatacttttagcatgttatatgaatgttagatgtaatagtggatagtctgcctatccactattttttattggaggtacaaaaccattagcgaattaatgattaacgaacagatcagagacagagaggttcgtctgatcggaccggatggcgagcagattggtgttgtctcatccagagaggcacagaaaattgcagatgaagccggtcttgaccttgtcaagattgctccgaatgcaaagccgcctgtatgcaaggtaattgattacggtaagtatcgttatgatcttgcacgtaaggaaaaggatgcaaagaagaagcagaagacagtggaattaaaagaaatccgcctgtcaccaaacattgacaccaatgatttgaacaccaagatgaacgctgcaaagaagttcctcgcaaaaggcaataaagtcaagatcacacttcgtttccgtggtcgcgagatggcacatatgaacagcagtaagcacatcttagatgatcttgctgagcagctttccgatatcgcagtagtggaaaaagcaccgaagatcgagggaagaagcatcggtatggtgttggcagagaagagataacatttattaaggaggaatacacaatgccaaaaattaagacaaacagagcagcagcaaagcgtttcaaagcaaccggaaccggaaagttaaagagaaacaaggcttacagaagacatatcttaacaaagaaaacaacaaagaataagagaaatctcagaaaagcagcaatgatggatcagacaaacatcaagaacatgaagaagattttaccatacatctaagatttgttaaggaggatataggaaatggcaagagttaaaggcggattaggcgctaagaaaagacataacagaactttaaagttagcaaagggatacagaggagcccgttccaagcagtatcgtgtagctaagcagtccgtaatgagagccttaacaagttcttattctggacgtaaagagagaaagagacagttccgtcagttatggattgctcgtatcaacgcagcagctcgtatgaacggactttcttacagccagttcatgcacggattaaaggtagctggagctgatttaaaccgtaaggtattagctgacatggctgttacagatgcagcaggttttgcaaagcttgcagaagttgcaaagaaagcattagcttagtcatcggaaaaatgttgggtagaaaactccggacaagttgtttgtccggagttttttgaaaaatatacggggaaaggtattggaaacaatggaaaaaagagaacagctcggaagcagacttgggtttattatgctctcggcaggatgtgcaatcggatgcggaaatgtatggaagtttccctggatgtgcggacaaaacggcggtggcagtttcatgcttgtctatgtgatctgtctgctcattttagggcttccggcaatggtgatggaactttccgtaggacgtgcggcacagacaagtcccttgtatatgtatgagaaactttccggaaaacgcaaatggaaaattccggggattgtgtgtctgattggaaatattgcactgatcgcgttttattccgttgttgcaggctggattatttattattttgtgaagtttcttaccggtcagaatgcggatttgggatttgaaaaaatgatcacaacaccatccgtaaatgttggttacctgttgatcacggttgtgattacatttgtgattttgagtttccggctgcagggaggccttgaacgcattaccaaatatatgatgtcggcgcttctggtgctgatgctggtgttggcgatccacagttttacgctttccggcgcaaaggatgggctggctttttatctgattccggacctttccaaaatatcaggtacaatgattgtaaaagcaatgaatcaggcgtttttcacgttgtcggtcggtatgggtggcatggcgatctttggaagctacatcgggaaagagcgttcccttttgggagaatccgtaaatatcattgttttagatacgtttgtagcagttgttgcaggcatgattatgtttcctgcctgcgatacctataatcttgaagtgactgcgggaccaagccttttgtttgatacgatggcgagtgtgtttaaccatatgcagggcggacgctggtggggtgcgctgtttttcttgttcatggtgtttgctgccatgtcaacggtatttggagtatgtgagaatctgcttgccatgatccgggaactgacgggctggtcacgtccggtgggatgtattgcctgcgggattgggacgtttcttgtggcattgccaacggcgctggggtacagtctgattcgttttcagccgtttgcaaaaggcacggcatggctggatttgtgggattttattgtgtctaacaatgcgatgccgctcggctcactgatactggcgctgttttgctgtacacgccggggatgggggtggaacaattttctgcaggaggccaatgcgggaaaaggcttaaaaatcaaggcatggatgaaaccgctgttctgttattttgtgcctgtagggattttatttatttatatttatggaatgttcacgtttccgtggcattagaaggaaagaggggcaaaaattattctgtccctcttatttttatgcgataagctttgggagaggccccttttttcttatgaaaggtttttgaaaaatacagcccattatcaaatccgacggaatttgcaatggcggtgatcgaaagatttgagtgttccaacagatagcatgcctgtttcatgcgaaaatccgtgaggtattcttttggggactgctgcagcaccagttcaaaggaacggaacagatggctgcggcttaaaccgacgtaggcggcaatatcttccactgtgatcgggtaggagtaattggcgctgatatattcgatacttttctggacgtaggttgcggctgtcagctgcgtttctttttgggtggaagattttagaaagagcgccagcgtggtatagagccggccggtcatttcaacggcatgttcaaatccgtttcctctggcatcatagatatgcagaagctgacgtttgacttcttcgccgttgggaactgcatgaatacatggatgtttgcgggaaaaatcggttgcctgcagaattgtggctgcgtcacttccggtaaatccgacccatgcatattcccatggcgtttttgtatcggcacggtagatgatttcggtattcggatataccagaaaggcgtctccggcagagagggagtgggtttcgttgttgacttcgtatgtgccttttcccgagatcacatagtgaatcaggtagtggtcgcggattccgggtccccactgatagccggcatcgcatagctggtatccgacattatagacagacagggaaacaagttcttttgcagttgctttgtaggaatttttatattgatcattcattggaaattctccttacacgattctagtattgagtttatacgtttttttatgcacatgcaacatttttacatgttttttctacatttggttctgtacattaagagccgggagcgatagaataggggtatcagaagaaaacaaaagcacagaaagggagagtggaattatggcaattttagttactggtggagcaggctatatcggaagtcatacctgtgtggaactgcagaatgcgggatatgatgtcgttgttctggataatctgtcaaacgcttcagaaaagtcactggatcgtgtggaggcactgaccggaaagaaagttacattttataaaggagatatccttgaccgtgacatcttaaataaaatttttgcagagcagaagattgacagctgtattcattttgcaggactgaaggctgtcggagagtctgtggcaaagccttgggagtattacaataacaacattgcaggaactttaacactggttgatgtgatgcgtcagaacggatgcaagaacatcattttctcttcatctgcaaccgtatacggcgatccggcagaaattccgattaccgagaactgcccgaagggacagtgtaccaatccttacggatggacaaagtccatgctggagcagattttatcagatatctacaaggcagataatgagtggaatgtgatcctgcttcgctacttcaatccaatcggagcacatccaagcggaaccatgggggagaatccaaacggcatcccgaacaacctgatgccttacattacacaggttgcagttggaaagttaaaagaactcggtgtattcggaaacgattatgatactccggatggaaccggtgtgcgcgattatatccacgttgttgatctggcaaacggacatgtaaaggcattaaagaagatcgaagagaacgccggactttgcatttacaaccttggtaccggacacggctacagcgtgcttgatatcgtaaagaattttgaggaagcaaacggcattaagattccatacagcatcaagcctcgccgtcctggcgatattgcaacctgttactgtgacccgggcaaggcagaacgtgaacttggctggaaagcgcagtacggaattaaggaaatgtgtgcggattcctggagatggcagaagaacaatccaaacggttatgaggattaatgaaaaaagagggaaaagtcttattttcgaatttgtttgaatatttttgaaaaatatgaaaaatatgcttgacgaagcgtggggtgtatgctattataatacacggttcgttggtcaagcggttaagacgccgccctctcacggcggaaacacgggttcgattcccgtacggactgctgagttataaatccagtgtttatacagattcttaggaagctgttgtaggcactggattttttgttttcttatatggtcatatatgaaaccgaaacgtcgggttagaatgtcgaaacaagattacctatgagataatggggataaaagttatgcacttagtaaaattggaagagattcctggtgctaaagaagaattgaaaaaaattcgcaaacggttctacgattggatgaaagatccttctgcattttcagagtaattcacaaaatatccaagaaaccttgcaaaacagggcatttcttgtcagcaggaggtatattatgacatcaattcgtgttttattcgtatgccacggcagggctatggaaagtcagtaaaatcaaggctttagggggcattacttgggtatatcgtggcaagcgtagtagtaagggactacggtaatactacgaatgagggaatgcaaacaagccgatgtagaagtacaaattttaacggtagtagcaatcgttagaatgtaagggctatcgttatatagtgtgcaatcgttgaaatgttcagcagtatcgtgtaaaatgaatatctaattggatatgaacatataatattaatgcagccataagctgcgatttgaacttattttgacattgacaagcggctcatttggatgtatattttaagtacagtaagagattactgcaaatgtttgttgctactcgatatgcaactcaaacaaggtcgagttcaaatgtttgtcgctactcgatatgcgacttagaaaaggtcgagttcaaatgttttgaggttccattcgagaggatggggcctctttttaacgataggagaagaaatggaaataggacatttttattatattgatgatcagtactttaaggattttccagatccttatttgatgcagaataaggaaaaagtaaatggacagttgcatgacagaccatgtttttacgcattccaggatagtaatactcagctattttggatgattccgttttcgtcacaggtttctaaatttaaggggatttataataagaaaatgcaaaagtaccataggtgcgatacaattgtttttggagaagtacttggtcatgagaaggcttttttgattcaaaatatgtgtccgattacagaaaaatatatgaaaaatgagtatttggactctgctgccaatataccagttcgtgttgatggtagattggaaaaggaattgaaggataaggcagggaaagtattagcgttgcagagaaagggcgcaaagctgatttttccagatgtctttagtatagaacaggaattattataatagatggaaatatctatcgaatatagagacagtctgtctgatcaaaatcaggataaggacaagtattcgttggtacttgccaatccaccttttaagggaagtctggatgcagagtcagtttccggagatttgcttaaggtatgtaagacaaagaaaacagaattattattccttaccttgttccttcgtatcttaaagattggtggaagatgtgcttgtattgtaccggatggagtgctttttggatcttctaaagcgcataaggatatcagaacagagattgtagaaaatcagagattggaggctgttatttccatgccttccggtgtgtttaaaccatatgccggtgtatctaccgctattctggtatttactaaaacagagcatggtggaacggataatgtgtggttctatgatatgaaggctgatggcttcagtcttgatgataagagagctgttgtgtctgaaaatgatatcactgatatcatcaagagatttaagaatcgtgagcaggaaattgatagaaaacgtaccgaagtagagtaccgcgctctaatatatcaaactcaaacctatagaaagtgcctgtatctgttgaagagaatgttgtcaactcttcatcagtaaaagtgacagaaaagataagtggtgtagataaaaaatgagctctataccattataaactgtgttggaaaaatgaaccatcatatatccatcttgcgcttgtacacttttatggcaacaaaaatggtgagaatatttacaaggctttgaaaaaagagaaattcgaagcacctgcggttcgatggaagaaagatactaaactaaagaaatttattgaacttatcttgattcacacgaatacagctaatattgatgttccagaatcgttttcagggtatctagcaaataacatagtaggcgataagaagtctatgagtgctaaaatcacaaagcaatatccaaagaatggaacgcaacttaacaagatattcaagccattttataagacacttgcaaaaataaagaaataacaagaaagaggccagaacgataaaggatggcacgatatcgcctaagtcgaaggcaagttcttctaactctggcaatataaagataaaaatatgaaaaaagtatttgacaaagagtattgtgtatgatagtataatacacggttcgttggtcaagcggttaagacgccgccctctcacggcggaaacacgggttcg

SEQ ID NO: 1028 - DNA, 331352 bp, Unknown
  gut microbiota DNA sequence
ttactattataaatataatagcccaacccgaaaaaatgttgtcgtatgacagcattttttttatttaatcataggaaattccttcctatgattaaataacgctccgcgagctgcgcatcctcgcggaaataaagtttatgatggagaaacggcggcagaggctttggaaaatgtggaaacagttatttccgaatggatagagacggcaaaggctattgggcgggaaattccagtgccaaaaggaaaattgatgtacgcataatgaaaaatccagtgttttcatggaatcgtccgtgaaaacactggattttttacgaaataaacttctttacaattcaatggtcagttctaccggacagtgatccgaaccgaacacatcggtatggatagctgctccggtgagactggaatctaaccgctttgaagtgaggaaataatcgatccgccatccggcgtttttctcgcgggctttaaagcggtaggaccaccaggaataaatgccctcggcatccggataaaaatagcggaaggtatccgtaaaaccggcgtttaaaagttcggtcattttttcccgttcttcatcggaaaaaccggcatttttgcggttggtctttggatttttcagatcgatctccgtgtgtgcaacatttaaatcgccgcagagaatgaccggctttttgctgtcgagctgaagaagataagcgcggaaagcatcttcccattccatgcggtagggaagccgcgccagttcgttctgggagtttggagtgtaacaggtgacaaggtagaagctgtcatattcgagggtgatcactcgaccttcggtatcgcagattgcggtgccgatgccgcgtgtgacctgaagaggttcgtgttttgcaaagattgccgtgccggagtagccttttttctcggcgtaattccagtactggtggtagcccggcagatcaagtgcgatctgtccttcctgcagcttggattcctggatgcagaaaaaatcggcatctgcggcatgaaaataatcgagaaatcctttttgtacacaggcgcgcagcccgttaacgttccatgagataagtttcatttctgatgtcctcctgagttgcttttatacaaattatatacatatgggaaagaaagtacaagtcttgttactgcttgcaggggaacaataaccaggcttctgaaaaaagtacttgacgcatggcctgtgctatgatagtataatacacggttcgttggtcaagcggttaagacgccgccctctcacggcggaaacacgggttcgattcccgtacggactgctgaagttcttacctgattgggtaagaactttttgttttatgaaagaaatacacaaaatcccttgaaatcagggaaaaagagtgatatgataacaaaagtaacatagaaactaaggttgagagagggcagatgtcctctctcaaatttttgtgaaaatgtgttttatgtcaaagaaaagaggtggtaatatgtcaaaggcaagtacttatgaggcaaagacagaacaactgattcttccgattctggagcgtatgcagtttgaactggtagatgtagaatatgtcaaggaaggcagcacgtattatctgcgggcgtatattgacaaagagggcggcattacaatcaacgattgtgaagcggtggcacgtgagatgaatgaactgctcgaccgtgaagatttcattccggattcctatacatttgaggtaagttctccgggacttggaagacctttaaagaaagaaaaagattatgtccgcaatatgggcaaagaaattgagatccgtacctaccgtgcgatcgaccgctgtaaggaattcacaggaattttaaaagcgtatgatgatacatctgtgacgattgcagatgagaacgacaaagagaccacctttttaaagacagatattgcactgatccgacaggcaattgatttttaggacaatgacttatagagcagtttatagaaaagtccgttttgcggaggtaaactgcgcaggagatatcgcttatgcgatacctcatatgtggaaaacacgataaatatatatggaggataaaaatcatgaataatgagttattggatgcgttaacgatactggagaaggagaaaaacatcagtaaagaaacgctgcttgaggcaattgaaaattcccttttaactgcctgcaaaaatcattttggaaaggctgacaacgtaaaagttgtgattgatccggacacctgcgaatatcattgttatcaggaaaaaacagtggtagagactgtggaagatccgattgagcagatctctttgcagaatgcgcagatgatcaatggaaaatatacactgggcgatattgttcaggtagaagtaaaatccaaagaatttggacgtattgcaacacagaatgccaagaatgtgatcttacagaagatccgtgaagaagaacggaaagtgatttacgatgagtatttcagcatggaaaaagaagtagtgacaggtgttgtccagcgttatgtcggacgcaatgtcagtattaatcttggaaaggcagatgcactcctgaccgaaagtgagcagatcaagggggaaaccttccagccaaccgaacgcattaaggtatatattctggaagtgaaggcaacctcaaagggaccgaagattcttgtttccagaacacatccggagcttgtcaagagactttttgagtcagaggtttccgaagtgcgggatggtatcgttgaaattaaagcaatctcacgtgaggcaggaagccgtacaaaaatcgcggtatggtcgaacgatccggatgtagatccggttggcgcatgtgtcggaatgaacggagcacgtgtcaatgcgatcgttaatgagctgcgcggagaaaaaattgatatcattacatgggatgagaatcctgcaattttgattcagaatgcattaagtcctgcaaaggttatttccgttattgcggacgctgacgagaaagcagcaaaagttgtggttccggattaccagttatcgcttgctattggtaaggaaggacaaaatgcccgtctggcagcccgcctgactggatttaagattgatatcaagagtgagacgcaggcaagagagtccggagatttccttgattacgaaaatgattatgaagacgatgagtatgatgataattatgagtatgatgaggaaggatattacaaagatccggatgccacagaagaaattcctaccgaagcagaagcatcaacagaagaagcgccggtagaagaaacatcagcagatgagacttcttttgaggagtaattatggcaaataaaaaaattccattgcgcaagtgtgtcgcctgtaatgaaatgaaggaaaaaaaagaaatgatccgggtaattaagacaccggaaaatgagattatgctggatgccaccggtcgtaaaaacggccgtggagcatacatctgtgcagatcctgggtgtcttcgcctggcaagaaaaaacaagggacttgagcgctccttaaagactgcaattccacaggaagtgtatgaaagtctggaaaaggagatgagtacacttgcataatgatcccgtattatccatgcttggaatagcagcaaagtctggaaatgttgtaagcggtgagttttctacagaaaaagcagtaaaaacaggtcatgcatatctcgtgattgtctctgcggaggcatccgggaacacaaaaaagagtttttgtaatatgacggatttttaccatgtgccatgctattgttacggaagtaaggaagcacttggacgctgcatcggaaaagaattccgtgcatcacttgccgtgacagatgaaaatctggcgaaggccgtagaaaagaagctcaaagagcacaccgtataaaaatataaaactgaataacggaggtaaattcatttatggcaaaaatgagagttcatgaactcgcaaaagagttaaatataaaatcacaggatattttggataaattaaaaaatacaaagtttgacggaaaaagtgcatccagcaatatggaagatgaagcacaggcactgattcgcggagcttttgcaaaagagacaaaatcggcagcagatgcaaaaaaaccggaagctgcaaagactggtgcaggaaaaccagcggatggaaaggaacgtccaaagaagaaatccagcatcacagccgtatttaatgcacagtacagcaaacagtccagaaagccggcaaacggaaataacaacaaccgtggaaacggaaatggaaacggtaataacagaagacgggaggacaataagcgtccggcacagcacagcatcattcgtccgcgtccggtcggggagcgtgctatgcgtccgatcagtgagcgtacgccttcgccgacagcggatcttgaagtaagtaagccggcaaacaataaaccggcagaaaacgcaaatacccgcaacagccaggaaaaccgcggaaacaacaatcattccggtggcgagagaaacaacagaccgcagaatgacagaaacaatgacagaggcggggagagaaataataaccgtcatcagggagatagaaacaataacaatcgtccgaacggagacagaaacaacagccgtccacagaacgacagaaacaataacggcagaaagaaccgtttcagtaaagagccggcagcagttgcagcaccggaagaaatccgcggaaaggactcccgtggaaataatgaccgccgcaataacaacaataatcatcggaaagatcatgataaactcggcggaaagaaacaggaaaattatgtaaaccttgagaagcacggcggcagaaagaaaccacagcagcagccgaagccgaaggaagatgaaaatgtaatcaagacgatcacacttccggaaaagatgacaatccgtgatctggcagacaagatgaaactgcagccatctgccattgtaaagaaactctttatgaagggtgaaatggtaacggtaaatcaggaagtagattttgagacagcggaagaaatcgcactggagtttaactttatctgcgagccggaggagaagattgatgtcatcgcggaactcttaaaagaggatgaagaagatccgaagaatctggttccacgtccaccggttgtctgtgttatgggtcatgtcgatcatggtaaaacatccctgctggatgcgatccgttccacacgtgtgacagaccgcgaggccggtggtattacccagcatatcggtgcatctgtggtgtccatcaatggacagaagatcacatttttggatactcctggtcatgaggcatttaccgcaatgcgtatgcgtggtgcaaattctaccgatattgcaatcctggttgtcgctgcagatgatggtgttatgccacagaccatcgaggcaatcaaccatgcaaaggctgccggtgtagaaatcatcgttgctgtcaacaagattgataagccgagtgcaaacattgaaaaagtaaagcaggagctttccgaatacgaactgattccggaagactggggtggaagtacgattttctgtccggtttctgcacatactaaggaaggtatcgacaatcttctggaaatgatccttctgactgcagaagtgatggaactgaaagcaaatccaaaccgtaatgcaagaggtctggtcattgaggcacagctggataagggacgcggtgcggtagcaacggttctggttcagaaaggaacacttcatgtcggagattccattgcctgtggaagcagctacggtaaagtccgtgccatgatcgacgacaagggacagcgtgtgaagaaggcaactccttccacaccggtagagatcctcggattaaacagtgtaccggcagccggagagacatttgttgtctgcgattccgataaggaagcaaaatcatttgcagatacttatatttcagaggaaaagaaccgcctgatcgaagataccaaggcaaagatgtcactggatgatctgttctcccagatccagtccggaaatatgaaggaacttgatattattgtaaaagcggatgtacagggttctgttgaggcagtgaaacagtcacttgtgaaactgtccaatgaagaagtggttgtaaaagtgatccatggtggtgtcggcgcaatcaacgaatctgatgttattcttgcttccgcatccaatgcgatcatcatcggatttaatgtccgtccggacccgattgcaaaagttaccgcagataatgagggtgtagatatccgtctgtacaaggttatttacaatgcgatcgaggatgtagaggctgccatgaagggtatgcttgatcctgtatttgaggagaaagttatcggtcatgcagaaatccgtcagatctttaaggcatccggtgtcggtaatattgccggttcttatgtacttgacggtgtgatggaacgcggatgtaaagttcgtatttccagagaaggcgagcagatcttcgagggagatttagcatccctgaagcgtttcaaggatgatgtcaaggaagttaaggcaggatttgagtgtggtcttgtatttgacggctttaatgacattcaggaactggatcaggtagaagcttataagatggtagaagtaccaaggtaggatagaatatgagaaaaaacagtattaaaaatattcggatcaatgaggaagtgatgcgtgagctttccaatattatccgcggggaaatcaaagacccgcggatcaatccgatgaccagtgtagttgcagtggaggtcgctccggatctgaaaacggcaaaggcctatatcagtgtgctgggggatgaaaaatcacagcaggatacgattgcaggacttcgctccgcagaaggatttattcgcagaagcctggcaaagtccgtaaatctgcgcaacacaccggagatcaaatttgtattggaccagtccattgaatatggaatccatatgtcaaaaatgattgatgaagtgaccaaagatataaaggagaaaccggatgaagaagcttgatgagattcttgcagggaaaaaatcggtaggtcttgccggacatgtacgtccggatggggattgtgtgggctccacactcggagtttacaactatatccggaaatattatccggatgtggatgtgcgattgtatcttgagccgattcccaatatctttaaattcctgaatttttcatcggaaatccgcagtgactatgaggaatccgtggtgtttgatttgtttatcgccatggactgcggggatgagaaacgtctggggaatgctgcacgttattttcaggaagcaaagcatacagcctgtattgaccaccatgtcagtaaccagagttttgcagaggaaaattatattttcccggatgcaagttccacttgtgagctgatctgtgaactgttagatacggagaagatcacaaaagaaatcgcggaatgtctgtataccggaatggttaccgataccggagtgtttcagtattcctgcacgtcttcctccacgatgaatatggcgggcatgctgatggataaaggaattgatttcacaaaaattgtggatgaagcttttaatcagaaaacatacaaccagaaccgtgccatgggacaggcgctgctttccagcagacttcgtctgggtggcagagtagtgacttcttttctgacgctcgaagagatgcatgcactcgaagttcttccaaaacatatggaaggaatcgtggagcagatgcgcaataccaaagatgtggaacttgcagtattcctttatgagaatgaggatcatacgtttaaagtaagttttcgtgtaaacggtgcgtttgatgcggcatcgcttgcgatgcattttggcggaggcggacatgtcaaggctgccggatgtaccgtggaaggaccggcagaagaggcaattgagcgtattcttgccgaggttgagaagagattataatatgataaacggaattataaatgtttataaagagcggggctttacttcctttgacgtggtagcaaagctccgcggcattttacatgagcgtaaaattggacataccggaacgctcgatccggaagcgaccggagtacttcccgtatgcatcggaaatgcaacaaaggtatgtgaacttctgacggataaggataaagtgtatcgtacggtgatgcatcttggcattacaaccgatacacaggatatgaccggaacggtgaaagaagatcgttccagagaggctgcattgctgaaagaacagaccgtggaagcggctattttgcagttcgttggagattatgagcagattccgccaatgtactcggcactcaaagtcaacggaaagaagttatgtgatctggcccgcgccggaattgaggtagaacggaaagcccgcacggttaaaattttttccatagaaattgaaaaaatcaatcttccttatgtgacgatgcaggtgcactgttccaagggaacttatatccgtacgctgtgtgcggatatcggagaggtgcttggcgtaggcgcgtgtatggaatccctggtccggacaagagtgagtgtttttcctctggaagaggcacacacgttggcagaaattgaaaagataagggatgaaggaacgctggaagaactgattcttccggtggaccgcgtgtttgagggaaagacgaaactgacggttgtaccggaagcgtttcgttttcttcagaatggaaaccgtttaaacgatggaaattttacggatgttccggaaaaaattgcggatggtgagcaggtactggtttatgatccgatgggacatttttacgctgtatatcagtatgagagagaaacaaaggactataaagtccggaaaatgtttggtgcataaatatgatttgctggaataagatagaagattttcatatagaagaaccaacggcattgtcgctgggaaaatttgacggagtacaccgtggacacgaagcactgattgaacaccttctggaaaagaagaaagaagggttaaaggccgttgtttttacgtttgatattccaccgaaaaaacttacggagaataataattaccgtgtcctttcgaccaataaagaaaagcaggaaattctgaaagagcgtggaattgattacctgttggaatgtccgtttaccaaagaagtcatgtgcatggagccggaggcttttgttgcatggattgtaaaaagtctgcatgtaaagagcatggtagtcggatcggatttccggtttggccataaccggaaaggggatcatattctgctggaaaaattgtccgcgacatatggctatacccttagggtggtagacaagatccagtatgagggacgggacatcagcagtacgtttgtgcgggaacagatcataaaaggcaatatggaaaaggcaaatgatctgcttgggtatccgttttttgtaaagagtgaagtgattcatggaaggcagcttggaagaacgctcggaatcccgacgatcaatatggaacttgtggccgaaaaacttcttccgccgaaaggtgtatatgcaactgcggtagagattggtggaaaatattacacaggtgtgacaaatgtcggatgcaaaccgaccgtcaatcattccaataaagtaaatgtggagacgcatatactggatttttccggtgatctgtacggatatgaactaaaggtcagcttttattcttttatacgtccggaacagagattctcgtctgtagagatgttaaaagaacagatggaaagagacattgaaacgagccgcagtcgtatgatgtcgataaacggcgatatgtaaatatattacataaatattacaaaaatatgttgacattgtaattatttgttgttatactcgttttgttatgagatttcatgagacatgagggaggaatctgtgaaatgaatcgtatgacaaaaaagagagttggaatggtacttgctttttctctgacactgaccggtgcggcagcctatatcgggatacagcagggaaatacagataaaacagaggcggccggatcgctcacagccggtgtttccgcatctttgaatgcaagcgaagtggaggcgctggatgtgacggcaggagtaaccagtcagctgtatgataaaacagatgttgcggtggctgcgaatgaaaagcagatggttgcacagggaatcgaagatacgcagacaaaagaagcggtttcggaaaataccacggaggataccagcatctgtgggtataaaaatcttggaattgcgcaggtgcagggaagcctgaatgtgcgaaaaaaggcatccacagacagtaaagttgttggaaaaatgacggataaagatgcctgtgagattgtctcggtcaagggagattgggcaaagatcacctccggcaaggtggaaggttatgtaaagacagagtatcttctgacaggagatgcggcaaaaaatgtagcaaagaaagaaattacaaaagttgttacagtaaataccacaacccttcgtgtaagagaaaaggcttctgaagattctgcaatactttctctggttggagagggagaggatcttgttgtggaagatacaaaagacggctggtataaagtggaagtggatgatcagaagggatatatttccggagattatgtagaggtaacagaaaaacttccgacagcatcgacggtaaaagaactggaatacggagagggatacacggattcccgcgtttctttagtacagtttgcattacagtttgtaggaaaccgttatgtctggggtggaacaagcctgacaaatggaattgattgttccggatttacgatgcaggtatatgcgagatacggagtcggcctcccgcatcatgcggcaagtcaaccggcatacggaaatcgaatcagtgcatctgaggcaaaaccgggagatctctttttctatggaagcggaagcagcatcagccatgtgggaatttatatcggaaacggtcagattgtgcatgccagcaatgcacgtaccggaattaaaatttccagtgcttattaccggacaccaatctgtgtcatatcgtatttaaattaaaaaactgtttacaacgatacggatttatgatacattagattagtatggtttaacccatattcggtgaatggacactccgaccttttgctgagtatcgggtgcaaaaatattttaaggaggatcataaaatgatcgcaaaagaaaagaaacaggcaattatcaatgagtatggaagaacaccaaacgacactggttcaccagaagttcaggtagctgttcttactgcaagaattcaggagcttactgagcacttaaagcagaatccaaaggatcatcattccagaagaggtatgcttaagatgatcggtcagagacgtggattattatcatacttaaagagcattgatattgaaagatatcgttctttaattgagcgtttaggactcagaaaataattgtaaacaaagagcggagttttatattccgctcttctttttgttgtatggcagaacttttttccgggaccactgaagaggacaaaacgctgttttgtattgttcagtagtttcggggttttgacataccgtattaaattttgaaggagagaatacatgtacaaaagttattcaatggaactggcaggcagaacactgaccgttgatatcggaagagtatgtgcacaggcaaatggtgccgcattattaaaatatggagagactaccgtattatctacggctactgcttccgacaagccgagagatggcgttgatttcttcccgctgagcgtggaatttgaagaaaaaatgtactcggttggaaaaattcctggcggatttaacaagcgtgaaggaaaagcatcagagaactctattcttaccgcacgtgtcattgaccgtccgatgagacctctgtttccaaaagattaccgcaatgatgtaaccttaaataatatggttatgtctgtagatccggagtgtcgtccggagctggttgccatgatcggtgcagcactttctactaccatttccgatattccgtttgacggtccatgtgccatgacccagatgggaatgaagaatggtgaatttattgtaaacccatcccagaaagactgggacgagggagatttaaagcttacggttgcatctacagcaacaaaggtcatcatgattgaggccggtgccaatgagattccggaagcaaagatgattgaggctatttataagtgccatgatgtcaaccagacagtcattgcatttatcaataagatccgggaagaggttggcaaaccgaagcatgcgtatacaagctgtgcgattccggaagaaatgtttgcagctatgcgggaaatcgtcactccggagcagatggaagaagcggtatttaccgatgaaaagcagcagagagaagagaatatccgtgaaatcacagataaatttgcagaggcttttgcagagaacgaggagtggcttgctgttcttgacgaggccgtttaccagtatcagaagaagactgttcgtaagatgatcttaaaggatcataagcgtccagacggacgtgcgatcgatcagatccgtccgctggctgcagaagtagatctgatccctcgtgtacatggttctgccatgtttacccgtggacagacacagatctgcgatgttgttacacttgcaccgctttcggaagtacagaagattgacggacttgatgagaacgtgacaaccaagcgttatatgcatcagtacaatttcccgtcctattctgttggagagacaaagccaagcagaggtccgggacgtcgtgagatcggacacggtgcgcttgcagagcgtgcattacttccggttcttccttctgtggaggagttcccgtatgcaatccgtgcagtttccgagacatttgaatccaatggatctacttccatggcatctacctgtgcgtcctgtatgtcactgatggctgcaggtgttccgattaaaaagatggttgcaggtatttcctgtggtcttgtgaccggagagacggatgatgattatctggtactgacagatatccagggacttgaagatttcttcggagatatggatttcaaggtaaccggtacacatgatggtatcactgcaatccagatggatatcaagatccatggcctgacccgtccaatcgtagaagaagccattgcccgtacccgtgaggcacgcgtctacattatggatgaagttatgagcaaggcaattgcagagccacgaaaagaagtaaatcagtgggcaccgaagattgaacagatcaccattgatccgaataaaattggagatgttgtgggacagaagggtaagacaatcaatgagatcattgcccgtacaggtgtcaagattgatattacagatgatggtgcggtttctgtctgtggaacagacaaggaggcaatcgcaaaggccattgatatgataaaaatcatcacaaccgattttaaggaaggacagatctttaccggtacagttgtaagtatcaaagagtttggtgcttttatcgagtttgcaccaggcaaggaaggaatggttcacatttcaaagattgccaaggaacgcattgagcatgtcgaggatgtactgacacttggagatgttgtgaaagttgtctgtcttggaaaggacaagatgggaagaatcagtttttccattaaggacgttccggcagatcagaaataaaataccgtacagaattaagatccatgaaagatgtacttcaggggccgcaccatgcggcccttttttcataccatgaaagaaaaaggcgatgattcgaaaagttcggagttgaaatatgaatcgtgtcaaacagcttgtacatgcagagaatgtatatcgtatgggttacacggggaaaaatatccgggtggtgacactggacacaggcgtttatctacatccggatctgcggcagaatgtggttggatttctggattttgtggcaatgaaacgagcctgttatgatgataatggacacggaacacatgttggcggaattttgtgtgcgaatggcagaatgaagggaatggcaccgcaggcacagctgattgcgctgaaagtcctcgggaaggatggaggaggacagacggagcgggtgattcgtggcctgcaatgggtgcttgcacatcataaagaactgggaatccggattctgaatttttccgtaggatttcttccgggggcactcgaccgtgagcagaagcagattatggaacttttagaacagctgtgggatgatggcgtgacggttgtcacagcggccggaaataatggcccgggagccgggacagtcacggctcccggtatttcgagaaaagtgattacggtgggggcaagtgatgaccggagttctcctggggaaaggcgtggtggctacagtggcagtggtccgaccggatgctgtattatgaagccggaaattttagcaccggggacgaatattgtaagtctggatcatcacggagcactatattccagaaaaagtggcacctctatggcaacccctgtcgtatgcggggcactggcacttgcattacagaaaaatccaaagctgcggccggaagaacttaaactgaaattatatgaatcggcgcggaaagaaacgggaatgtccatggcgtggggcgttcttgatgttgataatttgctggcattggtataaaatactctctaaaagcctgtcggtgacattttatgagaaccaaaggaggagacagatgaaacgaatattaaataaactcttcagtaaacttgtccttggaggattgattattatattgcagttcagctggtttgtctatctgttgtacagtgcgaccgtatacagttccatggtagatgcattgtttaaaattgcatccattgtgcttgcattgtttgtctccagcagggatatgcgttccacatataaaacttcctggatttttctgatactggcacttcctctgttcggaattccggcatactatctgtttggccgtccgggactgacaaaacggacccgtatgaagatggacgtggtcagcagcaggatacgggcatacagttctccttccgatgatgtgatgtctgctttaagggcagaggatgattctgccggacagcaggcacagtatcttacctgttatgcagggtatccggtgtaccgtgaggcggatacacagtattattgctgtggagaagagatgtatccgcagtttctggaagatttaaaagcggcaaaatcttatatctttctggagtattttattgcggaacccggcaagatgctggatgcaattgttgaaattctggcacagaaagtaaaagagggtgtggatgtgcgatttatgtacgatggaatcggatgtatccagacactgccgaataaatattattgttatctgcaggaaaagggaatcaaatgtgcctgtttccagccatttcgcccactgatgtcaattatccagaataaccgggatcaccggaagatcacggtgattgacggaaaggttgcctataccgggggaatgaacctggcggatgagtatatcaatgccagagtgcgttttgggtattggaaggatgcggcaatccgtctgaccggagaatgtgtctggagttttacaagcatgttcttggaactgtgggattatattttgaaaatagaaagtgattatacattttatcgggcaacttccatggaaaaacacaggttgcaggaaaaaatccatgcagatgaaaaaggattcgtccagccgtataccgattctccactggatcacgaagatgtcggcgaaaatgtatatctgaatatcatcagcagggcaaaaaaatatctttacatctttactccgtatctgatcatcggatccgagatgcgtacggcacttgtaaatgcggcaaaatccggcgtggatgtgcgtctggttgtaccgggaattccggataagaaactggtgtatttcctgacacagtcgaatttcccgtatctgatcaaaaacggagtgaaaatatacacatatacgccaggttttatccatgcaaaatgttttgtgtcggatgatgtacaggcaaccgtgggaacggtaaacatggattaccgcagtctgtgtctgcattttgaatgtggcgtctggatgtatcgtacccgggcagttttgcaggtaaaagaagatgcgttaaaaacatttgcggaaagccacgaagtgaccctggaggaatttcaaagaaaatcgtttcttgtgcgtacatttatgggagcattgaaattgtttgcccctcttctgtaaaacactaaatatagtaaattgtccttgcattttctacaacataaagataaaatatagattatgacagaaaggacgagagggatggaactgaccgttaaactccaggtatttgagggaccgctggatctgcttttgtatctgctcgaaaagaataaagtgaatatctatgatattccgattgtggagatcacggaacagtatatggagtatatccgggaaatgaaacggcaggatctggaggtgctcagtgagtttctggttatggctgcaacactggtcgatatcaaatcacgcatgcttctcccgtcgaatccggacagtgaagaggaagaagaagatccgcgtgcggaactggtacagcagcttctggaatacaagatgtacaaatgtatggcgtatgaactaaaagaccggcagatggatgccggtcgtgttatgtataagaagccgacgattccggaggaagtgcgtgcgtatgaaccgccggttgatatccacgaactgatatcggacattacgctttcacgcctgcatgaaatttttgagagcattatgaaaaaacagcaggataaaattgatcctctgcggtcaaaattcggaaagattgaaaaagaagaggtatcgctggaagacaagatggaggatttgaaaaaatatgcggccggacacagacatttcagtttccggggacttttgacggcacagtcatcgaaagtggaagtgatcgttacgtttcttgcgattctggagctgatgaaaatgggaacgatacggatttcgcaggaacatatttttgatgatatccagattgattcgaaagttgcagcatagattatcatgtattgcaggatggacggaaaatatggaagaaaaaaaatacaaggcaattatagaaggaattctgttttctatgggagaatccgtagaactggaaaaaattgcaggaactcttggacttgatcagaagaaaacaaaggacctgatcgatgaaatgagaaacgagtgggaagaacagaaacgcggcgttaccatcacggaactggatggagcctaccagatgtgcaccagacccgaaatttacgaatatctgattaaaattgcaaagcagcccaaacgccgggttttaaccgatgttcttttggagacgctttccattattgcatataagcagccggtgacaaagatggaaatagaaaaaatacgtggcgtgtcatcggatcatgcggtaaacaaactggtggaatatcatctggtgtgtgaacttggaagacttgatgcaccggggcgtccgttacttttcggaacaacagaagaatttttacgcagtttcggcgtacattcaatcgatgatctgccggtactcagtccggtacaggtggaagagtttaagcaggaagcagaagaagagatgcatgtgaaactggacgtataaaagaagcaggaataatcatatacatagaataaaaatgtatatggttatttttttatgtttcaaaaaagaatctgcacaaaaatagtaagtctgttgctggtaatcggatgtctgatgagcgaaccggttttggcagaaaagcaaaaagaacccgaagcgcagacactgtattcaaaatcctgcgccatggtggatggtgacagtgggcgccttttgtatggaaaagaggcacagacagcactgccgaatgcaagtaccacaaaaattctgacctgtatcgtggcgatggaacaatgtaagcccgatgaagtggtcacattcagcgcaaaagcggcatcacagccgaaggtacatctcggggcgaaaaaaggagaacagttctatatgcaggatctgtggtatgggctgatgctggaatcctataatgactgtgcatatgcaatcgcagaacatgtggcgggatctgcggaaaaatttgcagcacttatgaatgaaaaagcaaagaagatcgggtgcaccgacagccattttgtgacaccgaacggtctggatgcaaaggatgagcagggggaacaccataccacagcatatgatctgtgcaggattatgagttattgcgcatggaagtctccggtaagcaagcagtttctggaagtgacgcagacccggtcacatacatttcagagcctggagggaaccggatatgctgtttccaataaaaatgccctgctggatatgatggatcatgtgattaccggaaaaaccggatatacgtccaaagccggatattgctatgtggctgcacttgaagaaggggggagacattatgcaatcgcacttcttgcctgcggctggccgaaccacaaaaattataagtggtccgatgcaaagacactgtttcaatacggaatggatgcctatcatctgtatcggggatcggaagcatccatggagctgccggatatagagattgcgcagggctgtcggaaagaaacactcgaggaatgggctacccatgccaaactgccggtttatgttgatacggatatcacaaaactgacgtttttgaaaaaagacggggataccgctgaaataaagaaagtatggtctgatccgataagccttccggtcaaaaaagggcagacgcttggacgtgtttcctactgtatgaacggcagggaaatttactccggaaaaattaaagcagaggtttccgtaaaaaaatggtctcctgaaaagttttttcaaattatgtggaaagaggcactgttgggcaaataggaaattagtcacaaagaattagtgaaaaaattaacaaattatgttgaaaagaattgggaaatgagatacaatacaaactagcggaaatttttattttttatagatggagggcataaaatgagtagtaacaatgaaaacttggcaattcagcgtattgctaagttggtcgatgagaacagttttatggaaatcggttctctcgtaacagcacgtagcacagattttaatcttaccgctgcaaagaccccttcagatggcgttgtaatcggtcatggactgatcgacggcaatctggtatttatttacagccaggatgcatccgtattaaacggtaccatcggagagatgcacgcaaagaagattgcgtctgtgtatgacatggcaatgaagatgggagctcctgtcatcggtctgattgactgtggcggcattcgtcttcaggagtcggttgatgcattggatgggtttggaactatttatgcgaaggaagtagcagcttccggtcttgtacctcagatttgtggtgtatttggcaattgtggcggcggcctttccgttgtcccggcactttgcgatttcgcgttcattgaagagaagaaaggacgcatgtttgtaaatgctccggatgcaatcgaaggcaataacacagaaaaatgtgatacagccagcgcagcattccagagtgaaaacaacggatgtgtggatttcgttggttcagaagatgaaatcatggagcagattcgtcagctggtatgtatgcttccaagcaacaatgagggagatgtctatacagatgactgtgaagatgatttaaatcgtgcctgcgagagcatggagaatatgaagggtgatccaagatatctgttatcccagatttcagataataacgtattcttcgagacaaaggcagattatgccaggaatatggtaaccggactgatcaagttaaacggaatgacagtcggcgctgtggcaaactgtagcgaagtatatgatgcagaaggcaagaaagcagagagctttgacaagtccctgaccgcgcagggatgcaacaaggcagctgaatttgttcagttctgtgatgcattctcaatcccggtacttaccattacaaatgtaaatggattgaaaaactgcatgtgctctgagaagaaacttgcaaaggcacttgcgagaatgacttacgcattttccaatgcaacctgtgcaaaggtaaacctgatcacaggagaggcttacggaagtgcttatgtatttatgaattccaagtctgtcggagcagatcttgtatacgcatggagcggagcaaagatcggtgcgatggattctactctggctgcaaagattatgtatccggaagctggtgcagatgagatcaagcagaaagctgctgattatgaaaaacttcaggattctgccgcatctgctgctgcaagaggatatgtggatcgtctgattgatccggcagataccagaaaataccttgtagctgcttttgaaatgctttatacaaagtatgtaagcgagccagaaaagaaacacggtaccaagtagaaaggtgaagttttatgaaaaagagaattgcttttgcactttgcatgatcctgatggttctgatgcttggtgcatgtggaacagacccgactaccgtggattacaatggaaagtcctattcagatcttcagtctgaaatggataccaatgcgggcatggtacagagtctggctcagttgttcaaagaaaacaaactgacagcagatactcttccggacgatgtaaaggatcagcttacttcaagctacggtgtcacagaggcacagattgaggcagctgcaaagtggcaggatactttggatgagtttggtaaaatgaaaaagatcgaagacgatacttttaaggttaccaaatccggtaagacacttaccacagatatgaccatcaagttcgcgaagaaagatgtgaatttcgaagtagtatatgattactattccatggatgttaccggcatttcggtagatccgatttatacactcggtgagaaaatggaaaaggcaggactgaatactgtaatttctatggcagttgtatttgctgtattgattctgatcagtcttcttatttcctgctttaagatcttcccttatctggagaaaaagaaagctgccaaagcagccggacaggctccacagcaggaagagacaccagccgcagcgccggcacctgcccctgttgcagcacagacagatgatactgaacttatcgcagttattgcagctgcaatcgctgcaagtaccggaacttctaccagtgatttcgtagttcgttccatcaatcgtagataggatagaaagaaaatttaggaggaacatattcatgaagaattatacaattaccgtaaatggtaacgtttatgatgttacagtagaagagaccggaagcacatccggcgcagcagcaccgagacgtacagctgcaaagccagctgcagcaccggcagccgcaccagctgcttcagcaggagccggaagcattaagattgaagcaggagctgccggaaaggtattcaagattgagaagaaagtcggcgatgctgtaaagaagggagatgccgtcctggttcttgagatcatgaagatggagacaccagtcgttgctccggaagacggaactgttgcaagtatcgatgtagcagttggtgatgccgtagaatctggtgcattactcgctacattaaactaatccaaggaggaaaacactgtgagttatgtaggtgaaacattatcgaacctcctgcatcagacagcctttttcaatctgacctggggaaattatgttatgattttagtggcatttattttcctgtatcttgcgattaagaaaggttttgagccattactgttagttccgattgcatttggtatgcttctggtaaatatttacccggatatcatcgcaagcccggaacagaccagcaacggcgtgggcggtttactttattacttttacacattggatgagtggtctattttaccatctctgatctttatgggtgtaggtgcaatgacagactttggtccgctgattgcaaacccggtcagtttccttatgggagctgccgcacagtttggtatcttcagcgcatacttccttgcaattatacttggatttaatgacaaggctgccgctgccgtatctatcatcggtggagcggatggacctacttccattttcctggctggtaagttgggacagaccggtctgatgggaccgatcgccgtggctgcatattcctatatggcacttgtgccgatcattcagccacctatcatgaagttatttacaacaaagaaggaacgtgcgatcaagatgcagaaccttcgtccggtcagcaagctggagaagatcctcttcccaatcgttgttaccgttgttgtctgcgtactgcttcctaccacagcaccacttgttggtatgctgatgcttggaaacctcttccgtgagtctggcgttgttcgtcagctgcaggagactgcaagtaacgcacttatgtacattgtcgttatcttactgggtacctctgttggtgcaactaccagtgcagaagctttcttaaatgcaagcaccttaaagatcgttgtattaggtcttgttgcatttatggttggtactgctgccggagttttatttggtaagttattatgctggattaccaagggcaagattaaccctctgattggttctgccggtgtatctgctgtgcctatggcagcccgtgtatcccagaaggttggtgcagaggaggaccctacaaacttcctgctcatgcatgcaatgggaccaaacgttgccggtgttatcggtactgcagtagctgcgggatgtttcatggctatatttggaatttaataaggaggaaaagtcatgtcagaagtggtaaaaaaaccattaaaaataacagaaactgttttgcgtgatgcccatcagtcactgatcgctacacgtatgacaacagagcagatgcttccgattatcccaaagatggataaggttggattcaatgctgtagagtgctggggtggtgcgacattcgatgcctgcctgagattcttaaaagaggacccatgggatcgtcttcgtaaattaagagacggatttaaaaatacaaaactgcagatgctgttccgtggacagaatatcttaggatatcgtccgtatgcagatgatgtggtagagtattttgtacagaagtcaattgcaaacggaattgacatcatccgtatttttgactgcttaaatgatatccgtaacctgcagacagcagttactgcatgtaacaaggaaaaaggtcatgcacaggtagctctttcttacacccttggagatgcttatactctggattactggatggagatggcaaagcgtgtagaggatatgggagctgattctctctgtatcaaggatatggcaggtcttttagttcctgctaaggctacagaacttgtacaggcactgaaggattctacctctcttccggtagaacttcatacccattatacttccggtgtagcttccatgacatatatgaaggcagtagaggccggtgtagatatcattgatactgcaatgtctccatttgctcttggaaccagccagcctgcaacagaggttatggtagaggctttcaagaacacaccatacgataccggtcttgatctgaatctgttaagtgagatcgcagattacttccgtccgttacgtgaagaggcacttgcaagcggtctgatgaacccgaaggtacttggtgtaaacatcaacactcttcgttatcaggtaccgggtggtatgctttccaacctgatttcccagctcaaggagcagggaaaagaggacaagtacgaggaagtgcttgcagaggttccgcgtgtgcgtaaagaccttggtgagccaccgcttgttactccgtcttcccagatcgttggtacacaggctgtatttaacgtattgatgggagagcgttataaagtcgcaacaaaggagacaaaggatattcttcttggtaagtacggccagaccgttaaaccattcaatccggaagttgttgacaaggttctcggagaggataaaaagaatgcaatcacctgtcgtccggcagatcttcttgagccggagcttggtaagattgaagctgagatgaaacagtacaagcagcaggatgaggatgtattatcctatgcattgttcccacaggttgctactgatttcttcaaataccgtgaggcacagcagactggcgtagacgcaaagactgctgatacaaagaacggagcatatccggtatagtcatatccggtttctacgaaaaagacgcatcagatctggtgcgtctttttttgatgggaaaaattctttttgcatgaaatcttgcattttccggttaaagtgatacaatcaaaagtgctgtttgtgacacagcgtttatggaataaagaggagaatatgatgtcaaataccaatgatctgttaaaccggatcaataattgttacagttcgatgagcaagggacagaaactgcttgcaacttatattacagataattatgataaagcggtatttttaacggccgcaaagatgggggagacggttggtgtcagtgagtcgaccgttgtacgttttgcaacgtatctgggatacaaaggatatccggaatttcagcgtgccttagaagaactggtgcgcaataaattaaactccgtacagcgcatggaggtaacctacggaagaatcagccagtcgaagattttagagacagttttatcggcagacgcggacaagatcaaaacgacactggaaaaaattgatcacagtgcgtttgaggtggccgtctcgacaatccttgaggcaaaaaatatttatattgtcgggatcagaagctgtgcgccgcttgcaagttttctcggattttatctgaatctgatgtttgataatgtgcgtctgcttacgacaaacagttcgagtgaactgtttgaacagatggtaagaatcggggaaaatgacgttattatcggaatcagtttcccacgatattccatgcggacattaaaggcattggaatttgcaaataaccggagtgcaaaagtaattacaattactgacagcatacattcaccgatgaatctgtattcttcctgcaatctcattgcggacagtgatatggcatccattgtggattcccttgtcgcaccgctttccgttatcaatgcgctggtagtggctctgtgcatgaagaaacagaaagaagtggcgggaacactgacgatgttagaagacatctgggatgagtatcaggtatatgaaaacgatgagatcaattatattgatgattcgattaaggtacattatgcaaaattaggggatatcgataatgagtaaagtaatcgtgatcggtggaggaccggcgggaatgatggctgcgtatgcggcagcggagagcggacatgcagtgacgcttttagaacagaatgaaaaactcgggaaaaagctgtttattacgggaaaagggcgctgcaatctgacgaatgccagtgatatggaacagctgtttgccaatgtagtcagcaaccgtaaatttttatacagtgctttttactcctatgacaatgagcaggtggtttctttttttgagagtcatggaatgcctacaaaaacagagcgtgggaaccgggtatttcccgtgtcggatcattcttccgatgtgattgcggcgttatccaccgcattgcgggggcagcatgtggaagtattcctgcatacaaaggtaaagcgtctgctgcttgaaaagagggatgaagaaaagcgtgttaccggtgttgagctggctgatcatacaaaaatgcatgcggacgcagtgattgttgcaaccggaggaatttcctatccttcaacaggggcaacgggggacggttaccgcatggcagaagagagcggacataagatggtatcgccgactccggcactggttccgatggaaatgaaagaaccgtgggtcagggatctgcagggcctttcgctgcgcaatgtccgtatgtcggttacccggggaaagaaaaaactgtatgaggattttggagagatgctttttacgcatttcggcgtcagcggtccgctggtattgtcggcaagcggatgtatcccggcaaaagcatttgaccaggagctttccatgacgattgatctgaaaccggcactggatgtggaacagcttgatcaccggatcttaagggaatttgatgaaatgaaaaataagcagtttaaaaattctctggggcatttgctcccggcaaaaatgatacccgttatgattgcgttatcaggcattgatccggatacaaaggtgaatgaaatatccagggaacagagacagaatctgttacatctgtttaaaaatatgccgcttacaattacagggcttcgcgattttaaagaggcaattataacaaagggcggtgtttccgtgaaagatatcaatccttccacgatggagtcaaaacttgtgcaggggctgtatttctgcggcgaggtgctggatctggatgcacttaccggtggctataatcttcagattgcctggtccaccggacacctggcgggaatatccgttttgtaatttcaaagataaataatttattttaaaggagaatagaaaatggcatttaatattgcaattgatggaccggcaggagccggaaaaagtacaatcgccaaaaaacttgcggcggatctggggtatgtgtatgtggataccggtgcaatgtaccgcgcgatggcatattattttttacagaatcatatcgatgcttccgatgagcaggcgattgcggctgcctgtccgaaggtagacgtgaccattcagtatacgggcggagaacagcaggtgatcttaaacaaagagaacgtaaacggcgttatccggaaagaggaagtcggcaacatggccagcgcgaccagtgtttatccagtggttcgtacaaaactggtagaattgcagaggcagcttgccgcaaaggaaaatgtgattatggatggaagagatatcggtacggttgtccttccggatgccaatgtaaaaatttatctcactgcaagctcgaaagtgcgggcaaagcgccgctttgatgagttgacagcaaaaggtgtatcctgtgatatggatgcgatagaaaaagatattattgagcgcgattaccgggatatgcaccgggaaacttctccgttaaaacaggcggaggatgctgtccttttagactcatcggatctggatattgacggcgttgttgaagaaatgaaaaaaataatcaagaaggcggaatagacaaaaatgaagctgacgattgcaaaaagtgccgggtattgcttcggcgtgaaacgggcagtaaatatggtatatcaggaagcagaagaggcaaaagttccggtatatacgtatgggccgatcattcacaatgaagaagtagtcagggaccttaaacagcgtggagttcatgtggtcagggagctcaaagaacttgagaatcttccaaaaggaaagattatcatccgttcacacggtatcagccgcagagaacatgaagcaatgaaggcatgcggatttgaagtgctggatgcaacctgtccgtttgtcctgaaaattcaccggcttgtggagaagtacagcaaagaagggtaccgaattgtgattgccggaaacgaacatcacccggaagtggaaggaattctcggatgggtggaaggacagcctgcctatacggtcacaagtcaggaagatattgaaaaattaccgttaaaagagggagaaaaagtctgtctggtggcacagacgacatttaactacaataaatttcaagaattagttgaaattataaagaaaaaaggttatgatataagtgttttagatacaatctgcaatgcaacggaggaaagacagacggaagcacgcaaaattgctgcggagtcggatctcatgattgtcattggtgacaagcatagctccaatacgcaaaaattgtatgaaatatctaaaaaggaatgtgcaaatacttactatatacaaacgagtaaagatatggattatcatcagatacaatccatcaataacgtaggtattaccgcaggggcttcaaccccaaacaatatcatcgaggaggtttcaaagaatgtcagaaatgagctttgaacaaatgttggaagaatctttaaaaacaataagaaatggagaagtggtagagggtaccgttattgatgttaagccagatgaaatcatcctgaatatcggctacaaatcagatggaatcattacacgtaatgaatatacaaacgagccaaatgtagaccttactacagtcgtaaaagccggcgataccttagaagccaaagttgtaaaagtaaacgatggtgagggacaggttctcctttcttacaagcgtctcgcagcagagaagggaaacaagagattagaggaagcattcgaaaatcaggaaattttaaaggcaaaagtcagccaggtacttaccggtggtgtatgtgtcaatgtagatgagacaagagtatttatcccggcaagccttgtatctgacacatatgagaaagacttaagcaagttcaaggatcaggaaatcgagtttgttatcacagagtttgatcctagaaagagaagaatcattggtaaccgcaagactttattacttgcaaagaaggcagagcttcagaaagaactgtttgcaaagatcaaagtcggcgatgtaatcgaaggaactgtaaagaatgttacagatttcggtgcattcatcgacctgggcggagtagacggattacttcatatctcagagatgtcatggggcagagttgagaatcctaagaaagtatttactgttggacagaaagttcgcgtatttatcaagaatattacagataccaagattgcactcagcatgaaatttgaggatgagaatccttggaatggtgctgcagagaagtatgccgttggcaacgtggtaaaaggaaaagttgcacgtatgacagattttggtgcattcgtagagcttgctcctggtgttgatgcattacttcacgtatcacagatctcccaggaacacgtagagaagccttctgatgtattaaagattggtcaggaagttgaagcaaagatcgtagacttcaacgaagaagaaaagaagatcagcttaagcattaaggctcttgcagctccggctgaagatgctgagacagaggaataattcactgtaaattttcataggtaagaagttgccttcgggcagcttcttattgtttataggggggtaaaagtctatgtttgacaattatgaaaaattcaaaaaagacgtctatgctctgacaaaaatcgatctgaattattacaaagaaaaacagatgcgcagacgaattgatacgattgcgacaaagcatggttgtagcaattatgatgagtatatccgtgtgctgaagacagacaaggacaaatttgaggcatttgtcaattttcttacaatcaatgtctctgagttttaccgtaatccggatcagtggaagctgatggatgagaatgttattccgaaacttatcaaacagcatggaaaaaatctgcatgtgtggagtgcagcctgttcgacaggagatgaaccgtattctcttgtcatggcattatccaaacatattccgctttccaacattcatattacggcaaccgatctggacaaacaggttcttcagaaagcgcaggttggtctgtacaatgaaaagagcattgcaaatgtgccgccggaatttaaacgcaagtattttaaacagatcggaaaatcatttcagatttcggatgaaatcaagcgttgcgtgacatttaaagaacataatctgttaaaagatccgtatccaagggattttgatatgattctttgcagaaatgtggttatctattttacagatgatgcgaaagatatgatttatcaaaacttccatcagtcactgaagagtcatggggttttatttatcggaagtacagaacagattaccaattataaagaacttggatttgacagactcagcagtttttattttgaaaagaatgtttaaaccaataaaaatgcatgtttttatgcctgaaacataagaacatgcatttttgcagtcttaaattattatttttttcccatcatattttttaagatgtgatcaatatagcggcgcaacatgatatcagaggtacaaaaatcatccgtcatctcaaaataactgattttatccttatactctttacggaactccggttgcataacattgttgtattgcggaagaaatttgccggatttgcgcgtataacagttacttgcttttgcattttcccggtattctttgtctacaaatgaggcaacacttttgtgtattgccatatcttcttttttcagataatagtaatccctgtaattggaataaaaataatgcagttcaccttcgtagaccggaatacgaagagaagtgcggttttttccgatcatcagataaaaacaatcctgtttacaggaaagctggcgcggaacgggatagtcgttttgcatggtgatgatccattcctccccttcggttccgtcatatgtgtggtaatggtcgatccggtgggagaggatggtgtactgaccgtttaatacttccagataagataaaacagagagcagatcaatcatgtgcagaacatcttcgtaattatgaatacgaagaagatgcatcgtttcttctgtcggatgtttcacatgcgtgaaatatacatggatcagatcctctcccgtcttttcgtcttctcttttaagacccagaaaggattctatggttttttgcttatagttttcaagtttcaataaaaatttgatcgaagaaaccgatttaaatatatccaggtattcaaaatcccgaaaatgttccggaaacttataatggtctgcttttgccttcaggtaaggaatgtcgaatcccacaccgttaaacgtaatgatggtggtatatggtgacagcatctgaaaaaatgcggcgaggatttcagcttcttcttccggtttttcagcaaaaaactggtcaatacagatccggttgcttttgcgtctggcacatccaatcatatagagtgtggaagctgcaggtgaaaacccggtagtttctatgtcaaaaaatatagagtgttcatcaaaaagctggtcggtgagagcgtcctgacagagatcggggatttcttcatgaaacgttttcataaattctcctttatataatgtttggattttgtctgtgtgtctggattataccataaatctcatttttcgtcatgtttctttgtattaaaaagaatacaaaatattcagaaaaaattaaaaattttactacatatatggttaaaaagtgctataatttaatgtgaattatgttataaactatatggtttagacaaaaaaataaggaaagagggcacaaggatgggtttgaaaacatttataggcggcgtacatccctatgaaggcaaagaacttgccaaggatgcgccaatcaaagaagttctacccaaaggagaactggtttttccattgtcacagcatattggtgcaccagccactccaattgtcgctgtaggggatagcgtaaagaaagggcagaagattgcagaagccggcggctttgtatcttctccgatttattcttcggtatccggtacagtgaagaaaattgaaccacggcgtgtggcagtcggtgatatggtgaattccattgtaatcgagagtgacgatcagtttacggagtgtgagtattcaccggtggatgatgtgacatccttatccagggagaaaatcattgaacggattaaggaggccggtgtggttggtatgggaggcgcaggtttcccgacacatgtaaaactgtctccgaaagagccggaaaaaatcgagtatatcattgcaaactgcgcggaatgcgagccatatctgactgcagattaccgcagaatgatcgaaactccggaagatctggttgcaggtatgaagatcatactgcagctgtttgaccatgcaaaaggtgtgtttggcgtcgaaaataacaaaccggatgcaattgcaaaactaaaggaactgattaaggatgagccccggatggaggtctgtgaattgctgacaaagtatccgcagggaggagagcgtcagctgatctacgcagtgaccggacgcgaaatcaattccaaaatgcttcctgcagatgcaggctgtatcgtggacaacgtagaaaccatgattgcaatcaagcatgcagtaaaagatggagtgcctgtgatgaagcgaattgctacaatcaccggagacgcaattaccaccccgtcaaactttttgtacagtatgggtacaccatacgagcagctggtggaagctgccggaggatttaaagtacagccggagaaactggtatccggcggtcctatgatgggatttgccatttttggactggatgttcctaccacaaagacgacttcttctctgttatgtcttggaaaagatgaggtggcagagtttgaaccgctcgcatgcatcagctgtggccggtgtgtggaagcgtgtccggaaaaactgattccaagcaggcttgcaaagttcagtgagcacggacaaaaggatgagtttgaacgctggcatggattagagtgcatcgagtgcggaagctgcagttatgtatgtccttcccgcagacaggtggcacagtccgtcaagacaatgaagaaactcgtattagcagataagagaaagaaaaaataagagaaagaggtggattgttgtgagtgagaaatatcaggtttcgtcttcaccacatgtgcgtgccaaggactccacaagcagagttatgctgtatgtgatcatcgcgttgctgccggcaaccctgtttggtatctggaattttggaatgcatgcattacttttgattttagttaccatcgcaagctgtctggcttccgaatggatttttgataagatcgtacataaaaaaaacagcctgccggatctgagtgcggttgtcaccggacttcttctggcactgaacctgccggcaggacttccatggtgggaggctgtgattggcagtgtatttgccattgtcattgtaaagatgatgtttggcggactgggacaaaacttcatgaacccggcactgggtggaagatgttttctgctgattgcttttgccgcagacatgacaaatttcaagagttctaagtttgaggcatattccggggcaacaccgcttgccatgatcagaaatgaaggactttcttccgtcaatgtcatggatatgctgacaggaaagattccgggaaccatcggtgagacatccgtgatcgcaatcctgattggtgcgatgatcctgattcttctgggcgttatcacattacggattccggctgcttacctgattacatttgcggtatttatgctgatctttggcaaggaaccgatgaatgccaattatctggttgcagaactgtgcggtggtggtctgatgcttggtgcattctttatggcaaccgattatgtgacttcaccgattacaccggccggtcagattatttacggtatctgctgtggtctgttaaccggtattttccgctgtttcggagcaaatgcagagggtgtttcttttgcaatcatcctgagcaatattttagtaccgattattgagaagtttacaattccgagagcttttggactggcaaaggaggcaaagaagaatgaataaacagattatacatgacgctttggttttgacagcctttacccttgtgatcggcgtgattttaggagctgtatatggaattacaaagactccgattgacaaagccaatgagcagaccaaaaaagaagcgtatcaggcagtgtttgcagatgcctccgggttcaaccagcaggagtatgatgcggatgccgcagacaaaatggttgcagatgcaggatatgacgatacgattgacgatgtcgagcaggccgtagataaggatggcaatgcactgggatatgtcattaccgttactgcaaaagacggaagtcagggaagtattacattttccgttggtatcaaaaatgatggaaccgtcaacggatattcgattaccgatatttccgagacaccgggacttggtatgaaagcagaagaggaagatttctacagccagtttgaaaacaaaacggtagacaagtttacggttgtaaaacaaaaaccggcatcggatgatcagattgaggcaattaccggatctaccattacttcaaaggcaatggcaaatggctgtaatgctgccatctattacttccagaatgcgttaggaggtgctcagtaatgaacaagtatgtagaacgtttgtacaatggtgtgatcaaagagaatcctacctttgtcctgatgcttggtatgtgtccgacacttgcggttacatcttcagcgatcaacggacttggtatgggactctctacccttgtggtactggtattttccaaccttttgatttcactgttccgtaaggtgattccaaacggcgtgcgtatgccggcctatatcgtgattgtggcatcacttgttacggtcgtacagtttctgatgcaggcatatcttccaagcctttctaaggcacttggtgtgtatattccactgatcgttgtaaactgtatcattcttggccgtgcagaaagctatgcatccaagaatggaccaatcgaatctatttttgatggaattggtatgggacttggatttaccatgggtctgactatcatcggactgatccgtgagatccttggtgccggaacctttttcggacttccgttcctttccgcaatcaaaggatttactccgatcacgattttcatcatggcaccgggagcattccttgtactggcattccttgtagccggaatgaatattatccgtaaaaagatggaagcaaagggcaaaccgcttgcagagccggcaggatgtttatccggagactgtgcacactgtggtcagtccgcactttgtacaggaaagagtgcaggagcttctgatcaggaacaggcataaggagggagagagacgatgagtacattagctgaactggttttgatcgcggtaggttctgcgatcgtaaacaacgtagtattgagtcagttccttggtatctgtccgttccttggtgtatccaagaaaacagagacagctgctggtatgggaggcgccgtaattttcgttattacgatctcttctttcattaccggactgatctataaatttattctggccaatccgtttctcgtgaaaaagggaattgatctgacctatttaaagaccattgtatttattctggttattgcagcactggtacagtttgtagaaatgtttttaaagaagagcatgccatcactgtatcagtcactgggtgtttacctgccgctgattaccacaaactgtgcggtacttggtgtagccttaaactgtgttacttatgattacaatctcttagagggtgttgtttacggattttccacagcatttggtttctttatcgcaatcgtattgatggcgggaatccgtgaaaaaattgagtacaatgatatcccgaagacatttaggggtacagcgattgttctgatcactgcctgcctgatgtccattgcctttatgggattctcaggaatgatttaggagggaaaagacgtatgataactggaattattgtcgcagctgttgttgtcggctgcgtaggaattattcttggatttttccttggaatcgccggagaaaagttcaaggtagagactgatccgagagaggatgcgatcttagaagttctcccgggaaataactgtggtggctgtggatatgccggatgttccggacttgctgcggcaatcgcaaagggagaggcgccggtcaatcagtgtccggtcggtggagagccggttgccgcaaaggttggcgagatcatgggtgtttctgccggggcttcggtaaaaaaagtcgcttttgtcaagtgtgccggaacctgtgagaaagcaaaacaggattacgagtataccggagtggaagattgtgcggcaatggcatttgttccaaatggcggaccaaagtcctgcaattatggatgtctgggatttggaaattgtgtgaaagcatgtccgtttgatgcgatccatgtcgtagatggtattgcaaaagtcgatccgaaggtctgcaaggcctgcggaaaatgtgtggctgcatgtccgaagcatctgattgaacttgtaccatatgaggcaatgcacctcgtacagtgcagttccaaagacaagggcaaggatgtcatgagtgcatgttccgttggatgtatcggctgtcatctctgtgagaagaactgtccgtccgatgcgattcatgtggtagacaacattgcatacatcgatcaggaaaaatgtacaggctgcggaatctgtgcagaaaagtgtccgaaaaagattattttataacaagaaataaccccatgcagggtcagcctgcatggggtatttttatgcagagtttttcagaacacgaaaatcaggaggcatgaaactgtatggaatcatcccggttgattccggaactgcatgtaattgttccgtcatcggagacaaagatggcttccacgccatcggtctgttccaccagctgcattcccttttttaatccgagggaaaaacaggttgtgctgagtgcatccccgtccatggagatgtcactgatgatggttacctgatagagatggttctcgaccggatatccggtcgaggtgtctaaaatatggtgatacagtttgccgttgacccggtaatagcgctcataaataccggaagaaacaaccgaagcatcggatacgtttaaggtgccaagtgacgtaccggtttcggaaaatggtttctggataccaatggtataggaagagtgatctgcctttttcccaagagtcaggacatttcccccaaggctgatcacgccggaggtgattccttttttgttcaggaaacttcgcatttcatccgcaatgaaacctttcgcaattccgccaaggtcaattttggcctgcggatctttcaaccgcacctgatttcctttgatctcaatatttttatagttgacatgtgccagtgccgcttcaattttttccggggaagggacaaccgatgcatcgacttcgttctcatcggattttgcggtttctgcaatctctgaaaaattccacagatccgagagggtaccgatggtaatatcaaatgttccatcactgatttttccataccggataccatctttgatcagggagagggtatcgctgctgactgtcacaaactggctgtttgcctcgttaatctttgaaacttcactgtctgtgatggtgtttgaaagtttcttttcgtagtttcctgccagggaaaagcaatcatccaatatcttttcatcacgggttccatagagggtaaccgtgatcatcgtatcaaaataaaatcccgttttggatattttcccggaattggcagagcagccacaaaaaagtgatgcaataaggcaaagaagcgttgtgggcaacagaatgtatctgatgtatttttgttgtttcataaaaatcctctccgtaaaattttatacagattaatatactccattttatggcaggcggcaagctttgttgttttttttcggaagatatggtaaagtatttaaaggtatgcataagtaaagaaaatcgaggaataaagtacaatggacagtaaactgaattataaacgtatcgtgatcaaaatcggttcttcctctctgacgcacgcagagaccggccgtttaaatcttgccaaaatggaacacctggtcaggcagctgagtgatctgcacaatcagggaatggatgtctgtctggtaagctccggtgcgattgccgtgggaagggctgccatgggcgtgaaggaacgtccgtccgagacatcggtaaagcaggcgtgtgcggctgtgggacaggcaaaactgatgatggtttaccagaaactgtttgcggaatattcacagaccgcagggcagattctgctgacaaaaaatacaatggtaaatccggtatcccgtgcgaatgcaaagaatacatttgacgaactgttccatctcggggtgatcccggtcgtgaatgagaacgatacggtcagtacctatgagatgcagtttggtgacaatgatacgctgtcggcactggtcgcttccatggtgggggcagatcttttgatcctgctttccgatattgacggactttatacagatgatccgcacaaaaacccggaggcaaggctgcttaaagtcgtagatgctattgatgaaaacatttatggaatggcaaaagaatctaccggcagcaatgtcggaaccggcgggatggcgacaaaacttgctgcagcaaagattgcaacattatccggaacggatatgatcattgcaaatggcggggatgtccgcatcctgcaggatattttcgaaaatgattatgtgggaacgttatttacggctaatgaaaatgcaaactttaaccttgcaaattatattatggagacaataggctgatgacaaacgaaaaaattgcacgcatcaatgaattatacaaaaaatccaaagcagaaggattgagcgaagaagaaaagaaggaacaggcactgctgcgtcaggaatatgtcgcttcggtaaaggcaaatctgcgcaatcagcttaacaatattgacatgatgaatgcagatggatctgtggaaaatcttggagaaaaatatggatcaaaaacaagaacttcgtaaacggatgaaggaaaagagagaccggatttctccgcaggagaggcggcagaagagcgcaaaaatctgtgagcggctgctgtcggcaccggaatatgccagatttcagaaaattctggtttatgccgcgattagaagcgaagtcgaattgcagcttttctgcgatcaggcacttcgggacagaaaacagatttttttcccgaaggtgtgtgggaaggaaatggagttttaccggattgagaatcccggacagttaaaaaagggaatgttttctgtcccggaaccggatgtcaaacaatatccgctttcttcttttgcagagaatggggaggcatggattcttgtccccggtgttgcattcgacgaaaaggggatgcggctcggatacggaggaggattttacgatcgttacctgaagcagaaagaaaatctgcacaggacaggaattgcgtttggagaacagatcgtcaaaagaattccaacggaaatacatgatcatcctatggatgatgtgatcacagaacaacaatggtatcgtccgaaacggacaacaggaggagaatgacaatggatgcaaaactgcaggaactgtgccggcaggcacatgaagaccggatcagggttggaatgctggataccgatacaaaaaacagaacactcgaactggctgcggacgcgcttatggcacatgagcaggaaattttagaggccaatgcaatagatatggagcggggacgtgagcgcaatatgccacagggacttttagaccgcctgaagctggatcatgaccgtcttcttggaatggcagacggactccggcaggtggcaaaactggaagatcccatcggggaagtgatgtccatgcgaaaacggccgaacggactgatcattggaaaagtgcgtgtagccatcggtgtcgttggcattatctttgaggcccgcccgaatgttacttctgatgcgttcggtctgtgttttaagtccggaaactgtgcaattttaaagggtggaagcgatgccatccattcgaacattgcgattgtttctgccatgcaggaggcacttcgcaggatgaatattccaaaaggggcactcagtctgatcgagagcacagatcgggaaaccaccaatgcgtttatgaaaatgaaggattatgtggatctgctgattccaagaggcggcaggggactgatccagagtgtggtaaataatgcgacgattccggttattgaaaccggaaccggaaactgtcatgtttatgtggatcagtttgctgatcaggagatggcggtcaatatcattaaaaatgcaaagacacagcggatcggtgtatgcaatgcctgcgaatccattgtggtgcaccgggcaattgcaaaagagtttcttccaaagctgtatgcagcattaaaagagtatgatgtggagatgcgcggtgattcctatgccgtcgaatgtctgggaccggatcagccactggtaaaagatgcgacagaagaagactggggaacggagtatctggattatattatgtcggtaaagattgtagacagcctggacgaggcaatcgcgcatatcaataagtacaatacctcccattccgaggcgattataaccaaaaattatgatgtggcacagagatttttaaatgaaattgattctgcctgtgtctatgtgaatgcatccacccgtttttccgatggaaatgaatttggtcttggcgcagagatcggaatcagcacacagaaattacatgccagaggtccgatggggcttgaggcacttaccagttataaatatattatttatggaaacggtcaggttcgtccataaaagaagagcaggaaaataagaggattttatgagagatttagaaataaatggattaaccggggaagaagaaaccagacggcagtacgaatacatagaaaaagccagacagtatgtggcacaaaaggaaaaagaagcggggcgcaaactgacctgctgtgtccatacgtttgggtgtcagatgaatgcgagggactcggagaaacttttaggaatcctgacggacatcggttatgtggagacagaggatgagcacgcggattttgtgatttacaatacctgtacggtgcgtgaaaatgcaaacaataaggtgtatggacgcctggggtatctgtcaaactttaaaaagaaaaatccgcatatgatgatagcactctgtggctgtatgatgcaggagccgacggtagtggagaagatccgcaaatcctaccgttttgtggatctggtatttgggacacataatatttataaatttgcggaacttttatgcaatcgtatggaatcggattccatgatcattgatatatggaaggatacggataaaatcgtggaagatcttccaatccggcggaagttttcttttaaatccggtgtcaatatcatgttcggatgtaataatttctgcagttactgtatcgttccttatgtcaggggccgcgagcgcagccgggaaccgaaagatatcatccgtgagattgaaggactggtggcagatggtgtgtgtgaagtcatgctgcttggacagaatgttaattcttacgggaaaaatttagagcagccagttacgtttgcagagcttctccgggaagtaaacaagatcgagggattaaagagaatccggtttatgacttctcatccgaaggatctgtcggatgatctgatccttgccatgaaggaatgtgataaggtatgcaagcatatgcatctgccgctgcagtccggaagctcacggattttaaaaatcatgaaccggcattatgataaagaacagtatctgacgattgtaaagaaacttcgggaggcaattccggatattgcgctgacgaccgatattattgtcggattccctggagagacagaagaagatttccaggaaacgcttgaagtggtaaaacaggtggaatatgacagtgcgtttacgtttatatattccaagcggactggcacaccggccgcagccatggaagatcagtgcgatccggacgaagtgaaacggcattttgatctgttgttaaaggaagtacagcagatcagcgcaaagaaagccatggcactggaaggaaaagtgatggaagtgctggcagaggaacagaatacgcaggatgcttccctgattaccggacggctttcaaacaattcggtggtgcattttccgggaaccccggatatgattggaaaactgtttatggtaaaacttacggaatgtaaaggtttttattatctgggagagatcgcagagaatgcatagaaaatttggcaaaaaagatgtgatttttatcggtgtgcttcttggtatctgtcttattgtactgggcgtctggtattttgccggagggaaacagggagctttggtggtggtgacgagagagggagaagtgtatggaacctattccctgtcacagccgcagactgtaaaaattaaaaattccaaaggaaaaaccacgaatgttctggtgatccgcgatggaaaagcagatatgaaagaagcggactgtccggacaaactgtgtgtgcatcagaaagcgatttccgcggaaaatgaaagcattgtctgtctgccaaatcgtgtggtagtgaccgtaacgaattcgaaaaaagaagggatggatggatttgcacagtaaacagctttggagaaaaccagcgtttatgggagtgtttctcgcacttgccatgatctgcagttatatagagatgctgattccctttgattttggaattccgggagtaaaactcggactgacgaatattgtggttgttttaatgctgtattcgattggaacgaaggaggcattttgtgtctctgtcataagaattttccttgtcggcattttgtttggcaatctgatcggaattttgtattccttaggcgggggaatcctcagttttcttgtgatggcactcttaaaaaaaggaaaccacctgggctgtatttccgtcagtgtggccggaggaattgctcataacatcgggcagatccttatagcggcgcttgttgtgtccagccattatgtgttgtattattttccggtacttctgattgccggacttcttacgggatttctgatcgggcttcttgcacaggaactgatcgtgcgtctgcgttttctgaccgaaaaatatcacgagtagaacatctgtttgcataattgtatctgctgtgttatgataaataccgtgaacgaacgaaaatgaggagaatgttttatgtacgcatatatcaaaggtgagcttgcagaaaccaatccggatcatattgtgatagagaccgggggaatcggatatcaggtatttatttcaggacagacgtttgagtatcttccggcagtcggtgaggagattaaagtgtatacgtatctgtatctgcgcgaggatgccatgattctctatggtttcctgaccaaagacgatctggagcttttcaaacttctgatttctgtcagcggaattggtccaaagggaggacttgcaattctttctgcgctcagcgcagatgatctgcggtttgcggtattgtcaggagattccaaggcaatctcgaaagctccgggagtaggagccaagacagcccagcgtgtgattttagaattaaaagataagatgtctttggaagatgcttttgaaaagaagagtgagcatgtacagactttaaagatttccggaaatggtcaggtcagaaatgatgcggttatggcacttacggcactgggatattcctcggcggaaagtttaaaggctgtatccgcggtggagatcacagaagaaatggatgtggaagcagtgctgaaggcagcactgaaacatatgtcgttgttgtagtttcgagaaagaagatttggtatggaaaaacgcgtgatttccacgcagctgcaggaagaagattataagattgaatcgtcccttcgtccgcagaggctggaggattacattggacaggaaaaaataaaatcaaatatgaaagtctacattgaggcggcaaaagcccggcaggagtctttggaccatgtactgttttatggaccaccgggacttggaaagacaacgcttgcagggatcattgcaaacgagatgggtacccacctgaaagtgacctcgggacctgcaattgcaaaaccgggagagatggcggcgatcctgaataaccttgcagaaggtgacattttgtttgtggacgaaattcaccggctgaaccgtcaggtggaggaagtgctgtatccggcaatggaagattatgtgattgacgtgatgatcggaaaaggagaatctgcccgttccatccggctgaatcttccgaagtttacgcttgtcggggctacgacacgggccggaatgctttcggcaccgcttcgtgaccgttttggtgtcgtcagccacatggaatattatacggtggaggaacttcgcacgattattttgcagtcggcacaggtactggatgtggaaattgatgaaaaaggcgcttacgagcttgcccgccgttccaggggaactccccgtctggcaaaccgtctgctcaagcgggtgcgtgattttgcccaggtaaagtatgacgggaagattacctatgaggtggcggcgtttgcactggatctgcttgaggtagataagatgggactggatcagaacgacaggaacattatcctgacaattatcgacaagtttgacggcggtccggtgggacttgatacgctggcagcttcgcttggtgaggattccggaaccatcgaagatgtttatgaaccgtatctggtcaaaaatgatttcatcaaccggacaccgaaggggcgcgttgcaacggcatttgcctatgaacatttcgggaggacaccaaaatccgaataagaggttgcttttcctactgcggaatattataataaaaaatatgacagcaaagaggatggtccaaaacgggaggataggttatgtcagcaaagacaagtgcggaagtggtaattgatggaaaggtatatacgttaagcggctatgaaggagaggaatatctccagaaagtagcttcttatattaacggaaagatcaatgagtttacttccattgaagaataccggcacattcctctcaatatgaaaaatacactgatccagctgaatattgcggatgattattttaaagcaaaggatcaggtggaaaaattagaacgggaccttgaaaataaagaaaaagaaatttacgatttaaagcacgatctgatctctaatcaggtaaagacggagacggcagaagaatcattgaagaaactggaacgggacaataaagaacttctcctgaacaaggcgcggttagaggcagcacttgaggacaagcttctggatggaaaagacagcccgaaagagtctgaaaaagagaacacaaagaaaaaataagaggtttcgaaacacaaaggaaggtattcctttgtgttttttcatcataaggaaagaatatgaaagaaaacaatcatacgacacaacaaaatacatttgaactgcttgcaccggctggatcgttagccatttttaaggcggttgtcgcggccggtgcagatgccgtttacgtggggggaagcaaatttggagcccgcgcatatgcagataatttttccgatgaagaattactagaagcattggactatgcacatttgtatggacgcagggtttatcttacggtcaacacgcttttaaaaaacagtgagatcgaacaggtctgtgcgtatctgcagccgttttatgaacacggtctcgatgcggttcttgtacaggattttggagtcctgacagcgatccacgagagatttccggatcttgcgattcatacaagtacgcagatgacagtcaccggtgtggaggcggcccggcttttttccggatacggagtgacccgtatggtcatggcacgggaactttccctgaatgaaatgaaacggatccgtgaagagaccggtatggaactggaagcatttgtacacggggcgctgtgttactgttattccggacagtgtctgtttagcagtatgcttggaggaagaagcggaaaccgcggcagatgtgcgcagccatgcaggcttccttacgcagtgctggatgaaaagcacagggaatacaaaaaagatgcttatgtcttaagcctcaaggatatgtgtggaataaaggatctgcgtgggctggcagatgcaggagtctattccttgaaaattgagggacgcatgaaacagatcccgtatgctgccggtgtggtttcttattaccgcaaatatatcgacctctttttatcgggacaggagacacagatttcggaagaagattaccgggcagtgcttgcactgggaaaccgctgtggatttaccgacggatattaccacaggcacaatggttctgatatggtgacgtttacaaagccaaattacgaaaaaacgaatgaagccctgcagcagcaaattttaagaacctatgaaaatggtgctgccaaaatccctgtccggggagagctggttttgcatcagggacaggctgcatattaccgggtaaagacgcaaacggtgtctgtggagatttccggcatggaagttatgcaggcgcaaaagaaacctcttctggcagaagacgtaaaaagccgtatggaaaagacgggggataccccgtttgttatggaagagttgtccataaaaatagaggacggagtgtttcttccaaacggagcactcaatcagctgcgcagggaggcattggcagaactgcaaaaaaagatgctgaaaccttaccagagacaggagcatccgcagaaggcggcaggggaaaaacttccggaggcatgtgagaaacgggaaaaacgaaaggaatgtgtttttgcagtgaccggggagcgcagacagcttgcaccggttctgggaagttcctgtgtcacttctgtctgtctggacatggaagcttatgaccgaagcacaattatggaagaattaaaagaagatgcaaatgctgttatgcaaaaggataaagaggtttatctggcgatgccgcgtatcttccgtgccggaacggcagaatgggtgcggcagatacttccggatataaaaagaatgggatttgccggagttcttgtgagaaattatgaagaactggcattggcaaaggaaacattttggggaagtgaaatcataacggatcacaatctgtattgctataacgatcaggcggtccgtgcatttgccgggcagggagtgacaaaaaatacggttccgctggaactaaaccgcagcgaaataaaacggagatataacgaagaaagtatgatgatgctttacggatattatccgcttatgacaagtgcacagtgcgtacatgccaataccagaggctgtgacaaaaaacgggggctttcttatctgaaagaccggtatcaggtacagtttccggtaaaaaatttctgcacgtactgctataatgttgtttataattccctgccggttttattattttccaatttagaggaattaaaaaaagcaggcatccgtgatttccggatggattttaccatggaatctgcaaaagaaaccaaagcaattctgaaattatatgaagagtttgcagacggcagccgcagacagtatccgaaagaatgggaaaaccgttataccaacggacactataaaagaggagtggaataatgatccatctgattgttcaggcttcaaaatatctgatgatctttttgttcctggtttatacatttgagtgttttcatgtgtttaaatttgagggagaggaagaagaacaaaaacatatttaccatgtgcagagaacactgttgtttctttttcattttgatgcctttcttgttttgtatattacaacaaaaaattttcagctgatcggattttatctcatgcaggtgattatcattgcggcaatcatcggaacatatcatctgttttacaagcatgcatccgagctggttctcaataatatgtgtatgttacttacgattggatttgttatcctgacacgtatttcttttgaaaaggcattccggcagtttatctttgtgtgcgcgggttttgtgatttccctgctgattccaatggtcttgcagaatatgacgctgttccgtaaactgacatgggtgtatgtgatcgtgggtgtcggtgcactgggcgttgttgcgattgccggacagacaagctatggggccaaactgtccctgtcgatcggtcctttgaccatccagccttcggagtttgtaaaaattatttttgtcatgtttattgcatccatgctgtaccagcgccaggattttcatcaggtcatggtgacaagcattttttcggccgtttttgttctgatgctggtagcatccaaagatctcggcggagcccttttgtatttttttacctacctggttatggtttatgtggcgacgcgcagatttgtgtatttcggaggtggaatactggcaatgatcgtggcgagtctgcttgggtaccggctgtttgaccatgtacaggcacgtgtgcaggcatggtcgaatccgcttgcagtcattgacggggcggggtatcaggtatgccagtctctgtttgcaatcggtaccggaggctggtttggacttggtctgggacagggactgccggaaaaaataccggtcgtgacaaaggattttgtttttgcggcaatctcggaagaactcgggggagtctttgcactgtgtctgatcatggtctgtgtcagctgcttttttatgatcatgaatgttgccatgaaacttcgggacaattattatcgtctgacagcggtcggacttggaacactgtatgctttgcaggtgtttctgaccatcggcggggtcatcaaatttattccgtcaaccggagtgacacttccactggtcagctatggaggcagttctctgttatcgactatgattgtgtttggcattatacagggactatacatcatgcagtttgacggccggacgcagaaaaaagaacagaaacgaagaagaggcagaaaagaatgagaagaaaaaagaaaaagataaagaaaagtaataaagaatttcttgttattatgtatctgttcctggcagtgtttctgtctatgatgatttattttgtctattttcaggtatgtaagagtgaatcgtttatcaacagtccgtataattccctgcaggatctgttttcggatcatgtgatccgtggggatattgtatctgcagacggcaaagtacttgccacaacaaaagtatccgcagacggaacacagaccagaagctatccgcagggacgcatgtttgcccatgcagttggttatgcggtgaatggaaaagcgggactggaaaaccaggaaaatttttctttgttgcgttcccatgagtttttccttaagagaatcgcagatgatatttcagataagaaggcacagggggatacggttgtcacgacgctggatgcacagattcagcaggtggcatacaaatctcttggaaattatcagggagctgtgattgttatggaaccggataccggaaaaatcattgcaatggtgtcaaaaccggactatgatcccaatacggtaaaaaaggactggagcagtctgacggcggagggaagcacggtgctttacaatcgcgccacgcagggaaaatatgcgccgggatcggtgtttaagatcttaacgaccctggagtattatcgtgagaatccttctgcctatgaccagtatgcgtttgactgcagtggttctatttcggttgacgggcagaccattcactgtgcgggaaataagcatcacggtcaggaaacattaaagagttccttttctaattcctgcaattcttcgtttgccaatatttcactgtcactgaaccgagagaaatttaaacagacctgtgacagcatgctgtttaatcaaaatcttccgattgcttttgagtccgggaaaagcagtttttctttaaataaaaatgacagcaatgcaatggcgatggaaacgggaattggtcagggaaaaacactggtttcgccactgcatatggcgctgatagcaagtgccgtggatcatgatggaattctgatgcgtccgtatctggtggatcatatacaaaatgattccggggttgaagtaagcagcaataaaccgaaaacttatgcgacactgatgacggagacggaagccggtttgttacagcagtatatgcgtgcagttgttacagatggaacgggaagaaaattatccggacagtcttatgaagcttccggcaaaacaggaacggcgcaggtatcggacacgtcggatcagacaaatgcctggtttgtgggatatgcaaagaaggatggctataaagatatcgcaatcgcagtcgttgtggagaacagtggtgcgggcagtacgtacgcggttccagttgcaaagaacgtatttgacgtatattttaacagatgatatacttgctatgaaaataatgaatgtttgcacatatatgtgcagttttcgcacacgggaggattgcaatgattgaagcaataagctgtggcggagtggtaatctttcgtggcaagattctgcttttgtacaagaattacagaaacagatatgaaggctgggtattgccaaaaggaactgtggagcagggagaagagtataaggatacggcaattcgcgaggttttggaagaaaccggagcaactgcaaccattattcagtatgtgggaaaaagccagtattcatttaccattcctgaggatacggtcgagaaatcggttcactggtatctgatgatgggcgaaagttattatagtaagccgcaaagagaagaatattttacagattccgggtattataaataccatgaagcatatcatttgttgaaattttcgaatgaaaaacagattttggagaaagcttataatgagtatctggatctgaaaaaaagtaacttatggggaacacataagtatttttagaaaggataatctgcatgaaatggtatgaggatctttatgtcggcgattccattgcggacaaagccaatcgaataaagtggaagattaaccatcatgcaggaaccgtctctatctatgtgattgcgtttgcatccaaccggcagaatctgctggatattataccggcgtgggaactgatgcagaaatcttatccggggaaaaaggaaatgcagatcatcggtctggcaaaaggttatgcggaagctctggagctggtgcgcagtattatagaggaagtatatcagaatacaggggatgtggatgtaaaatcttatttacggggccggaaacggaggagacaggtatgagtgttttccttctgattctgaaaatcataggaattgctttgctggtgattttaggactgattgttgtcattgctcttttggcattattttgtccatttgtgtatcgtgtgaaaggttcctaccatgaaaaaaatctgcaactgcaggtccggatctggtggcttggccgtctgctggggctctgtgcagataccgcggaagagggattccacacgtatgtgcggatttttggatttcgaaaggaactgcatctgcagaaagaaaaagaagattccgcggattttaaaaagccggtgcaggaagactctccgcaggaagggataaaagaccgggagactgaagtggcaccgtctcttacggcaatggaaaatacatcccaaacatctgcgcagcaattgacagatccggaggagacaattctctgtcatccggataaaaaaaagaaaacattttttccgggcaggattgcaggttttatccggaagttcccggaaaagatccgcaatattttgcaaaagattctttattttttgagaaatatacagacattctggaaaaaaggaacgcgaacgtgccggaaatggtatcgttttttcaatgacgagaaaaataaaaaagcgttttctaatatctggaaacagctggaacatctgattgtttcagttttgccgaaacggctgaagctttggctgaaatattctaccggatcgccggatactaccgggcaggtgcttggtattcttgcaatatttccggtcggataccggaatcactggaatattattccggattttacggcagaagaattttatgcagaagcagattttacagtacacggcaggattttcggagttcagattcttgctctggcactgcgaataattcttgataagaattgccggagactatataatagatttaagcatatgaagtagaatgggtaaggaggttttaccatggcagataacagttttaataatacagtagaatccttatttaaaggaatggacaactttatcacaacaaagaccgtagtaggagatgcaattcatatcggagatacgattattcttcctctggtagatgtatcttttggtgttgcggcaggagcgttttcacaggaaaagaaaaataacggtgccggaggtatgggtggaaaaatcaatccgagtgcggttcttgtcatccagaatggagtaacaaaacttgtgaatatcaaaaatcaggatggaatgacaaagatccttgacatggttccggattttatcaataaatttacatccggaaaagatacggatgatatcattgacgatgttgtttcggatgatacggacaatgaatagaaaaaacagaatcatataaaaccgggagagcatatattagaaatgatatatgcttttttggtgggaaaaatgaaacgggtatggggatatacattgttctggatgggaatcggaatgctgatcatgttttttgtaggtggcgggctgctgggggttctgctgattgccggaaccatgcttgtttcctatctgttgttttcctgctgattgcggcacaaaaaaagaaccgtcatacaacggttcttatatttgcttactaagctctctcaacttttccggatctaaggcaggaagcacaaacatataacttctgtggtactccgtttaccttacaacttacacgtttgatgtttgatttccaaactctattagatcttctatgagaatggctgacattatttccgtaatgtacacccttttcacaaattgcacactttgccatgattttgcacctccttgcatttcactaagctttttcaagctcacaacataagatatattaacagattccttctgtaaatgcaagaaaaacttataaaaaaatgaaataaattacatttggtttacatttgcaggaaaaatggttataatacgagtaactatgatgtaatacctatgagatggtttacgaatattggaggtacaagtatgaagggacagatagatacccaatatggaaaggttttggtggaagacgatgtcattgccacttacgcaggttctgttgcggtagaatgttttggtattgtcggtatggcagctgttaatatgaaagacggactggtgaagctgctgaaaagggattatctgacacatggtatcagtgtcacaattgaagatgaaaatctgatcaatattgattttcatgtgattgtcgcttacggcgtaagcatttgcacagtttctgacaacctgatcgagactgtaaagtataaagtggagtcatttacgggcatgaagatcaataagatcaatatctacgtcgaaggcgtccgcgtgattgactagggaggataagaaattggagattacaagtatcaatacggagagtttgtccagaatgttccttgcaggtgcaaagaatctggatgcaaaaaaggaatggatcaatgaactgaatgttttcccggttccggatggagataccggtacaaacatgtcaatgacgatcatgtcagcagcacgtgaagtcggtgcgttgtccaatccgacaatgaaagaacttgcaaaagcaatttcttccggttcccttcgtggggcaagaggtaattccggcgttattttatcccagctgttccgcggtttctgtaaagttatcaaagagtatgatgaggtagatgtttctgttttatgtgatgcattccagaaagcggtagaaacagcatacaaagcagttatgaagccaaaagagggaacgattcttaccgttgcaaagggtgcggcagacaaagcgcttgatctggcacaggagacagaggatctggtttatttctgcgatgaagtgatcaaacatgcggagtatgttttaagtcagactccggaaatgcttccggtcttaaagcaggcaggggtagtggattccggcggacagggactggttcaggttttaaagggagcctatgattcccttctcggaaaagaaattgattattccattgaggagactccggcatctgcaggcacggcaaaagtttcagagccggctgagcaggagattaaatatggttactgcacagagtttattattgtattaacacgtccattgtctgaaaaagaagaaaaggaatacaaatcttatctggaatctatcggagattcgattgttgtggtagcagacgatgaggttgtaaagactcacgtacataccaacgatccggggcttgccattcaaaaggcactgacccatggttctcttacaaagatcaagatcgacaatatgcgtgaggaacatcaggaaaagctgattaaggatgccgaaaaagcggctgcccagcagaaggagcaggaggcagagaaagagaaaccccgcaagccaatgggatttattgccgtttccatcggtgagggaatgaatgagattttccgcggactgggagcagactatctgatcgagggtggacagaccatgaatccgagcacagaagacatgcttgcagcgattgatcatgtaaatgcagatcatatctttattctgccaaacaataaaaatatcattatggcggcaaatcaggcagcggagctgacagaggataaagatattattgtacttccgaccaagacaattccacagggaattgtggctctggtaaattatattccggattatactgcggaggaaaataaggaagccatgctggcagaactcgacagtgtaaagaccggtcaggtgacctatgcggttcgtgacactgaaattgatggcatgcagatcagacagaatgactatatgggaattggcgataaggcaattcttgcggtcggcacggatctgaaagagacaaccatgaagatgattgatgcgatggtagatgaggattctgcaattgtcagcatttattatggtgcggatgagacagaagagcatgcacaggaaatcggaaaaatgatcgaagaaaagtatccggatgttgaggtagagatcaactgtggtggtcagccgatttactattttgttatttctgtagaataaaagttactatttatgcagcacagaaacgaataaggagcagatatgcgtcgggattcatcaatcacggaaatcaaaggcattggtgaaaaaacaaaaaaattattcgaaaaaatgggagtatacaccgtaggtgatatactccttcattttcccagaaattatatacagtatccccatccggtgccgatcgatgagatgacagcggaacatatgcagacagaggataagcttgcgattgttgcacggattgagcgtacaccggtaacgagaagtggcagacatatgcaggtgacacttcttgtgattggaagccctggacatcagatccagctgatctggtatcggatgccttatatacggaatacattgacacatggcaaatattttgttttttacggaaatgttcacattaaggatggcaaatttgtgatggaacagccggtggtgtatacgccggaggcctatcaggaaatcgaaaactgttttcttccggtgtatacgctgaccagcgggatcaccaacaatctcatgataaaaacgatgcggcaggcattggatgaggaagaactgcttacggattttcttccgggagaaattcgtacgcgaagggaactgtgtgagtataattatgcggtcaaacagatccactttccggatacgatggaacgtttgatcgaggcgagaaagcggttggtttttgatgagttctttttatttatcatgggcatgcagtaccagaaagaaaagagaaccagacaggaaaaccgctttgtgatggaacatccggagttcgtggaagatctgattcagaagcttccgtatgaactgacgggagcacaaagacgagcattgcatgatgtgacggaaaatatgcagggaccgtatgccatgcagcgcctgattcagggagacgtgggttccggtaaaacgattctggcttttctggcaatggcgtggtgcgcacagaatggatatcagtctgccatcatggcaccgacggaagtacttgcacagcagcattatgaaacattccagaaactctgtgagcagtttggactgcattttccggtaatccttctgacggggtccatgacggcaaaacaaaaacgcagtgcgtatgaacggttagaactgtatgagaatgccctgattgtaggaacgcatgcgctgattcaggaaaaaccgacatatgcaaatcttgcgcttgtgatcacagatgagcagcatcgttttggcgtgcggcagagagaggagtttgcgcaaaaaggggatatgccgcatattcttgttatgagtgcaacaccgattccgcgaacccttgcgatcattatctacggagatatggatatttcggttgtggatgaggtgccggcaagacggcttccgatcaaaaactgtgtggttaatacggcataccggccgaaagcatatgcgtttgttgcagatgaggtgaaaaaaggacatcaggcatatgtgatctgtccgcttgtagaggcaagcgaagagacacagggagaaaatgtaattgattactcgaaaacgcttatggaggaactgccatccggcatccaggtgggcgtgcttcacggaaagatgaagagcagtaaaaaaaatgaaattatgcaggaatttgcggaaaataaaattcaggtgcttgtatccaccacggtagtggaagtgggggttaatgtaccgaatgcaaccgtgatgctgatcgagaatgcggaccgatttggcttagcacagctgcatcagctgcgtggacgtgtgggaagaggagatgcacagtcttattgtattatgatcaatgcctcttcggccaagacggcaaaaaaacgtctggaaatattaaataaatcaaacgacggcttttttattgcgagtgaggatttgaaattacgcggaccgggagattttttcggtatccggcagagtggagatctggtatttgcgctggcggatatttaccaggatgcggcggtgctgcaggaggcttcggaagaagtaaaaacaattcttgaggaagacccggaactgacagaacccggacatcacattctgcaaaagaaaatgatgcagtttcaggaagaacagctttcaaaaatgaatttgtagattccggcaaaagaaaaagcaggtctccgtgacagagacctgcttttttcttttgtacattgggacaagtgggttactggatgttttctcctttgccagccatctgtctttcctgtgcttcgatcatttttttgaccatataaccgccgacagatccattctgttttgcggtaagatcaccgttgtatccgttgctaagtgggactccaagctcatctgcaacttcatacttaaaacgttccaatgatttttttgtacttctgtttgccatgcttttcttcctcctttgcggttgtactttgtggtacgattctagtatatgcgctaagcagaaagcctatgctggaaacttatgtattggatgattccaccagtgtcaggccgctgatgtccggatgaatcgtgagagagtagttcgtatagtatacgacaaatccgggtgcacttccggccggtttttttacattttttttctgaagataatcaatttcaagtttgtcactgtcacgtccgctggaatagtaaccggcaagttttccggcctcttcaaatacgcggtccggcatttctccccctttgttttttacaattacatgggaacccggcatttttttggcgtgaaaccaccagtcatttccggttgcgaatttaaaggtcagttcatcattctgatagttatttttgccgacgtacatgtcatagccatcggatgaaatataatggaaaggtttgcttttgattttctgttttttgccgtgtttgtgttttttgataaaaccgtattccatcaattcctctttgatctgcaccagatcatcggcggagagtgcaatgttcaaagaattctggatggactccagatggtcaatctgcgctttggtttccgcaagctggacttctagagcttcggaagtccgtttcagttttccgtatttatcaaagtatttttgggaattttcacgtgcggtcttttgcggatctaacgggatacggatttctttattgttgtcataaaaattttcacagaccagttcttttgcctggtcctgcagattgtaaccgtatacattgatcagttctccgtacagtttatatttttcccgtttttcggcatctttctgctgtttttgctgtaactggtattttttctggttgcgctctaacgcagttgtgacgatttttcgcaggtctgcggatttctggtggatacggttgtaaatattgcgctcagcatagaaaacttcgagcatctgcgagatgctttccatatgttccatctcataatcctgatacatggtcagttcaattgcagaaaattcgatcggccgtttgtcttttcttacgatcaccggatgaaattcgttgtggcggatttcatcaaaaaaccatgcaatgtggtttgagagatggtggatttcatcatcggtacaggccaaaagagactgatctgcatccatcccagcccggtatgccagttcggatgcaacaagtggactgacaccggtaaatgttgtatagatagctttgcagatggacatcggttttgccttaatggcatcgcagatctgtgtggcatccatagtcatggcattgaatttgtcctcctgtgtggcaggaataaaatatgggcggcccggaagcacttcgcgcagggaacttacggcggaagagacatgcttgatgctgtcgattatggtgccgtcctcatcgcaaaagataatattggaatgttttcccatcaattcaatgacaagggttttgtgacagagatcccccatttcattcaggtgttctatcttcagatggatgatgcgctccatatggggctgggtaatgcttatgatccgcccgtttgcgatatgtttgcgcaaaaccatacaaaatgtaggtgcctgcaggggacttgtcttgttggtgtccgtcagatataaaaaaggaagggaagcgtttgccgaaatggatacgcggaactgtccgctgcttcctttgcatgtcaaaagcagctcgtcattttcgggctgcgcaattttactgatttttgtatttaaaatcgtctggttcagttcatggactaaacctgcgattacgattccgtcaaaagccatggaaattctcctgttcatgattatagtgtttttcaaactcatgaatcattatagtaatttccacgtcttttgtctatatgcagaaagtggatatcttttgtatacattttttgcaagaacatttgacgaaacggcaaagaagcattataatacatttatctatgcatagatatgtgcatgatatttgggagaaagtaaaatgattaaaagcatgaccggatttgggcgctgtgagattgcagatgaaaaacgcaaatttaccgtggaactgaaatccgtaaatcaccggtatcttgatgtaaacatgaagatgccgaaaaagttaaatttttttgagagtgcgatccgcagtctgttaaaaaaatatattgaacgaggcaaagtggatctgtatatttcctatgaggactatacggaggacaattatgcacttaagtataatgagggacttgccggtgagtatttaaaatatctgaatgccatggcagaaacattccatctggaaaatgatgtgcgggtaagcacactgtcccgttatccggatgtctttgttatggaagaacaggaaatggacgaagaagagctctggaatggattgcagaaggcaatctgcggagcatgtgaacaattcgttgagacccgtatccgggaaggcgagaacttaaagaaggatctctgtgagaagttagatgacctgcttgccggagtggatttcattgaggagcgttctccgcagattatgcaggaataccgcagccatctgacggaaaagatccaggaacttttgggagatacccagatcgatgagggaagaattgcgacagaggttacgatctatgcagacaaggtgtgtgtggatgaagaaaccgtgcgtctgcgcagccatattacctcgatgaaggagacactttcagagggcggtccggtaggacgcaaactcgattttattgcacaggagatgaaccgtgaagcaaatacgattctctcaaaggcaaataatattgaaatttcagatgtgggaattaatctgaagaccggaatcgaaaagatccgcgaacagatccaaaatatagaataaaggaagcgcgttatggaacagaaaggaaagttagttgttatttccggattttccggagcgggcaaaggaactctgatgaaagcactgctggcggcacatccggacaggtatgcactgtcggtttccgcaactaccagagatccgagaccgggagaaaaagatggtgtggattatttttttgtgacggacgaaacgtttgattccatgattcagaaggatgattttttagaatatgcaaaatatgtcagccactcttatggaactcctcgttcttatgtggaggaaaatttaaatctcggaaagaatgtaattttagagattgagatacagggagcattaaaagtaaaagaaaaaataaaagatgctgtcctgatgtttgttacggcaccggatgccgggacactgcgtgaccgtctggtcggacgcggtacagagactccggaggtcattgcggcacggcttgcacgtgcatgtgaggaatccgaaggaattgaaaattatgattatttagtggtaaacgatacggtggatcacgcatcggctttgattgatcagctgatctgtgatgagcagtcacaaaataccggaagggatcaggagtatcgggtatctgctaatatagattttattaatcaaatgagagaaaatctcaaaagcttttcgaaaggagaatgaatatgatacatccatcttatgttgaattaatgaaagttgtaaatgacgagggcgaaatcggtgaagaaccggtggtaaacagccgttactccattgttcttgccacagcaaagcgtgcaagacagatcattgccggagcaaaaccactgattgatgatccggtctgcaacaagccgctttccattgccgtggaagagttataccgcggagaagtaaagattgtacctggagaggacgaaaactaagaaataccaaaagggagtgacagctgtcattccctttttcaagtgagaggttatatgaaattattatttgtttcactcggatgtgacaaaaatctggtagattccgagtacatgatcggtatgcttaccagtcatggaattgaactgacggatgatgaaacagaagcggatattattattgtcaacagctgctgttttatcggcgatgcaaaagaagaaagcattaataccattttggaaatggcagagcagaaaaaaacaggctgctgtaaatcactcattgtcaccggctgcctgacacagcgttatcaggatgaagtgaaaaaagaaataccggaagtagatgctattttaggaaccaattcctatgattccattgtagaggctctcgaggagaccctgcagcataaattttataaaaattttcatacgctcagcggactgccgcagctgtcgaccaaacggacggttacgacaggcggacattatgcatatctgaaaattgcagagggatgcaacaaaaactgcacctactgtgtgatcccgtctgtgcgcggacgttaccgcagtgttccgatggacgagctggttacgtcagcagaagaactggttgcaggaggcgtaaaggaactgatccttgttgcgcaggagacaacgctttacggtgtggatctgtatgggaaaaaatgcctgcatgaattgttagaccgcctgaacgggatttccggtctgttctggattcgtattatgtactgttatccggaggaaatctatgaggaactgatcgattccatgattaaggataaaaaggtctgtcactatctggacatgccgatccagcactgcaacgatacaattttgcagcgcatgggaagaaaaacaaataaaaaagaactgatcgagagaatccattatttgagaaaacgtgtcccggatatcactttgcgaacctctttgatctgcggattcccgggggagacaaaagagcagcacgaagaactgatgcagtttgtcaatgatatggaatttgaccgtctcggagcgtttacttattccgcggaggaaggaacaccggcagcggaaatgccggatcaggtgccgcaggaacaaaaagaggaatggcaggcagacgtcatggaacttcaggaagaagtgatttttgacaagaatgaagccatgaaaggtacggttttgtatgcgtttattgaaggacaggttgcggatgaaaataatacctacgtcggcagaacctaccgggatgcgccaaatgtagacggatatatttttatcaatacggacgaagaacttttaaccggagatattgtaaaggtggaagttaccggtgcgtatgaatatgacctgatcgctacgatcgtaaaataggaggaacaattatgaatttaccaaataaattaacgactttccgtgtgattcttataccgttttttgtatttttcttgttagctccatactttgaaggatacggaaattacattgcgcttgttatttttattgtcgcaagcctgacggattttctggatggaaaaattgcaagaaagtacaatcttgtaacaaatttcggaaagtttatggacccgctggcagacaagcttttggtctgctctgcactgatctgtttgattgcacttgacagaattccggcatggattgttattgtgattatttcccgcgagtttattatcagcggattccgtctgattgctgcagacaatggtgtagtgatcgctgcaagctactggggcaagtttaaaaccgcatcccagatggtcaccgtgattcttctggtactgaatattcaaaatacggtatttacagtactcggaacggtatttatttatatttccctggtacttaccgtcgtatctctgattgattatatcgcaaaaaacaaagaagtattaaaggatcagaactaatgaaaattgacagacttctggcagaacaccagctgctggtgacgacagccgagagctgtaccggaggactggtagcgtctgcactggtagatattccgggaatttccgattattttaaagagggatatatcacttatgctcccgaagcaaaagaaaagatactgggagtattgccggagaccatttccgattatggtgtcgtgagtgaacagaccgcacaggagatggcggaaggcgctgcaaaacaggcacacgcgggatgtgcggtggctacaacgggggttgccggacccgggggaggaactttaaagactccggtgggaacggtctgttttggatgttttgtgcagggaaagatattttccgggacagaacattttaccggtacaagaagtgaaataagacatgcggctgcggcatatgccattgcatttctggagcggtgtatcatcaaaacatatggaggaaccttatgcgaatcatagcaggaacagcgcgcagcctgccgctgaaaacaattgaggggctggaaacgcgcccgacaacagacaagatcaaagagacattatttaatatgctgcagaatgatgtgccgggatgttatttcctggatctgtttgcgggcagcggtcagatcgggttagaagcaatcagccgcggagctttgtatgcggtttttattgagaataaccggaaagcggccaaatgcattgaagataatattgcattcacaaaatttacgaaggaatccagactgcttaccacggatgtgatcagcggaatcagcagtctggagggaaaatatacatttgatattatttttatggacccgccataccggcagggacttgaagaagatgtgctgcgtttcctttcaaaatcaagtgtgttgaaacctgacaccatgattattgtggaagcatcgctggatacggatttttcttatctggatgagctgggattttccgtgataaagttcaaaaaatataagacaaacatgcatgtctttattcaacagaagagggtataacaaacatgaaaaaagcaatttatccgggaagttttgatccactgacattcggacatatggacatcatcaaccgtgcttcaagaattgtggatgagctggtcgtcggagtgctcaacaacagcgcaaaaaattcgttgttttctttagaagaacgtgttagtatgatagaagaaatgacaaaggatattccaaacgttacggtggcgtcctttgatggtctgctggtagagtttatgaacaaaatagacgcttccattattgtgcgtgggcttcgtgcagtgacagattttgagtacgagctgcagatcgcacaggcgaaccatgtgcaggattctaatattgaaaccattttcctgacaagtgatctttcttattcctatttaagttcgacaattgtcaaggaatttgcgtcctacggtggagatatttccaactttgtaccggaacgttttattgaacggatttataagaaatatgagaacagataggagagattttcactatgagcagtaagatggaacagattattgaggaaatcgaagagtatattgatggctgtaaattccagccgctctcaagtacaaagattattgtcaacaaagaagaattagaagaacttattgcggaacttcgcgccaaaacaccggaagaagtaaagcgttatcagaagattatcagcaataaggaagcaattttagcagatgcacaggcgaaggcagatcagatcattgcacaggcacaggtgcagaccaacgaacttgtcagcgagcatcagattatgcagcaggcatatgcacaggcaaatgaagttgttatgattgcaaccaagcaggcccaggaaattttagacaatgctaccaatgaggcaaacagtctgcgtgtcagtgccatgggatatgcggatgaccagctgcatgagatcgaggaggttttgtctaattccatcgagacttctcaggcgcggtatgacagtctgatttcttcactgcagggtttccttgatgtagtgacaaagaaccgggcacagctgtttccacagacagaagcagcagaggaggcagccgcttctgccggacaggcagcagagtctgcagaggagccgcagattaccaatatttcagcttcagatgaggatgcccaggaagagtaaaggaatacagcatccaacggttaacagtaagaggattattttctgtaatacatagttccggagcgagaggccggtctggtgaaggatggaagagacctgaaaaatgccggacaatcctccccatgacaggaataacactgccagaagagattttatctgtctggtgcaggcagaggtggaaagcagcgcaacaccgtttgtaacttctaagaatccggtggcggccagcgaaaaccaatgcgccggaaacggcagtgtctgcagcatttcgcagaaaatggaaaacaggatgatatagccgcatattttgatcagggtttcaaatccgtgaatgatgccggcatcaatgatttgcatatccatatgaaatcttgatgccgtttctttttgtgtagaagaaggggctctgtgatataataacagcatactcattccatacaaaaacggaatgccatagatcagaaaaacgtatacaggagataacggaagctgcaaaatttcctggatggcggttatgacaaatacgggacttaagttgtttgtaaagcagcatagagcagaggctttttcccgggaaatatagttactgctgtaaaagtcggcagtcagtttgcagccgatgggaaatccgaataaaaaaccacacaatacgatgtagcaggcagaaaattttttcggaagaatttcactgcgcagaatgacatacgagaggacacaaaaaggaagcagcgttggaagaatctgcgtaaaccacagccgcagtccttgttttgatgccgaaactgctgcgtgggggaaacagataaaaaacaaaaacagtatgcaacagagaaaaataaatacaaattttttcatgatacagtttatgtgagacaggaggagtatatgagtacattagagcatttatatccggaaagggtattttattatttcaagcagatcgcagcaattccacatggatcgggaaacaccaaagcgatcagtgattacctggtaaaatttgcaaaagaacacgcactgacctggtatcaggatgaagcaaacaatgtggttcttgtcaaggaagcatccaaaggctatgaaaaggctccggcgattatcattcagggacacatggatatggtctgtgaaaaagaaaaagactgtaatcttgacatggataaagaaggactgcgcttgtatgtagatggagatttcctgaaggcagaagggacaacgcttggcggagatgacggaattgcagtggcatatgcgctggcaattttggaatcagatgaaatttcccatccgaaattagaagttgtgattaccgtggatgaagaaatcggaatgctgggggcggctgtcatggatctgtctatgctgaccggacataccatgttaaatattgacagtgatgaagagggaattttcctgaccggctgtgcgggcggtatggcattaaatgtttccattcccgtaacccgtgtcagacagacgggaaagaaactttctcttattgtgaccgggctttccggcggacattccggcagtgagatcgataaagaacatggaaatgcagatcttttgatgggacgcctgctgtatggaatcttttcgcgttccccgtttggaattctcactttgcatggtgggttaaaggacaatgcaattccaagagaatgtgaggcagaaatcctgattccggcagaaaatacgcagattgtctgtgaatatgtaaaagaactgaatgaaatattaaaaaaagaactggtggaaacagatccgggcgtgcaggtgctgatagaagaacagggcaatgctgaagcggaaatattagattatcattcggtaagccgtgtgattttttatctgcgcaatgtgccaaacggaattcagcatatgagccagctgttaaacggtcaggtagaaacttccttaaatcttggaattctggaattaaaggaagatgccttgacgtcgcttacttcgatccgaagcagtgtaaaaacccgcaaagaagatctgtgtgcacgtgttacgatgcttgtggagatgcttggaggagaagcagaagtggaaggcgattatccggcgtgggagtatcgcacggattctgcgctgcgtcagcaggtagaaaaagtatacgaagagctgtttcataaaaaacctgtattttccacgattcatgcagggctggagtgtggccttctttctgaaaaaattccggatctcgactgcgtttctttcggaccggacaattttgacattcacacgccaaaagagcatttatccattacttctaccggaagagtatgggatttccttgttgcatttctgcagcaggcaaacgtatgattcgcctggacaaattcctggcggattccggcgtcggcacacgcaccgatgtgaaaaaacgaatccgcgagggacgaattacggtaaatgatgcggtggcaaagaaaccggatcttaaggttgatccggaacaggatcagattttgtttgatcatcgtccggtgatttatgagaagtattcctattatctctttcataaaccggcgggctgtgtgacggcaagatgtgaccggttaaaccggacggttatggatttcttcccggagtccatgcgaaaagagtttgcaccggtcggaagactggataaggatacggaagggtttttgctgattacaaatgacggagaactcacgcatcgcctgctgtcaccggcataccatgtcaaaaaaacgtattttgtacaggtagatcagaaaattccggatacgacggcaggacaatttgcagagggcgtggacatcggcgatgagaagcgcacacttccggcagatctcaaaattcttggggaccgtgaggcggaacttacgatttcggaaggcagatttcaccaggtgaagcgtatgtttgcgtcggttggatgtaaggtgacatatctgaaacggatctccatgggaacacttacacttggaacattagaaaaggcaacttaccgtaaacttacggaacaggaactggcttccctgaaaaaagaagcggaaaataaacaatcatcaggagtataaaattatgtacgaaggatatctgccgatttcaaaacaggatatgcaggaacgcgggattaaacagctggattttgtatatgtgtgcggagacgcatatgtagatcatccgtcttttggtcatgcaatcattgccagactgctggaggcacatggctatacggtgggaatcattgcgcagccggactggaaggatgatgcttctatttccgtgcttggcgttccaagacttggctttttggtttctgctggaaatatggattctatggtgaatcattattcggtatccaaaaaacgccgtgcaaccgattcctataccccgggaggcgtaatgggaaagcgaccggattatgctaccgtggtgtactgtaatctgatccggcatacatacaagaagaccccgatcattatcggtggaattgaagccagtctgcgccgtctggcacattatgattactggtccaacaaggtgaaacgttcgatcctgcttgattccggtgcagatctgatttcttatggaatgggagaacacagtatcattgaaatcgcagatgcattgaatgccggaatcgatgtgcatgatattacctttattgacggaaccgtatttaaaacaaaaaaccgtgatctgatctatgatgccgtcgagttaccggattatgatgagatcaaagaaaataagcgttcgtttgcgcagagtttttataagcagtactgtaatacagatccattttccggaaagcgcctgtttgagccttacggtggaaccacatttgttgtgcagaatccaccggcaaagccattgacacagacggaaatggatgaagtctatgcacttccgtatatgcggaattatcatccgtcatatgaaaaagacggaggggttcctgcgatccgggagattaagttttccctgatcagcaaccgcggatgttttggcggatgcagtttctgtgcgctgacgtttcatcagggcagaattattcagacgagaagccacgagtcgatcattgatgaggcaaaacagatcattcaggaaccggactttaaagggtatatccatgatgtcgggggacctacggcgaatttccgtgcaccggcatgcaaaaagcagatgacgaagggagcctgtccgacgaaacagtgcctgttcccaaaaccatgtaagaatctggaagtagaccataaggattacattgccctgctgaaaaagctgcgggtgcttccgggtgtgaaaaaagtatttatccgttcgggtatccggtttgattatctgatgtatgataaggatcgtacatttttgcgggaactgtgcgagcatcatgtgagcgggcagttgaaggtggcaccggaacatatcagcaataccgttttacagaaactgggaaagccaagtgtggaagtgtataacagttttgtaaaagcgtataaagatatgaataaaaaaatcggaaaagagcagtatcttgtgccgtatctgatgtcttcccatccgggatcgacgctgaaagaagcggttgaactagcagagtatctgcgggatttaggttacatgccggaacaggtacaggatttttatccgacaccgtcaacgatttctacctgcatgtattatacaggactggacccgcggacaatggaacctgtatatgtggcaaccaatccgcatgaaaaagccatgcagcgtgcactgatccagtatcgcaacccgaaaaattacgatctggtacatgaagcattaatcaaagcaggacgtcaggatctgatcggatttgattccaaatgtctgatccgtccgcgccggccgaaaaaagacgcggatacttcctaccggtcatccagacagggaaagaaggcaccggcaggcaaggctgctgccggaaagatggtgaccgcaaaacacaaaaagaaaaccatccgcaacatccataaaaagaagtaggaaacgttatgaaaacatttaccatcggcacgaatgatgccaaccagcggtttgataaatatttaaaaaaactgctgcccaatgcatcggtcagttttttatataagatgcttcgaaaaaagaatattactttggacggaaaaaaagcgaccgggaaggagacgctgcaaaaaggcgcgcaggtagcagtgtttttcagtgatgaaacactgcataaatttatgcaggatacaaaaaaactgcaggaagagtttcacatgctgcagcgtctgcccatgaaggggctttccatcatttatgaagatacggatattctcatcgcggataagccatacaatatgctttcccagaaagcaaaagaacaggatctgtctgccaatgaatatctgctcggctatctgatccggagcggggcgctttctctggagacattcggcacgtttcgtccgtcagtgtgcaaccggctggaccgcaatacgacaggacttcttctgatgggcaaaacgcttgccggcgcgcagatgctttccgaggggctgcgggaacgtaccattcataaattttaccgtgccattgtatccgggaacgttacaaaaccggtacatctgtccggatggcttatcaaagacgaacataccaatcaggtaaagattctgacacaggaacaaaaagatgctgtacggattgagacttcttatacgtccgtacaggcgaaaggaacatgcagtctgttggaaatctgcctgattaccggaaaaacacatcagattcgtgcacatctggcatctgttggtcatccggttatcggagatcgcaagtatggggacccgtcagtgaatcacaaattttatggtacctttcatgtggatcatcagctgcttcatgcgtatcgtctggaatttccggacggaagagtttttactgctccgatgcccgaaatatttaaagaaattatggaaaaggagcgtggatagcagatgccgacctggaattcaaggggactgcgcggatcaacactggaggatcttttaaaccgtacaaacgaaaaatatgcacacaacggtctggcgctgatccagaagatcccgacaccgattactcctattaatattgataaagaaaccagacacatcacacttgcctattttgaacagaaaagtaccgtagattatattggagctgtacagggaattccggtgtgttttgatgcaaaagaatgcaacaccgacacctttccgcttgccaatgttcatccgcatcaggtggcttttatggagcagtttgaaaagcaggagggaatagcgtttcttctgatatcttttacgcacagggaggaattttattatctgcgtttttccgatctggagaagttctggaaccgggctctggatggtggacggaaaagctttcggtatgaggagctgaatccggcctattttctgccaaaggtatcaggggtactgattccctatcttcaggttctccagaaggatttagaggacagggattgacaatctttggaatatttcttataatagcgttgtttcatgtgctaccaaattatcacggtatcactttaaaatagtaaagcgagaggttcgattatgacagaccagatgttacatacgccggacggagtccgggatatttataacggagagtgcaaacagaaactactgttgcaggagagattacacgatgtattgcgtcaatatggatatcgtgatattcagacaccaacgtttgaattttttaatatttttggaaaagaaatcggtacaacaccatccaaagatctgtataagttttttgacaaggacggaagcacgctggtacttcgtccggattttactccatctattgcaagaagtgctgcaaagtactataccgaagatgatatgccggtaaaactttgttatatgggaaacacatttatcaattccaacgcgtatcagggacgcttaaaggaaacgacacagtgcggtgcggagctgatcggagacggaacggttgccgctgacgcagaaatacttgccatggtagtggagtcccttctttcgagcggattgaaagaatttcagatctcggtgggacatgcacagtttttccgcgggctggcagaggcggcaggacttgatgaggaacagcagcaggaattaagagaactgcttgccaataaaaattatttcggtgtggaagaaatggtagagggaatgcatttaaatgacacgttaaagaaactgttttcccttctcggaagttttgagacacaggtagaagaacttgctgaggcaaagtctcttgcttcggattacccgaacattctttccgcaattactgatctggaaaaactcggatcgtttctgcggttatacggaattgaaaaatacgtttcgtttgaactcggaatcatcagcaattaccattattataccggtattatttttgcaggatatacgtttggaacaggagaacctgtggtaaagggaggacgctatgacaggctgcttacatatttcggaagaaaagcaccggccattggttttgccattgttgtggaccagcttctttccgctctttccagacaaaagatcacacttccgtccgaggagaaaaatcagatgatcgtttacgcggaaagtaagattgcggaagcagtagaaaaagcgaaagaacttcgcgctcagggaatttcggtttctctgatccagatgcaggaaggccggagcaaagatgattatctgagctatgccatgaaggatcacgtttcaaaagtagaatttatagaggaagcataggaggagatcatggaagaaaagagatatctgacgtttgcactgggaaagggacgtctggcaaaaaagacactcgaactgtttgaaaaaataggaatcacctgtgatgagatccgtgatccggatacccgtaaactgatctttgtcaatgaggaacttggacttcggtttttccttgccaagggaccggatgtgcctacatatgtagagtatggtgcagccgatattggaattgtcggaaaagacacgattttagaagagtcgagaaatatttatgaagtgctggatcttggattcggaaaatgcaaaatgtgcatctgtggaccggaaagtgctgcggaatttttgcagcatcatgaacagatccgtgtggcaaccaagtatccgcggattgccaaagattatttttataacaaaaaacatcagacggttgagattatcaagctgaatggttccatcgaacttgcaccgatcgttggactatcagaggtaatctgtgatatagtagagacaggtacgaccttgcgtgaaaacgggctgacggtgttagaggaagtttgtccgctttctgcacgcgtggtcgtaaaccaggtaagtatgaaaatggaaaatgaacgaatcacaaaactgatccgcgatttgaaaaaagtcatttaggagggacatcatgagaattttaaaacttacagaggataccagaaaagatattctgcagaatctcttaaaaagaagcccgaataattacggtgagtttgaaggccgtgtaaacgccattattgaagaagtgcgaaataaccgcgatcaggcagtttttaattataccaagcagtttgacggcgcggacatcaatgccggcaatattcttgtaacagaagaagagattgccgaggcctatgagcaggttgacacgacattgcttgcagtgatccgcaagtctcttgtaaatatcaaaaaatatcatgaaaaacaggtacagaattcctggtttacgacagaggacggtatcattcttggacagaaagttaccgcgcttgcgacggttggtgtctatgttccgggcggaaaggccgtgtatccttcttccgtactgatgaatgttcttccggcaaaagttgctggagtagaccgtattgtaatgtgtacgccaccaggcaaagatggaaaagtatatccttccactctggttgcagccaaagaagccggagttgatgagatctataaagtcggtggagcacaggcaattgctgccatggcatttggaaccgaaagtgtgccaaaggttgacaagattgtcgggccgggaaatatttatgtcgcacttgccaaaaaagcagtgtttggttatgtcagcattgattccattgcaggaccgagtgagattttagtgcttgcggatgagactgcaaatccacgctatgttgcagcggatctgttatcccaggcagaacatgatgagatggcatctgcaattctgatcaccacaagccagaaacttgcagaagaagtatctgcagagattgatcagtttgtcgcagaactttccagaaaagagatcatccagaagtccctggacaattacggatatattcttgtggcagataatatggaagaagcaattgataccgtaaatgcgattgcatccgaacatatggaaatcgtcacagcagatccgttccacgtaatgacaaagatccgcaatgccggtgctatctttatcggagagtattcctccgagccgcttggcgattactttgccggaccaaaccatgttcttccgacaaacggaacggccaagttcttttccgcactttccgtggatgattttattaaaaagtccagcattatttcttactcacgggaagcgcttgaaaaagtacataaagatattgagcagtttgcagaatgtgagaaactgaccgcacatgcaaactccatccgcgttcggtttgagtagtatatgggaaagaaggtctaaaaggagcagattatggaaaaaagagagatcagcacaacacgcaaaacaaaagagacggacattcaggtgactttaaatctggatggaagcggtatttcccatattgagacaggcattggattttttgatcatatgctggagggattttccaagcacggtttcttcgatctgcatatggaatgtgatggagatcttcaggtcgacagccatcatacgatcgaagactgcggaatcgtacttggagatgcgatcaaaaaggcattgggggacaaaagcggaatcaaacgatttggaagctgtatccttccgatggatgagacacttgttttgtgtgcggtagatctatccggacgtccatatcttgtatttgacggcgaatttactacggagcgtctgggaacacttgataccgaaatgatccgtgaatttttctatgcggtctcctacagtgcgggcatgaatctgcacattaaggtgttaagccccggaaataatcatcatatggcagaagcgatgtttaaggcatttgccagagctttggatgaagcggtttcccatgatccgagagtaaaaggaattctgtcaacgaaaggaagtttgtaatacatgaaacaaaaaaacattgtcgcgacgctttatttaaaagatggtcatgcagtaagatccatgaccgattttacgccggtagatgcgaatgtttatcgactgtgccagttatacaacgacagtggagttgacaagatcattatttttgacctgtctaccagcgatgatgagcatgaaaagaatgtcaatacgattcgaaacatcaatcgcaacattgatattaaagtatgcgcaggaggaaacattaaccgtctggaagacatcaaaaaacttttgtttgcgggatgccttcaggtgattttgaatgcttctaagccttcgagcatcggattggcggaggaagccagtgcacgttttggcaaagaccggattctgctctctatcaacaatgtggattttatttttaagaatcaggattcgattgaaaatacattccatgaagcactggtgttaaatccggaaattctggatgcactggaaaatctgaccaacattccatatgtggtggaacttccggattataattttgacgagatcgtaaggctgctgaagcgggaaaaaattcgaggaattgcgggtccgttcatcaatgatacttcaacggatattatgaagttgaagtcttctctgcttcaggaaggcatcaatatgtataattttgcaccggatctgtcctgggaggatctgaaactgaattcggacggaatggttccggtcattgtgcaggattaccgtacagatgaagtgctgatgcttgcatacatgaacaaagaagcgtttgatacgacaattaatctcgggaaaatgacctactggagcagaagccgtgatgaactctggaccaaaggcctgacttccgggcatttccagtatgtgaaatccctgacggctgactgcgactttgatacgattctggcaaaagtctcccaggtaggggctgcctgtcacaccggaaaccgtacctgttttttcaatagcatcgtacaaaaagagtatgttgagaaaaatccgctgaaggtacttgagagcgtgtatgatattatcaaggaacgtaaagcacatccgcaggatggttcctataccaattatctgtttgggaaaggaaccgataagattttgcagaaacttggggaagagtgtacggaaattgtaattgcagcgaaaaatccggaaccggaaaacatcaaatacgagatttccgattttctgtatcactgtatggtgcttatggtggaaaaaggcattacctgggaagagattgccaatgaacttgcccagcgataaaaaataaatgttaagaggtatctatgagaaaactagctttaagtgacgagattctgatgcagattgaaaaacctgcacgctatatcggtaatgagctgaattctgtagtaaaagatgacacatcgcagattcgttttgcgatgtgttttcctgatgtatacgaaattggtatgtcacatcttggaattcagatcctatacgacatgtttaaccgcagagaggacacctggtgtgaacgtgtctattctccatggccggatctgcataaaattatgaaggagcagaatattccgctgttcggacttgagtcccaggaaccgatcaaaaactttgattttgtcggtctgactctgcagtatgagatgtgctacaccaatattttacagattctggatctggcacagattccgcttctttcggctgaccgtggggacgaagacccgattattttaggtggaggaccatgttcttataatccggaaccgattgcagacttttttgattgtttttatattggagaaggggagacacagtatgatacatttttaaatctctataagtcgatgcgggcatccggacagtattcaagaaaggcatttctgcatgaggcggcaaaaatagagggcatttatgtcccgtcgctgtatgaagtccgttacaaagaagatggcacgatagcggcatttactcctgtttatgatgatattccggcaaccatcaaaaagcaggtggatatggatctgaccggctcggtttatccggaaaaaccggtggttccatttatcaaagcaacacaggatcgcgtggtgcttgaaatacagaggggctgtatccgcggatgccgtttctgtcaggccggcatgatttaccggccaaaccgggaaaagggcgtaaaacgactgaaagaacttgcacaaaccatgcttgcatcgaccggctatgaagagatttccttaagttctctcagttcatcggattattccgatctggaggaactgatcaatttcctgattgaggagtgtgacaaaaaacatgtcaatatttccctgccatcccttcgtattgatgccttttcccttgatattatgcagaaagtgcaggacatcaaaaaaagcagtctgacatttgccccggaggcaggttcccagagactgcgaaatgtcatcaataaaggcctgacggttgacaatattctgaccggttcccatgatgcgtttgtcggcggctggaataaggtcaagctttattttatgcttggacttccaacggaaacagaagaagatatgcgggcgatcccggaactggcaaacgagattgccgctttgtattatgacaccgtgccaaaggaacagagaaacggaaaatgccagattacgatcagtacttccttttttgtaccgaaaccttttaccccgttccagtgggctaccatgttagacccatcagattatctggcgcgtgcaaagattgtcaatgatcatgtaaaggaacagttaaaccacaagagtatccgttacaactggcatgaagccgatgtgacggtattggaaggaatccttgcgcgcggagaccgtaagatttcaaaagctattctttatgtgtatgaacacggcgaatttttcgatgcgtggtcggaattctttcactatgatctgtggctggaggcatttgctgcatgtggcattgatattgatttttataccaagagagcacgaagcgacgatgaaattttcccgtgggattttattgatgtcggtgtgacaaaggcatttatgctgcgtgaatggaaaaccgcgctcagtgagacggtgacgccaaactgccggatgcgctgctccggatgtggtgcaagacaatttggaggaggtgtctgctttgaaaatcagaattaaatttcgaaaatggggtgtcatgaaattcatcggacacctggatatgatgcgctattttcagaaagcggtccggcgtgcaaagattgatatccgttattcagaaggatattctccgcatcagattatgtcctttgcggcgccgcttggagtcggaatcacaagcgatggcgaatattttgatattgaagtcaatgaatccatgacatctaaggaggcagtcgctgcactgaatgaaaccatggtagatggtgtggaggttacttcctatgtgaaactgccggataaagcgaaaaccgcgatgtcaattgtggcagcagcggattaccggctgagctataaagaagggtacgaaagtccgctttcaacggaagaatggaaaagaatcgtcaaagaacggtttttggacagcccacagtttaccattatcaaaaagacgaaaaaaagtgaacgggaagtggacctaaaaccattggtatacgcgttttccgttgaagaggagcagggatgcccggcatttttcctgcaggtttctacgggcagtgtggataatatcaaaccggaactggtactttcatcggtttatcagctttgcggactggaatactgtgaatccgcaatccagatccaccggctcgaagtttatgcgagggatgaacaggggcagctggttgggctttccggcatgggagaggaaattgtttaaatgaatcggatcgttgtcacaaaactggaacatcatcagacagagtatcttgcttatctggttttggatgagaaccggaagctgcaggaacttcaggtttttgaaccggaagaaaatactctgctggatcatatttatgtaggatatgtagagaagattgtgcccaatattcatgccgcttttgtgcgcattgcggatggacagaaatgctatcttccgctgaatgatgtgaaaaacccggtgtataccagaaaattatccaaaaaagaagcgctctgtgaaggggatgagttgctggtgcaggttgtaaaagatgcggtaaaaaccaaagatccggtcgtaagcaccaagcttgtagtgcatggacattactgtttcctttcgacagagaatacctgtcttggcgtttctaaaaaattatcccaggaggagtcaaaaagactgtcggctcttttagagaacacgtgtaaggatcatgaagcagaagggtacgggctggtattcagaaccaatgcaggggcggttccggaaaccgaattatgcgaagatatcgagctggtgcagaaagaataccgggctttaaagaagaccggtacacatcagaacgccggagatctggtgtaccggaatctccccggctatctggcgcggttaaaagcagaaaattttgaaaaaacagatctggttcttacggatggtcaggatctgtatcaggagatctgtgcataccttccccatcttgtggaagaaaagaaagtgcagctttaccgggatgatgcggtcagtctttcgactttatatcatctgcggggcaatatgcaggaactgctttcttccaaagtatggcttgattccggagccaatattatcattgaatctcttgaaaccctgacggtcattgatgtcaacagcggaaaaaaccggtcccgccgggaagaggctttatttgcgatcaatgttgaagcggcaaaagagattgcacggcagcttcgtctgcgcaacatttcagggatgatcctcgtggatttcatcaatctgaaaaagaaagaacagcagcagaagctgatttccgttattcgggaggaattacaaaaagattcggttcccgcaaattttatcgatattaccagacttggtctggtggaactgacccggaaaaaagtatacaaatctttgcgtgaaattttatcataaacagcttgacgaacaggtggtcatgtgctattatacactagtatgccgcacagtgaggtaaaagtttgcttattggcaacaccgtaactggcgagtaatgataaataggaggtgccatatgtacgcaattatagcaacaggtggtaaacagtacaaagtatccgaaggcgatatcattaccattgaaaagcttggagttgatgctggtgagaaggttacttttgatcaggtattagcagtatccggagacgatatgaaggttggaaacccaacagtagccggagcaactgttgaagcttctgtcatcaaagaaggcagagcaaagaaagtaatcgtttacaagtacaagagaaaaaccggttatcacaagaagaacggacacagacagtcgttcacccaggttaagattgaaaagattaatggataatcgataggaattgttatatgattactataacgattttacaggatcatgaagatgcagtgggatttcactgcatcggtcattccggatatgcggaagcaggaagtgatattatctgtgcaggtgtttcggcacttgtgataaatacgatcaattccatagagactttcacagaggattcttatcatattgatacagaagagacatccgggctgattgatttcagacttgatcagaaagccggtcatgatacacagcttctgatgaagtccatggttctgggcttacaaggaatacaaaatgattatgggaatgagtatatcattcttgatttcaaggaggtgtaggacatgttgaatatgaaccttcagttttttgctcataaaaagggagttggttctacaaagaacggccgtgattccgagtccaagagattaggagcaaagagagcagacggacagttcgtaaaggctggcaatattctctatagacagcgtggtacaagaattcatccaggtgtgaatgttggtatcggtggagacgacacattatttgctaaagtagatggtgttcttcgtttcgagagagtaggaagagataagaagcaggcttctgtatatccagtagacaacgagtagtttacaaaaccccgactttttgagccggggttttatcgttatgtaggagagagattatgtttgcagaccgtgcaaaaattattatcaaatcaggaaagggcggagacggacatgtgtccttccgtcgtgaaaaatatgtgccgaacggtggtccggacggtggcgatggaggaaaaggcggagatgtcattttcttagtagacgagggaatcaatacgcttgcagactatcggcacagacgaaaattcgcagcagaaccgggcgaagaaggtggcaagaaaaactgccatggaaaaaatggtgcagatctgatattaaaagttccggagggaacaattataagagatgcggcatccggaaaagtaattgccgatatgtcaggggaaaataagcgttctgtcattttgcatggcggccgtggaggacttggcaatcagcactttgcaacttccaccatgcaggctccaaaatatgcgcagccgggacaggaagccatcgagattgaagttcagctggaacttaaagtgatcgcggatgtgggactggttggtttcccgaatgtcggaaaatccacctttttatcgcgtgtgaccaatgcacagccaaagatcgccaattaccattttacgacattacagccaaatctgggtgttgttgacatggaagacggaaacggttttgtgattgcggatattccgggactgattgaaggtgcttccgatggtgtcggtctgggacatgaatttctccggcatatcgaaagaaccaaagtcattatccatattgtggatgcggccggaaccgaaggacgtgatccaattgcggatattcatgccattaaccgggaactggatgcatataatccggacttgttgaaaaaaccacaggtaattgcagcaaacaagattgatgcaatttatggcaatgaaaacgaaattatttctgcgcttcgtgcagaatttgaggaaaaagaaggcattaaagtgtatccgatttctgcggtgagcggtcagggtgttcgggaattactgtttcatgtacgtgaacttctggcaaaatgtccgaaggaagccgttgtctatgagcaggaatttgatccggcacttggcttctttaaggatgaaccatatacaattacccgtgcagaagacggtgcctttgttgtagagggtccaaagattgaaaaaatgcttggatatacaaacatggattccgaaaaaggatttttattcttccagaaattccttcgggaacagggcatcttaaaggaactggaagaacagggcatacaggatggagatactgtccgtatgtattataacgaatttgattattataagtaacaggaggaaacgctatgaacagcagacagcgcgcctatctgggaagccttgccaacaatatagatccgatctttcagattggaaaagcatctctgacaccggagatcattgaagcacttgatgccgcattggaaaagagagaactgattaaagtctctgtattgaaaaactgtattgatgatccgaaggagatcgcttctgtcattgcagagcgtacacattccaatgtcgtaaaagtaatcggaaagaaaatgatcttttaccgcaaggcaaagaagaatccaaagattaaacttccggaataagacacatgaatatcggaatattaggagggtcttttgatccaattcataacggacatcttcatatggcaaaatgtgcatacgaatcttatgcactggatcaggtatggcttattcccgccggacactctccaaataaggatgagcatgggatgaccgacgccaaagaccggtttcaaatgtgtaaactggccgcacagccgtatccctggatgacggtcagccggttggagcttgacagtgccgagagaagctacacataccgcaccatggagaaattgtcggaacagtttccgatgcatcgtttcttctttattatgggtggagattctctggattattttgaacaatggaaacaaccggaacgaattgccaaactggctaccattctggtgatcccgagggatctttttaccatcgctgcactagagaagaagatccgtttgttgcaggaacaatttccctgtgatatccggatcgttccctgtgaacgttttttgatgtcttccacaaagatccgccaggcactgatgagaggagaacatccggaacatgcgtttccggaagaagtatctgcgtatattcgcaggcatcatctgtatcaatcgtaaagaagtggagcaaaacgtatggaacgagaagaaatacaaaagagattgaaaaaagaactggataaaaaccgctatgagcatacgcttggggtcatgtatacggcaggaagccttgccatggcatatggatatgattatgagaaggcaatggtcgcaggacttttacacgattgcgccaaatgtctcccgacagagaaaaagatttctctctgtgaaaaaaacgatatcctgatttctaaggtagagcgtgaaaatccaggacttctccatgcaaaagcaggtatggttttggcagaggaagcatatggagtaaaggatccgcagatccttcatgccatcaaggtgcatacaaccggagagccggatatgaatacattggataagattatctacattgccgattatattgaacctttaagatgtgaagctccccatctttcgatcataagacagattgccttttcggatttgaatcagtgtatggcagaaatcttatatgatacgctgcattatttaagcgggagaaaaggcagtgtagacccaacgacccagttaacctatcaattttatgaaccgtatggaaaggatcagccatggaaacattagaaattgtaaagaccgccgtagaagcgctcagagataaaaaggcagaggatgtaaccgttattgatattacaggagtttcctctatcgccgattattttattattgcaaacggaaacaaccagaatcagctgactgcaatgcaggatgccgtagatgaagcattatacaaagcagggctgcatgcaaagcagattgaaggaaataataagtcgacatggattctgatggactatgaggatatcattgtgcatctgttttccaaagaagaccgtctgttctatgatctcgaacgcatctggagagatggaaagatcattgagatgtaattccaacaggtattttgtgtaacagacatgattgattataaagagtgattataaatgaaaagtgagagaataacttctttcctacggatatgaaagggaagaaggttattctctttttttgtgacaaaataatatagcatgttataaatattaatagaacagataattagctaccgaatttccggagagtaataggaaactacgagatactcgccgctgtgcagtgtattatcttccgagattccgttcagttcgcacacctcatcgataaactgcgcacgggaggtacggtcagagacagcatattgatcggcaagagaccacaaagaatctcccttttgtaattggacacttgtgtaatatttatgaaccggctgttcggctctggaaccggcaaatgtaataatactgtttccaatcagaataacggcgaagatgacaagaacacagaccagaacaatcacgcgtttctgggtctgaacggtatgttctcttcgggtgagactttcatttgcacgaggtgagattttttcattatatacccttttcataataaattcctcctgttttatccgaaatcgaacatttgtttgcatgagataaatataatacacgaacatgcgtttgtcaatagaaaatacgaacaaattttcggaatatacgtttgcgttctatgttgtagtatgataaactaagatcataaagaaatacgcccggaggtaacgcattatggcatatggaaaaatctcagataaacagagagaaattctggaatatataaaaaaagaaatcttaaacaaaggatatccgccaacagtccgtgacatttgtgaagcggttcatttaaagtccacatcatccgtccattcccacctggagacacttgagaaaaacggatatatccgtcgtgatccgacaaagccgcgtgcaatcgaaatcgtggatgataacttcaatctgacgcggcgtgaagtggtgaatgtccctatgatcgggcaggtagccgccggtcagccgatgcttgccgttgagaatattgatgcctatttcccgattcctgcagagtatatgccaaatgcagagtcctttatgctgaaggtgaagggcgagagcatgatcaatgcaggtatttttgacggggacaatatcattgtggagcgctgcagtaccgcacagaatggggaaatggttgttgctttagtcgatgattccgcaacggtcaagactttttacaaagaagacgggcatatccggctgcagccggaaaatgatgcgatggacccgatcatagttccggactgtaagattctcggaaaagtgtttggggttttccggttattccggtaaaaataagcgtgcaagtcagaatgaaaaaaccggaaaaatcatgaaaaaaattttaaaccatgctatcactggttgttaaagttgcttttgtgattgagaagataagagcaataagattatcattagctgatctttcaaatagattaggtagcgcatctttaaattcatccatagcaaagatagtatttaaaatttccataagctcatcatgaaatgctgaaattccattaagttactttgtaacaacgggtatttataatgattcttatacaaatgaaccacatttctatgacattgagcatgagacagtgaattcattagaagagatcgatcttccataatgttagtgatattgctacagaaaaagtgactttttgggtagcataatattgtagggatgatttgattaggagaagacaatgataataaacgaacttggaatgagggaaatctctgcggaggaagcaagaaaaattggtgtagatcttacttatgtcggggtctgcaagaaattacgtaaactagcaaaacttgatcgcttgcaactagatgaaacaatgcatcgaaataatttaaatttacatctgtttaaatatatcaagtattgcgggttatctccacttgagtatattaaggaatatttgtccaatttgcaaccatacatgatagaaagacgaaaagatcaagaaaagcaagcatcctttatttgtgtagttgataatatgtatcgtatatctgtatatattaaggctgataattcttttggtgatgaaatgatcatatcgtttcatgaagataatattaggggagttgctaaaacaaatagtcttattaaaaatactaaagatcgcttggttcccgtaattgcagacagttatggtagtataaacagggagaatggcaatgtatccgtaaagctgtttgttcagcgtggaatgaaaaccttgcctatagatgttattggctttaaatgtaaagatgtttttattgtgcgcgaaggagatattgatcgtcagtttcttgattattgtaaccagtatattcgggatctttataccagcaatttgaaacttgactttgatcaggtagaagttttctctatgctacagcagataagttttacaagttatggtagagatactttctcatcgctttcattgctgattgattcaattgccattcagcaggatagcattagtaagcaaacagccgactttgctctagtaacatttgcgcagtcattaaaattaacagaaaatcaaaagaaagagttaattgagcttttgaacgagaaatatatggtttcagatattaagtctattgatgacattttatatcgtataaagtcagctatgtatgctaccaatgaagatgccaattattttaaggagcttgacactttagattcaccacaatcaatgaaattagattgagaatatgtctcccaggcaatttaagttcctttttgaaattatagaataatttagcaattttgagagaatacagcaaaatctctaaaaatcagtgaaaatttgtgtcatttcaagacacgcagaaccagaaaatccgtattatttgctagaatatatatatatatcaaacctttaaaatatgattgaataccgaataagggatacaagtaccatgttaaaattattttatgttatatttatgaatctgcatcgtgcaccatatatgattcctagaatgcgggcagaagcagatcatccgcagcgctatacggaagaacagcgttattcgctcgtgcagcatgccatttatctgatgaacaagacaggaaaaattaatactgtggagaccggtgcggaaaacctgccaaagcagggaggatacatgatgtatccgaaccatcagggcaaatatgatgtgctgggtattatgtatacccataagtctccatgttcttttgtgatggacaaacgcaagtcacatacgatacttgtacgggagttctgtgatcttgtgcaggccaagcgcctggaaaaagataatccgaggcagggaatcaccattatcaatcaggtggcaaaagaggtggctgccggaaaaaagtatattcttttcccagagggcggataccggtttaacaataaaaataaggtatgcgatttcaaggcaggaagttttaagatcgctttaaaatcacatgcaccgatcgttcctattgcactgattgattcgtataaggtgtttaacagttttcatatcggaccgatcacaacatatgtgcattatttaaaaccgatctgttacgaagagtataagggaatgaaaacgcaggagattgccgatctggtaaaaatccggattgaagaaaaaatacaacaggaaatgcaggcacataggtaaaaaatttcctgtatcctttttcaatggatacaggaaattttacattctgattacatacaatcatcatgatcggcttcggaatccccggagatattttctctggtatatacccgtttttgatctcgctgtatttcaaccagcgcagagagctgttcttttacatccatgacatttttgatatttttaatttcaaaatcgccaagggttttgtcggaagaatttacaagaatggttcccattccgaaaatccgctgagacaatgatctggtcacggtcagatcctggacgcggtacagacggacctcatcctgccgctgatttaaaaaaccgctttttacatagaatctttcgttgtcataactgtacacagtgaaggtaagcggaagtccgcaccagattctttttcgttctttccataataagtccatttctttttgtcctccttatattttcatagaattttattttttctaaaaattttttacctttttaaaaagatttttacgtttagtcttcacgaagatgaacatattttgcggcactgcggcgtctgtcctcttcaatggcagcataatgtttttttgttgtattgacatctttatgaccaaggacatctgcaaccagataaatatcacctgtttcccggtaaagagaggtgccataggtgcttcgcagtttatgtggggtaatattctttaagtttgtgacaagttttgcgtatttctttacgagattttctactgcacggaccccgattcttcgtttctgcatagataaaaacagtgcgttttcatccccggaaaccggagtgatcagttttcgttcttccatatatccgcacagggcatttctgacttcctctccgaagtatacaacaacttctgcgccacctttccggtggatcttgattccgttgttttttaaatcgacatcgtccagatccaggccgacacattccgagacacggattcctgtccccagcataagcgtcagaagggccaaatcacgcacttttgtgcggtcatggaacatttgttgctttttcgttaaattttcgccagattcgacttcatcaagcagattggcaacttcatccgcatctaacctgataatatttttttcatggattttcggggtacttaccttggatgcaggattcgattgtataaattcatttttgtacagatatttgtaaaaggagcggagagaggagagttttcgcttgattccccgttcctcgttggtatgtgccataccatccttttcatatacctttaaattatacagatattcttccagatccatgggttttaggcttcccagaatactcagaggaatctctgtaatgttcatttttttgcaaactgggttgttttcgtgcagataatcgaaaaaacaggaaagatcataggcataggcaagtcttgtccgtgactgggttttggattcgattgctataaaatactgtttgcagtagggtggaagagcagcaagctgctttcgcagttttaattcgttatcaatatctactttttcgtaatatgctttttcattgttttccattgatattccacccttctattctgccggtgcatattgcatggaaaatgcgttttttgacaccggggttttctaaattaatctgccggacaagttgtttgacatattcacgtttggtttccccatctgccggacacggatttttcacaaggggaagatgatatttatgaagaaatccgatgacatttgcttccggaacatacatcagtggccggatgacagtgattccgctgcggtctaaatgggtgacaggggcaaacgaataaaactgtccttcataaaacattgataaaaacatggtttctatgatatcgtccatgtgatgcgcataggcaaccttattgcatccaatttgcctcgcatagtcatttaatgcgccttttcgcatttttgcacatagcgcgcatggagaactttcttttcgttcttcaaaaacaatttcgccaattttggttttgattacatggtattcgacatcgagcgttttacaaagctgccggatttcggacagatcataatgatcaaatcccagatcaacggtcaaagctgccaattcaaatttctttggataaaatctgcgtaatccggataatgcatataaaagtgtcagagaatcttttcctccggaaataccgacggcaatcctgtcaccatcagcaatcatctggtaatcgtcaattgcctggcggacataactgtataattgttgtagtttcatataatggttcctttacttgtgctaaattaatggaatatgcaaaaggcactccaaggcgttcgcggatacggcaatagtggcatccatgcaactattcgcaaaacctaagtttaacgaatagttctcctgataaaatcaagatatcactccgcgtatgcctttgcaagccattatgcaagatcttcagaatccagcaatatggtaaaaggcccatcgtttaccagagaaattttcatatctgcaccaaagattccggtttgtacatccggaatttcttctttgcattttgcaataatatattcgtagagattgtttgcaagttccggatttccggctttgataaaagatggacggtttcccttccggcagtccgcatataatgtaaactgtgatattaataacagggagccttcgatatcatgtaaagacaggtttgtttttccgttttcatcaccgaagatgcgcattccaaggagttttcgaatcattttatcggcaatgtttttggtatcggtttctgcaattccgatcaggacgcaaaagccgtttgttatctgtccggtaattttttgatcaacttcacatgttgcttcagtgacacgttgtattacaaatcgcatgaatttcattcctcttaatattttcatcaatagatttttaaagtatacaagaaaaggaaccggaccttaagaccggttccttttttcagagctgaattgctttatttcttctgttccattttctttcgaaaatccagaataatgtcgacacacgcctccggtgtgatcttacttgtgttaagtgtcagatcatagcttctggagtctccccatttcttacaggtgtaataattataatagctggaacgctgcttatctcttttctggatcatatctttggcttttgattccgtgacatcctcacgtttgctgacacgcttgatacgatcgtccatatctgcatgtacaaagatgctcagacagtccggattagaagccagtgcgtaatctgcacagcggccaacaattacacaggactcctcagatgcaatcttttttatggtatcaaattgcgctaaaaatactttgtgattaagcggcatatccaaaaacggtgctgcagaataatttccgccggtatatgtatccattactaaggaatacagaaaactgttggttggacgttcatcatgattttcgaaaatttcttcgcaaaaaccagaatcttttgctgcctgtgccaaaagttctttatcatataacttgattccaagacgttctgctaaaagttttgcaacggtgtatccaccacttccaagttctcttccgattgtataaatataattgcccatacccgttacctccgatgtcataaattctttaagtaatctcttaaagtatatacatattatacaacatttaggacctggatttcaacaattttagcaaattatcaaaatattccggcaaaggagcagaaaattccatatattctccactttttggatgaacgaatcctattgtttttgcgtggagcgtctgcccctgcaaatgtttgaacggtgatctgccactggaatacagagtatctccgagtaacggatgcccgatgcttgccatgtgtacacggatctggtgagttcgtccggtttccagttgaaactgcatataagtataatttccaaaacgttcaagaactttataatgagtaattgccggttttccgtttttctcattgacagccatttttttgcggtcaaccggatgccttccaatcgcgccttcgatggttccctcatcttctgttacatttccgcagacaatgccaacgtagatgcggttgacggtatgttctttgatctgctctgcaatgtttacgtgactttcatcatttttgcatacaatcagggaaccggttgtatccatatcaatacgatgaacaatccccggacgtatctgtccgttgataccgcttaatgaatctttgcagtgatacatgatagcatttaccagtgttccggaataatgtcctgccgatggatgaacgaccatccctttgggtttgttcacaatcagaacatcatcgtcttcatacagaatgtccagcggaatgttttccggttcaatggtcgtttcgacagcatccggaatggtgacacgtatgagatcttctgtatgtaccggataactggccttttgaactgccccgtttacctgaatttgtttgtttttgataagtttttgaaaaaaagaacgggagaaatccggataaatttcggaaagaactttatccagacgctccccttcctgtgtgtactgtacttcaaatgattcttcctgcacggttttaggactccttttcgtcttgcaattttccagtgaaaatcaaagaaaaatcttcttccttgtaataaaaaagcacaacaatgatcaatgcgattgcagaaagtgttacataaatatctgcaacattaaaaaccggaaaattgatcaggctgaaataaaagaaatcaatgacatagtgatgaattacacggtcaatcaggtttcctgccgcccctgcaaagattccgacggctatgatattcagcggaagaaaacggcggttcaatggaattcgctgatacacaatagccagtaaaacaagcacaacgatggtcagtacggcaaaaaagatcatttttgccatcaaaaaagcttccggatggctgtcaaaataagtaaaatgaaaaatccggtgcagaatagaaaccggatccagactaaatgcagcactgtcattctcgagatattttaactggaataccccatcaatcacagacacatccggtttctggtacagatgggtataggcaagccatttggtaaactggtcgatggcaattaaaagaataacaagcagaccgctgtatcccatatatttttttgtctttctctgattcattgttctctccttacttataaatcataaaccggacgcgaagttttccttttttgctgagagactggtcggtttcaaaaacaaaacgccctttttggcgaaccgaaacaatatctccgttgtcacaggattgattgcagtttgtaatgcagcgtccattaatgaaaactttctcagcggtaagatatgcggcagcttccgaccgagataaatgatatgcccgcgcaataatggcatcaatgcggttagaagcaaccatatcatcgtgttcctcaaaaacgggatggactttaagagtactgacatcttcgataatcgaacttcggatcatggtatggcggatctgcgtaaactgatccataataaaatctgagatggtctctgaacaaaagatataaatgtcattttccagcagaacaatatccccgattttactccggtccagcccaaggtgcatcagtgcccccagtacatcgcgatgcgtaagtttttccgcatattttggatactggggaaccgcatggatacaaacaaacggataagaccattcataacaaagagcatcagggataaatgcaaccatctgacgctctgcctgctcatagccaccggatagttctgctgtagtatacagttccttctgcagactatgaaaaatattttgttcatttaaattcaaaaaatcactgaataatacaattcctttccggtccgcctgtctggaaagatccaaaagacgcttccggcataattcctgttcgttcatatcattaatttaatcctggtaaatcaaaagattccataagtccctgaatatctccggaaatgtcaaccccatttggagttgcaaggaagatgtaattggagatcttctgtagatttccatgcatggcaaaggtagcaccggaagtaaaatcgatgatccgctgtgcaatatctacactgagtccttccatgttgattacaacggtacgtccgtttaataaggtttctgttatttcaatctcatcttcaatggtagttggcttgatcacacatacttccattcccggttgtccctgtcggcggtttcggttgattggtgtaattttattctgctgcttctgcctctgcttttcggaaatatcaaaagttgctgcggtctgctgctgttcctcttcttttttgcgttctctgcgggaaggttttttttcttttacctcataatcctcttcttcatcgtaatcgtaatcttcgttatcaaattcgtaatcatcatcatttaaacgcatgacatcgagaaatttatcaataatactcattttttaccaccttatttttgataatgtctttcaccgaaaattccggttccaacgcgaaccatggttgcaccttcttcaattgcaaccatataatctccggtcattcccatggacaaaatatccatacgtacattatctatgttttgtgcgtcaatgtcaacagataattggcgaatctgccggaagtaagtgcggttgtcttccggattttccacgaatggtgcaatcgtcatcagcccaaggatttggatatgcggcaaagcggcaatctgccggataagagaaagggtttcttctttatgaataccaaatttactctcctcttctgcaatattgacctcaaccagaatagagacggttacattttgttttgcagcctgtttttcaatttcttttgccagatgcagactgtccaccgaatggatgagttctgtctttccaacgatatatttcactttgttcgtctgcagatgtccgatcatatgccagcggatattcttaggaagaacttccattttctcacacatttcctgaactttattctctccaaaatcacgtgcccccagatcatatacggtctgaagcatttcgattggcttggttttgctgacggcgatcaatgtcacatcactgcgttttcttcctgcgttttcgcatgccttgcatatatttgcttctacctgttgcaggttttcctgtaaatccatcatgtatacactccttttattttacaaccagctggttttcttttattttactgccgtctaaagcaatatgatcatacagggcgactccgtaggaagtgcctgtatcaacgatggtatatttattgttttgtgcaagaatatcaatttgtttaaatacggcatatcctttgttgatattataaacaccggtgagcttgtccacatcactgccgatggtatacgtcccggaagaattgttttttaccacaacatcgccggcagaaacggtttcatcatcaatatagtaaaaatcatccgtttcgtagtatatcgttggctgaaccagtgttaccgaaccggtatctccagcatggttttctatcataagtccgggatcggatgaatcgcctccctgtgtaaaatactcttttggaaccgtataaaactgtttttttgtaatggccgaattcggaattttcagaccggttttttcagatacgacaagttccacatcgacgaaacgatcatttacataacggatcattgccgtttttaaactcaggtttacataataactttcgtctttttttgtcagggaataaggaactgtcagtgtaaaatcatccttgcagaaacggattttaatatactcattatcttttagctgttttgccatatcctctgataccggcaacagaatattccatttttcactgtcaatccgtttgtaggcaggggtatttgccgtgacctgttcctgatcatccagagaatttcttttgtaatctgccatgttaaactgaccagaagtaaagttgtctgtggtgacactttcatagccgtccgtgtaatatacgataattccgggtttttctgacttctttttgtaaaacgtattgttttctacagcggctttcacatcttcatttaaagaactgagggcattcatactgagggtctgtgtcagctgtgcattgagttcgtttttgaatgtataaaccgaagaaaacgtgttggagtcataagaattccggaaaacatccagttcggaggaaacttctttcagtgtttcggggtcaagggtgtcgccagtggatgcggcatctgaaatctgtcgggaaagttccccgctggtgtcaatggaatagactacgtcattgacagaggcttttgccccgtttttcagatagtaattgatataaccgctttgtcctgcatagacaaccgtctcatcgcgcagaatcagtccgtgataaacatggtttgttgcaatggttccctgccccacttcgtattcagcaaccgggctggaagtcagatacgatataaggttaaagatgacatagataattataattacaaaaatcacgattccgatatttaaattcagaccatgatgcattcgtacaacattctgtttgcgtgccaaaaaagtccacctctctgattgatacttctatcttaccattttcaaactgcaaatacaatcatcagaagaaatgtgtataattttaattttttgttccatactatggataaaaaatggaggtaagaaaaatgaaatggcttgataactgccttttgacattagcggtaattggatgtattgtttggggactgattggatttttccagtttaatctggtttcctttatctttggaaacggaacctggctgacgcgtgtcatatatgcgctggtaggactcagcggattatatctgatcagtttttatggaagaatccgttcctctctggaagattagacacaaaaaagatgggagtgttctcaataagaagcactcccatcttccgtaaaccgggatctcttagagcgaaaccgttactttcgcctgtgcatattccggcagatccgctttgtttttagaaacacttaaaataaaacggactttgtatttttcgctgataatatccagtttttcaatcgcccttaccatgtcctgatcggattcaatgaatgcaatggtaagaaaactgtccagatacatttcttccagatcgtgatcctgggatacaatcccacagataaaccctaaaaattcatcacagtttgtaattggataatccactacattgatcagacggactttattgtttaactcatacatatgtttctggcttttgtcaagataaacaacactcccggtaacggtactgacggtgtgattgactttttctaaaagttccttggtctttccttttcccttttccccacaaatgatttcaatcatggcacttcctcctgcaaatataaaaagtcacaaaaaacggttctttataaccataattatagtatatttgcacaggaaatacaatcattaattcgcaaacgtggaaagaatctgattcatcagcgtatacatatcagaacgtgtttttcccttgtaaacgatactgacaatatcatcaccttttttattctttgaatataaaacaaggcagtatcccgctgcatttgtggtaccggtttttccaccgattacggtaatatcttccggttcggttgtctgaccgtttaaataccggtttgtactttcccatgtctgtgtcacggtattaccggatgcattttgataagcagcatcataacttttggtatggataatgtcaataaaatcctgtgtctggattgcttcctgaaagatcaggtacatatcgtaaacggttgtgtaatgatcctcatctggcagaccgtttgcattgacaaaatggctctgtgttgctcccagggcttttgcttcgcgattcatttcttctgcaaatttgtcaattgacccggaataatattcggcaagaacatttgccgcatcatttccgctgacaagtaacagtccatacagtaaatcccggacagtaagtacatctccggcagcaagtccgcatttggaagaatccgccatatttgcaatggcatccgcactgacggttactttatcatccagatcacagttgcggataatgatataggctgtcagaatttttgtggtacttgccggatacagtttttcgaaaaggttctggctgtacagtacttctttggttgtcagatcaaaaacaccagctccctcggcataatctgcatgaacctgatccgtgccaaaattaatatcgtttgtcacacacagatttcttgcaaaaaactggttgctgacggaagaattatctcccgtcagggagtatggattctggatatccgcggtcttaccggttccgcatccgttcataaaaagagctgctatgcaggaaatacatagcagttttatttttaaatgatgagttctatttgtacatttcacgccagtcaaggtctcctctatccaaagatttaatcaaaagctccgctgtggcaagattggttgcaagcgggatattgtgctcatcacaaagccgcacaatgctgttgacatccggctcatgtgactttggtttcagaggatcacgcagaaagattacgagatcaatttcattgtgctcgatctgtgcaccaagctgctgggaacctcccagatgtcctgcgagatatttatgtatctggaggttggcaacctcctcgatcagacgtccggttgttccggttgcaaacaactggttttttgccagaattccacgatatgcgatacagaaattctgcattaatttcttttttgagtcatgtgctacaagtccaatattcattaaacaattccccctaatattttttcggctgtaatccaacatttaatacaaaccccattcccaaatacaaagaaagcaaagaagtcaatccgtaacttacaaatggaagcggaattcctgtattcggcatcagaccggtggcaacaaaaatattaaaaatactctgaaatccaatcagtgcagccatgccgcagcagatcagtcttcctgcgagatcctttgccttccgtgcgatcagaatacattctatcacaataaacagcaataaaaggacaattaccatggtacctataaaaccgagttcctcaccggcaacagcgaagatgaaatctgtctgtggctcaatgatataattcgcatttttcatggatgtggccgcagaattgttcaggcctttcccccataattggcctgatccaattgccataatcgaattttgctgctgtgctgcgatatccgaccatctggggtcctgtggatataaccatgccataattcgaccgaaacggtaatctcccgatgattgtgccatacgaagtataacggtaattcctatcaatcctgtcggaatacagattcccaaaacggttaatactattttataacttaatccggcaataaacaagaggctaataaaaattaatgcaattgcgatggaagttgaagtatccggctgctttacaatcaaaagcagaggaattccgatcaggacaaaagaaagacctatggtttttaccgtgttcaggttctctgcatgtttggaaaaaaagcgtgcgaaaaataaaatcagcacgatttttgccagctcggaaggctgaaaacgaaaacctccaaaatcaatccagcgctgtgctccaccggcactgtcaccaatacctgtcataaccagaccaagcaggacaatgattccgatataatacaaccaggtaaatctcagaataaaggaataatccatcaaggatacaatgaccatcgccaccataccgatgatacatcctaagatctgcattttctgtacagaatgtttggcacttccaatgatcaggataccgatgatatttaaaaccagtatgctgatcaccaattgaaaatgataatttctaagtttgtattgttttaacatcttaagctcttttcctgttttgtttcaaaacaactcttatctcatagtcatccggagaaaattcaaaataccgtgaaataatatctgaaatttcctttttcattcgccttgctgcagcaggtgaatgttcaaacggtgcggattctgccattaatttcagacgttcacgggcaattggtccggaaccgtcctgtctgtgggaaaaacgattaaccttcatactcacattcctttccgcccagatatatttttccctgccggatgcagggatcttctttattcagatccaccggaatcacacgtggatttgcgaatgctcttgcggcggtcataaatgcacgggtggcctttgtgtgcatggaaagtacaggtattcccttattctggcttacgacaattctttcatcggcaggaattacaccgattgccgaaagtcctaaaatatcttctacatctttttgcgaaagcatatcgtgttttcgcaccatacgggcattgtaggcattgatcagcagatcaatctgtgaaagccgcataccgtccagcagacagatgactcttcctgcatcccgcacagcagaaatatgcggagatgtaacaactactgcacgatctgctgcagatacggcaaagtgaaacccgtcttcgattcctgccggacagtcaatcagacagaaatcaaattcctgttttaaatgggaaatcagcgtatacagcttactctcataatccataatctttctgcagcggagagctgcgggaatcataaacagattcggataacgcttgtcccggatcaatgcctgttttaaccggcatttgttttcgagaaggtcgatcagattatactggatctgatcttccattcccattacaacatccaaatttcgaagtcccatgtctgtatcaagcatgatgacttttttatctaaccgtgaaagtcctgcgccaatgttggcaattgttgtagtcttgccaacaccgccttttcctgaagtgaaaacaattgcttcacccatgaaataaacctcctgttagtttaaattgtaatctatgtgactaatcggcaacagagtttcttatgttaccgttggcaccggctgctttcatttccttgatatctttcatcgatgtttctttatagtaatatgaaattacatttcttgccgcagttgccgcattatgcgaattgtaaccgttggcaattcgtactgcgatggtaatttccggatcatcatatggcgcataaccaacaaacagaccatgattggcatgtccgtcctgctgtgccgtaccggtttttccggcaaccggaatatcaaatccctggaagcggtccatggtagaaaccacttcgcgcatgccggaatgaatggcatcccactggctgcttgttaaggtgtccgaaatatcttcatagtcggccttatattttttgaccgtctttccatctgcatccacgattttattcatcagctgataattatattttttgccggaggccacggctgttacatagcgggacaatgcaacggtggtatagttgttatcactctgtccaatggcagccataaccggatattttgtcgcaacagatgatttgctttccgaaatctccagtcctgttttttgatccaggccatagatatgtgcatatttctgaatcagatcaataccgttggcatcattataagatcctgtttttttctgtgccagccggttgccgaccgtatagaaaaagacgttacaggaatcccgaattgcctcgaaaacattgtcaagtccgtgactgcccggataaatccagcattttggtttgttactgatgtcattataaattccggtacaccggatctggtcggatgtcgtaatcacgttttctgccagaccggctgttgcggaaaccagcttaaaggtggaaccgggtgcggtcttctgctgcgtcgcataattgagcagcggagaagatttatcatgctgcagagatgcaaaatattccgaatccacaccattggcaagtttgttgctgtcatatccgggataacttaccatggcacgaatttcccctgttttttcatccgtcaccacacaggaaccgatacatggttcaagtgcaagctgtgcaggcgtaatctcaatgttgtaaatctttttcatgagaaaatcccgtggagacaacgatccgtttttcaatttgtttacggttgcatcatcataatccaatactccctgatcgaacagaatcagacagagctgacgcggggagatttcgccacgtgtaatcatatactggtatataattttggaaaattccgtatctgtcttaatgttctttagaatatacttgcataatgcatcatatacttctgttgagtccgcatatttttcatcgacatttagctgactgatatcaatccagtgctgtgtgatacagtaatttaaatactctttcgggctgattttctggtctttccatttctggtaaacagaatcactggtatcaatctcattttttaagagtacctgatcgtcttttaacatggaaatgatgtaagtaaattcatccaacacttcatccgacattgtattcagtgcttccggtgaactggtcagttcctgttttattttgccaagcgttgtcttctgccgggatttaaaaacacttaacacacttttttccgtgtcagaggctttcgattttgaaaaatgctctgtgttgatgacactgttgccaatcagagccgtatacacatcgttgatcggaatctcccctgatttgatattggaatacacaatcgccgcaatctcattctgcaatgccagataggtagctttctgcagatctgcgtcgatactcagatacaggtcatctccggctacggaatcggtgctgctgataatttcggaaattcttcctacattatcaatataaaatttctgctctccgtttttcccacgcagataggtctcgtaatactgctccagcccggcttttccgacggtgtcattctgggtataatctttattctttttgtgcagtgccgtatactccgactctgaaatcggtccggtgtatccgatgattgatgaaaaatattcactgtagttatatttccggatcatatcttcgttgacggaaatgccgctcagtgtgtccatgtgctcatttacataagcaacggtcttgtccgatacatcggttgcgatttttacttccttgtatcttgcaaagcggtttccaagcatggcataacgaacaacaacgatacggtatgccagatccccatcatatttcgaactgatgccaaagttgtcttttcccatcagatattccataatctgttctgcggttgcatttgcctcatcgattccggtctccttgtcatattcaagatcatcggcagagccttttccgaaaacatccgcacgaaaacggttcagcgaggaaccggatacattaaagctgtatgtaccgtcttttttccggtcaattttgaaatcattattcagcgtttcaccattattctttaaaaccgtaagaatctctgcaagttctgcattgacagccttgtttttttcttttgtgcttgaataggttgtactgtcattgatggaaatggaatatgcaagttcattgtaagccagaagctttccgtttttgtcatatatatttccacgtgccgcattgatcggctgcttcatctgaatctttaaagaaaagttttcctgataagactttccgttgacgacctgaagggtaaagattcttgcaaggataattccgaaaaatacgataaataccgcagcaagcacaaaaaggcgggaactgaaaaatttcttcagaaaatctttgatatcataactcaaattttatagctctccttttctcgtgttcctcaagtttctgattaatcttgagaagaataaaatacaaaaagatggttatcaccatggtataaacaaattccggtagtatgatggatgtaaaataataccagaaagaaaaccggctgcgcataaaaaacataacgatatagatcatcaggttatttacgatatcactcgagccgatcagaatcatcggaagcttaatatcatccgggtaaaatctttttttgaacaatccgttgatgtaaccgatgtacatataaagtaaagcatatcctccgagataaaacccaaaaaatatgtcgataagcaatccacaaaagaatccaacccacagcccttcttttttcccacgcatgagtccaaaagaagacaccacaataatcagcagattcggaccgatattggcaaatgtcaaagctcgaaaaacggttgtctgtaagagaaaacagattgctataataataaaaagcacaatttttctacgcatttcctactcctgtgatttttgtgtttcggtattgtcctgtgtttctgtctgagtatcggatgccttctgggaagacagttccttttctccggtgtctttgagtgtcgtaatgacaagcacctcccgcagatgctggaaatcaacgaccggcgtaatggttcccgattttgtcaggttatttgcatttttttcaatggaggcaatgtatccaatcagaattccttcctgatactgatccgacacataagaagtcacgaccggatcgccgacctttaccttatcatcttcatcccggagttctgtaaatggtaacactttatcctgattcatggactttaagctgccaccgacattgaaattatcttttgtggtcagaaccatggaacttacattactggaatcatcgatgatgcttcgcaccttggcaaaattcggaccgacgtctgtgacgattccgaccagaccgcttccggcaatgacgttcatgccttttttgatgccttctttggaacctttgtcaatcgtaaaacttgaaaaccagttggttccgtccatggcgatcacatttgctgcgaccttctgatatccggaatatttatcatccagatccagaagttcccggtaattgtccagttcgtattgttcgagctttgtgacgtttaactgattggtcagatcgtctacctgattttgaagctttttgttttcttttaaaacttctccaagtgtttgaaagtcatttgcttttcctgaaatccaggaaccggcattgttgattcccttctgcatcggaacaaatacatatccggcaactgaatttaaaggacctccggaaagattaaataccagactcgtaaacagagcaacaatacacacgccggtaaggatcagcaaaatatatttacttgaaagatgctttttcttattgcgaaaactgcgaaattttttcataaaatcctcgaatccttgtttcttactttaacgtagtatttttcatgctgaatggaatccgtttatatttggagtccgtagcaatctttgaaagaccgcggactgcgctctcttccggattctcacaggtatttactttaatatttgtaatctgtgtaaacaactggtcaagatcttttatttttgatccgccgcctgtgatataaatacctgcatagataatatccctggcaagttccggtggtgttttctccagaatcagtttgatagacgaacagatcgattcaagatttgctttgattgcttcatagacaacctctgcggtaatttcacgttccaccggaagaccgcttacgacatccagaccaacaacggtcatcgtttcctgtcttcccggaagtccgcttccaagctcttcttttaatgctttggcggttttctttccgatcacaaggttaaattccctgcggatatagctgatgatagactcatcgagacgattggacccgaaatgcatcagatcactgagtacaagtcctccgagagaaatcacagaaatttcgatcgtgtctgctcccatatccacaaccatgactccggtaggctgatttacatcaattccaagtccaacggcatctgcaagtggtttttcacagagcataacgtttttcggacgaaatttgcttttataaaaaagttcaaagaatgcacgtttttctacatcggtaatgtctgtcggtactgcgacaagaaattctgcattctttactcttccttttaattttttctcaatataatcaaaaatcatggtctgcagaaaattgtaatctgcgatcactcccgtagaaaccggaaacgtaacgttgatgctttccggtgctttttcatacattgcataggcatcatcaccatacgcataaatctgcgttttgttgataatggcaatggtgtttttttcagatatcacttttccactggatttactgaatactttaaaattacatgtaccgaagtcaataccataaatattgttactcattgtcttctcccttttcttgtgttataacaatttattttcgcgaaaactgaaatactgctgatctccgattacgatatgatcagcaagggttaatcccaacaccgaggcgcctgcccgaatctgttcggtaagctttttgtcttctgtgcttggagttgggtctccactcggatgattgtgcaggataacgatcataacagcatttcgaagcagtgctttgcgaaacagttccatgggagaaacatatgcataactgatgctcccggttgcgatcacactgtctcctaaaaatttgcatttggaatcaaagaaagctgccataaaggcctcttccctgcggtgccggagttcttccatataataatcggcgatggaagacggacagttcatggataaatgatatccgcgtccggttctggcaatgcgcttggaaagctccgcaattgctttcagctgtgttgccttgaccgggccaatgcccctgcgttctaaaagctgttcatatccgatttcatacagattcaaaagatttccctgacactccgacaaaagatcacgcgcaagatccaaagccgtataatcctttgttcctgtctttaatataattgcaagaagctctgcatccgacagcgcctctgctccaagaatctgaaaacgttcgtaaggccgttccgattccggcaggtttttcattgaaatgtgactcaaaacaggttcctttctacttttccgaagccacatgaaaactcatattattttagcacagttcatctatattaacaaggttacgttcataaagtttctgtaaagacatgagaattccaagcttcgcatggtaccatgtcagacccccctgaaaataaacggcatatggcggtttcaccgggccatctgcggaaagttcgatggaagaaccctgtacgaatgcacctgctgccataataacgtcacagtcataaccaggcattgcccatggctccggagtgacatagctgtctaccggtgcagcagcctgaattccttcacagaaagcaatcatggcatcccggttttgaaattccacagcctgaataatgtcatggcggctttctgtactgtccggaaccactttataccccagtttttcataaatatctgccgcaaaaatggctccctttaaggcaccgcttacaacggtcggtgcaagaaagaggccctgataaaaggactggatcacaccaagcgaagctcctacttcttttccgagtccaggggaagtcaggcgatatgccgcattttccacacattcctttttaccgacaatgtatccgccaatcggagcaaggccgcctcccgggtttttaatcagagaaccgaccatcatatccgctcccactgcaagtggctcccggtcttccacaaactctccgtaacaattgtcaaccatacagatgacatccggtttgatatttttgataaatgtgatcagttccccaatccgctcgaccgacagcgttggacgtgtctggtatcccttagagcgctggatggttaccaggcgggtgttttcatggattgcattgcggattccatcgtaatcaaatgaaccgtccggcagcagatccacctgggaataagtgattccgtattcggcaagggaacctttggatgggcggatgccaattacttcttccagagtgtcgtacggttttccgaccggagaaagaagctcatcgcccggacgcagattggacatcagagcgagcgcaagtgcatgggttccacaggtgatctgtggacggaccagcgcatcttccccgccaaaacagtctgcatatacccgctctaaagtatctcttcccatatcattatatccgtatccgctcgaaatattaaaacattctgcactcacacggtttttctgcatggctgcaatgactttcatctgattgtattccgcatttgcatcaatcttttcaaaacgctcttttaattcctgttcgattttttcgccaaatgcataaactttctcggaaattccaagttctttatatttttcttccagtaactgattcattgtatgattcctttctcgtgtaaaacatccgtcattttctgtaacatctgatcttcccggtcattgaattcggatttgtccagccagatgacatccttttcccggcgaaaccaggtaagctgccgtttcgcaaaatgtctggtttcccgtttgatcacatacaccgcttcctcaagggagcagctgccgtccagataatctaaaatttctttgtatcccagtccctgcatggaaaccatatctttgcggcatcccatatcatacagcgtttttacttctgtaagaagtccctgctccatcattaagtccacgcgctgatcaatgcgccggtataatttttcccgttcgtccgtcagtacaaaatatgcaaaacgatacggagatgttttctgatgttctttttcgttgtgtgcggaaatcggcgtatgattctgatggtaaaattccagtgcacggatgacccgtttgatattattttcatgaatggtttcataagaaaccggatcaatttcttttaatttttcatgcagggcatgcgccccgtattcttttgcaaatgccgtaagttctgtacggtatgccgtatcggattcctctttggaaaagtctatgtcgtacaacagggactggatgtaaaatccggttccgccggcgataatcgggatctgtccggcggcatagatctgctgcagggcctcttttgccatctgctgaaaacggacaatattaaactcttcggacggctctaacacattgatcagataatggggtatccctttcatctcttccggcatgacttttgcagaaccgatatccatgtgtttatatacctgcatcgaatccgcggaaataacggcgccgtttattttttttgcaagttttattgataaagcggttttcccgacggctgtgggacctgcaagaatgacaagtggtttcatgaaacaatcctcttaaattttttctctatttcgtattttgacatggaaatgatggtcggccttccatgcggacagcaaaacggattttccagcgtcagtaattccgtcatgagtgcatccacttccggcaggctcagtttatgatttccctttaccgctgccttgcaggacatggtggctactttttccagtatcagttccggtgtctgccgtccggtcaggttggaaaaatcatcaagcatttcgataaacagatctttcatgtcaatatggtacagattatccggtactgcagagatcatatattctctgccaccaaaattttcgatctcatacccgaattttttgatttccggcagatacgtctctaacatttcctgctcatgggcatccagactcagcacaatgggcgggctgactgcctgggatgtaaattctttttcttttaattttgccatcatccgttcaaaaagtaccttttcatgtgccgcatgctgatccataatatacaatttatcctcgtattcgatcagccagtaggtttgaaacaactgcccgatgatccggtgctttttgcgggcatcatccgttaaaaattccggtgaagcagcggcaagggtcatctgttcgccagccggttgttttctgcaaagatctgcaggagggacggattcctcccgctttggaaacgggtcaaaggattcccgcaccatggttttatccggatgctgtggcaaatacggctcaaatgccggtgttttttttgatggcacaggcgaagccacaggagaaaccggtttttccggaatcggaggctggtgatgctgctgtcggatttcattgattctgcgcttttcaaatggttccggaatcggttctttgtatgccgggggaagattcttttttttatgttctgcttcatctaccgggacttccggaatcagttccttatgggaaagcagtccgaagagaacatcacacaattctttgtaaatttcctgatggtgtccaaaccgcagttccatttttgtcggatgcacattcacatctagggtatcctccagaaatgtgaaatacaaaactgtaaacggatactggtgctgcatcaggaaattatgataagcctcttctatcgatctggaaagcagagaacttttgatgtagcgtccattgataaaatagttttcgtaattccggtttccgcggttaatcacaggttttccaatatagccggaaagggagaaatattctcccttgtagtttacctctaacagtgccgccgcaatctcacgtccgtaaatatggtaaatgagatcccgttttttcccgtttccggaagtgtgcagtcttgtctggttattgttgatatatttaaaagaaatatccggatgggacagggcaagtttttccagcatgtcactgatgtaggtgccctctgtctgtgccgtctttaaaaatttgcgtctggcaggggtattgtaaaacagatcccggaccagaaatgttgtgccatcgggagcaccgatttcttcgtctgcaatttcttttgagccttcgatcacgtaccgggtgccggtcagggcatcggctggtttggtgatcatttccactctggaaacagcagcaatgctcgagagtgcttccccacggaatcctaaagaatgtacacacatcagatcttctgcactgcggattttgctggttgaatgccgcaaaaaggccagtggaacttcttcttttggaattccgcatccattgtccgtgatgcggatcagggaaatgcccccttctttgatctccacggtaatggcggatgcccctgcatcaatggcgttttccacaagctcctttaccacagaactcgggcgttccacgacctctcctgctgcaatcttatcaattgtctcctgacttaataacgcaattttgctcattcgtttttccttttttatatcctaccagcggtttttaactttgttctgaagctcatacagtttattgagtgcatccatcggggtcatgtggctgatatccacgtcccgcagttcctgaatgatatcgtcatcttttacggtgtcaaacaatgacatctgtgtcagatccacctcatcgagatgcggttttttctttttgccggaggcctgtccttccacggatatatttttcacggtttccgtaatatcgtttgcagaaagctggttgacaatgtcttttgcgcggttaatcacaagttccggaatccctgccagtttagcaacctgtattccataacttttgtctgcgccgccctttacaatcttgcgcaaaaagacgatgtcgtctcctttttccttgaccgcaatacaataattattgacactgtttaattttccttccagttccgtcagttcatgataatgtgtggcaaacagtgtttttgctcccagtaatttgggattgctgatatattcgacaaccgcccaggcaatgctgagtccgtcgaaggtactggttccgcgtccgatttcatccagaatcagaagggaattcgctgtggcattgcggagaatatttgccacttcattcatttctaccataaaggtactctgcccacttgccagatcatctgaagccccgacacgcgtgaaaatccggtccacaattccaatgttggcagattctgccggaacaaagcttccaatctgtgccatcagaacgatcagtgcgctctggcgcatataggtagattttcctgccatattcggaccggtaatgatggaaatccggttattgtgattgtccagatacgtgtcattgtctataaacatatcattgacaatcattttttcgacaaccggatgacggccgcctttgatatcaatcacgccggattcgttgatctttggtttgcagtaattattctgtcctgccacaagtgccagggaaacaaacacatcaatctgcgccactgctcgtgcggttgcctgaatacgtgcaacattatccgcgatggtatctcggatctggcggaacagatcgtattctaattcgaccagacgatcctgggaaccgagaatcgtatcttcgagttcttttaattccggcgtaatatagcgctcggcattggtcagtgtctgctttctcacatagtaatccggcacctgatccttaaaggaattggtcacttccagataatatccaaacactttgttgtatttgatacgcaggttcttaattccagtcttttcgcgttctttgccctctaagtctgccagccatttctttccatccgttgatgcgttccgcagccggtccacttcctcattgtatccggtttttatgatgttgccgtcacgtacggaaatcggaggatcatcgttgatggaagacttcaaaagtgcacacagatcttccagacagtcaaaatgttcccggattccggtggcaagctctccctttaaatcctcaagcagtgttttaatcggaggcagcatttctaaagaattgcaaaaagcaatcatatcccgcggattggcggtctggtatgtaattctggtaatcagacgttccagatcatatattggtcctaaatattcccgcaattcttcccgggtgatctcctgatcatttaaatttgtaatcagttcctgccgttttaatatctctgttttgtcgatcagcggctgttccacgtaagagcgcagaagtctggcacccattgccgtctttgtcttatccagtacccagagcagggaaccacgcttttgtttttcccgcatggtctctaccagttcgagatttctccgggaggaactgtcaatgatcatatatttcccgatggaatacggacggagttccagaatattagaaagggtgttcttttgtgtttcatacagatatttcagtaatgccgcggaggcaatcacaccacagtcgtaatccatcagtcccagcccttccagactctgtacatgaaaatgggacaacagcgtttcctttgccagatcatccccgaaataccaggaatccagagcggataccgcaattcccatgcgctccttcatatcatcgatatctaccccgctcatataaaacggctcgttgcagatgatttctgtcggactgaaacgattcagctcgtccaacagttttcgttcactgtccacttccgttacaaagaaatctccggtcgtaacgtcggtcgtcgcaatgccgtatttatccccgatatatacgatacacatgagataattgttttttgcctcgtctaacgactgcatatcaatgtttgttcccggagtgactacacggatgacttcccgtttgacaattccttttgccagtttcggatcttccacctgttcacagattgctactttgtatccttttttgaccagccggttgatatatccgtctgcggcatgaaacggaaccccgcacatcggtgcccgttcttccagtccacagctttttcctgtcagcgttagttcgagttcctttgaaactgttttggcatcctcgaaaaacatttcataaaaatcacccagacggtaaaacaggatacagtctttgtattcttcttttgtctgcagataatgctgcatcattggtgttacttcttgtttcacttttttctctctttctaataaaccggatgataacgtttcatcacatcatcagccagacgcagaccgtccatcgctgccgacataatgcctcccgcatatcctgcgccttctccacccggataaattccgtgcacacggctctctccatttgtatcccgcatgatccgcaccggagatgaggtgcgtgtttccatgccggaaagaatcgcatcagaccggtcaaactgcggaataatgttcgaaaaatgttccattccaagcaaaaaggaatgttccatgtcctctgtcatcagacctctgagatttgcaaagcaggtctgcccttttgtctgggaattaaaatctccatatccttggcttgcgatattctgccggtaatcgccaaacagctgctgtggaatctttccgtttcccagctgatacgttttatgttcgagtgtttcctgaaagtgcatgccatcaagtggatcctgtgctccgtaatcagcaggggaaaccgaaacaataatggcagaatttgcgtttttcccacttctgcccgaataactcataccattgacacaggttttttccttcatggaggaagcatttacgacataaccgcccggacacatgcaaaaggaatataccccgcgtccgtttggaaaattggacgtcaccttatagggtgcggcaggaagccgcagggcgtttctttttccgtttccgtacatggcatcattgatcatctgctggggatgttccacgcggaatcccacggcaaaatttttggcttccattggaagctggtgtctatgcagcatcgtaaaggtatcccttgcactgtgtccaagtgcaagaatggcgacgtctgccggaatcaccgtatcatcctccgtcacaagtgcctgcagtgcattttcttttatctgaatgtcttttaagcaggtctgaaaacgaaactccgcaccgtgttcgatcaggtaatctctcatatttttgatcaccttcgccagaatatcggttccgatatgtggttttgcatcataaagaatctccgatggcgctccgaatttcacgaatgtttcgagtacatagcggtttcttccggatggatctttcaccaccgtgtttaattttccatcggaaaaggttcctgccccaccttctccaaactgtacattggaatccggctgcagaataccggttttccagaagcgttcaacgtccgcactgcggtcttctacctgttttccacgctctaaaataagcggcgcatatcctgcaagtgtcagctgccaggcggcaaaaagaccacagggaccggctcccacaatcaccggacgccggtttaaacgctcatgccccatttccgaaaaacggtaaccggtttctgtcacaaggctgacggaaggctgatgcagtttttttacgatgctgttttcctgacggatcgttacatagatgcaatatacataaaacaatgacggctttttccgtgcatcgagggaacgccgcatcacctcgtaatgaaatgtttctttcgatggaatacgaagtgtttttctgattttatcttccagatctttttgggaatgtcctactggaagctttaactgattgattttaatcattatgaacctactttacttcctgcgacatgtccgctggaccatgcccattgcaaattatatcccccacagattccatcgacatccaaaagttcaccaacgaaatagatgcccgggacaatccgtgattccagcgtatctgtgtggatttcttccgtgtggattccccctgtgcacacctgtgcagcagaaaaatcccttaccttttttaaacggacaggaaatgtctgtatctgtctgcagagcgtttcggtctgcttttgggaaatccgttccgtgtgttcatgaaccggaatgcctgctgccttaagtataaccggaatcagtttatggtttaaaagcccacgaagtgattctgcggcatcctgtatcccggcatcccgtgaaaatctgcgctgcagttcctgcgcaagcatatcttcggaaaaatccggcagaaaattaatggtaagctctgccggttttttctgatacagtgctttcgaggccggactgctgacctgaaataccggaataccggaaattccgtaatctgcaagctgcagttctccccgttcctgttcgcatttctgcccatctatgtacaaagacaggagtgcgtccgtgcggactccggatactttggaaaattccattccttctgcctcaaatccacacagtgccggcaaaatcggctcaaaccggtgcccaaacgattttatcagcgaaatcatggatccatcgcttccggatttcggtgcagcacgaagacctgttgcaaaaacaagattgtgggaacaatacgttcccatggatgtccgtacctcaaatccgtattttgtctcacaaagctgccggatgtcacaggaagtgaccagggaaactccgcttcgtttcatttccgcggacagcgcatccgcaacggaagaagcctgtccggagtttgggtatacatatccgttcttttcttttggccagatgccgatctcccggaaaaacgcaagggtatcttccactgtaaactgctttaaaatttcctgtaccagtccgtggtctccgtaataacaccggggagacatcttaagatttgtaaaattacattttccgtttccagttgccagaatttttttccccggcttatccatatgttctaagacggtaacggacaatccacgtcttgcggccgtaattgcggtcatcatgccggaagctccggcgccaatcacgagcacatcctgttgttttgattttttcttatccatagtccacctgtcattttatctgttaaaccagttaaatattttatcatatgggtataaaatattcaactcgaatagctttccaaaaagtcaaaaaggctctcttcatctgcaaatccaatgccattttccgcctgtttctgcagtttttgacttaaattctcacttcgaatcccggtttccatatatacggtttttccatccggtaaaaaaacaaccagccggctgtcctgtgtacggataatataggcattttccgtttctttgtaaggagttccggtcaaaacggtgtgctctgtttcggatgcatattgttcttgggtattttttgtgttttctacacctcttttctgataccagatgccaaagaccagcagcagaaccagacaaagaagaatgcagatgcctgttttttgattcatatcatcaccttctaacagtagcatctgcattttatttccgttttataccatttactttaataaatgtaatttttttgcaacccggacaatcagagttcctttcgggaattttttaatctcctcttcggtcagtccgtgcagtaacagtaagacaactgcatatacgataaccgctgcaagaattgcaagcatggcagataccgcattgatttttaaaaccgcatagctgccatgatagacgatataggtaataattcccataataaccgaggaaattcccggcacaataaatgttttgtgaatttcctgatgatagccgctgtattttcgtattgccagcgcattcataatacacattaaaaacgcaaagaacatatttgcgataatgaccgcatagatattcatgcggaaaaacagcatcagtataatcagtacgatcacatgagcgacaagcgaaaccgctgcattgataaccggaatctttaaccggtcaatgccctgcagcagtccgtttgaaagcgtagacattgcataaaacacaaccgccattgccccaacccacatcatggtacctgccataggtgccgtctgtgccgttcccgggaaaagcagacgacagatcggctctcccaatacagcaagtcctatggcacaagggaaagaaatcaccatgataaaacgcatggcagaattgatctgttccctgacttttttcatatctttctgtgcaaaggacatcgtaagtgtcggcacgcaagaggcagccatcgcggaggcaatggaaatcggaacattgatcagcagtttatattttccggaaaaaacgccccaccatacatcaatcttgttttcagagtatccctgcaataacgcaacatttttgaaaatactctggtcaatgatactgctgatattgtaaacagttgtacttaaaagaaccggaacaattgtgataatgaggatcttcatggtataggcaaatggttctaccttaacgcctttttcccgtttcattcttcgcttaaagacatgcatataagcaaaaaatacgaaaagtacaaaaatcagcgcagcgacagatccaaggttcgttcccaatgtgcctccggctgcaccgtatgcaggcccgtaatgttcggcatcaccgagaaccgctccgatccttgttccgtagcgatacagaacataagctgcccatacactgatgatggcattaacaatctgttcaatgatctgtgaaatggcacttggcatcatcgtgccaagtccctggaaaaatccacgcaaaacgccaagaaccgcaacaacaaccagtgccggtcctaagattttaagtgcaaacacactgtatggtgtttttaagagtgttccggtaaaaaattctgctccgaaaaatacaacaagcgatgccacaattcccgataccagggcaaaaagaagtgcaccttttaatacctgatataccgaccggtaccgccctttggccgctttcgcggaaaccgtctttgacactgcctgtggcagactgtaggatgaaataatcaaaatcacgttgtacacgtcaaatgcacaggcataataactgattcctacatcgcccagaatattgttcaatggaatacgatacaccagtccgatgattctgcttataattgacgcgaccgcaagaattgatccctgaaccagaaaatttgttccgttattctttgatttacccatcttctaacctcaatgcttttgtttcttttattccgcgctgattttattttgggatgcacggctgttttcgacgatctctacccatgtctttccgggatttaaaataatttcctgaccatcctgtgtataataatgtgtaatatcatttgcggatgctcttttccatgtaatcgggacagcttttccgtttgtgatgtacattcctgatccaccggaaagataatcgatatctaacgttccgtttttggaatctttcaggttgctgtaacaattctgtaaaatgatatttttcacagcaagctgttctccggtagaaccgtcaatctgtttatcaccaaattcatagcggtaatacagaccatccgtttcattgtatacaaaccagggcttcgcgtcaacatagtataaggatacttttttcgcaacttctccctgatccagcagattttgggaatcttccgctgtaaaacgataatgcgatgtataattttccggaagctttgtatcatacccgtatgtcttcatggcagaggctaaattttctccggttgtatacagattatgcggtgctctgcggcttttgtcgcggtaataaaaagccccgccttttcctgtaattccatccacattgtcaatgaatgaactatttaaaacatcaagtgcatatttactttcgcctgcatgaaaataaaccgcctgaaattctttggcaaaatatacataatacagacgacagcttcgcacatttcccacttttttaagagaagcataatcctgataaattgtcatcagccgggtaatgccgccttccaccggacattcatagataatatccgcatttccgattccatactgtggaagggttacgtgtgtgttttctgtcatgacggcaaccggacgattctttgcttttttttcatccatccactctcccgtatagaaacttcggacttctccttcgtgggtttccaccggttccggctgatattctgtttcggcagtttctgcaggtacatcctgtgtggatgaaggtgtgggagcttccgattctttacttttgcatccggcggataaaatggcaatcgcacagacaacgcctatcattttccatctctttttcataaaacacatccattctttaatctcttacgatatgcatctcttcgagtatctgtttttgtttgggttccatgatggccgcatctttcggatcaatgtggtcataaccaaacagatgaagcatgctgtgtacaatcagaaatgcaaattcacgcttcggactgtgtccgtaactttgtgcctgttctaacactttatcgaccgatataataatatctccaagcatgacttctcccgtatccggattaaaatcatcttcactctcctcttccagaaaagaaaaatctccggctttctcataagaaagcatcgggaaagaaagaacatccgtcggacggtcgatctggcggtattccagattgatccgatggatttcttcattgtctgtaagtgtcagattgacttctgcttcataaggaaaattctcatgggacagacaaaaggcaatcacatcctctgcaagcttagcatatgcaaaatcaaacggtatgttacatgtttcttctaaataaaaactcaacgaagtaattcctcctttgcaagaaattcacgaatctttaaaaactggttcatactcattccggaatggtcataaatttcacttgaggaaaaatcattcacggtctgataaattacaatatcacggttccagacactttgtcccacattttgttccatcgcttccagacggatcacaaccgcatccaccatatgcaccagagcggattccggtgaagatggaagctgctcttctccatagtattctgccagaatggagatcagctccgccggaaaacataaggattctgccttattgaccgcatttttgatatatggctccccgatccagcgccccatacggtaataaaaaccgccggcaagacataagttcgcccggtatcccacttcttttgcacagcggcaggcaatgtctgaaactttcactgcgtggcggtattccaccatggaaaaatccttgagggcttttacttccgaataatcctcggacacgatatccagcagatggttttcaatttcctgatccgcttcatgaagcagccggtgaaacagaaaagctgctgtcagaaaagtcaggaatgctgttccaaaagcataaagcagcgaatatttctgcatttctttcgttgataaataggaaaacagttccggaatcatcagactgaaaaagaaagtcagaagggatacacccatacggtattttttttcttttaatgcctgtgccagtacagcagcaagcattgtaagcatcatataagcagcaagggcataaaaacttcccccgacagtcagtgccagcaccagatcgaaaaacaatccaaaagacaccgccaccatggaatttgacactgcggtgagcagaatcaccgggatcatcaccggacggtaaaattccggaagataactgatcgcatagatcaatcccccactgaccgtataggtaacggaaagacggataaaggttgtctgtgtgtttgccgatattcctttctgctttcgttcatattccagttcaaacatgcagaccagaagaaaaatcagggtcaggaaaaacatactgagccattcatccggatacaggtggcttttggcacataacccacccatcactccaaaagtgacaagcgcgatcaccagaagcgatatgacgcgatagaggtttattgtctctttgggtttcattttttctcctgtctggcagacttacgcgcactccggctgctctgtctggactcataatcatcataagcctgtacaatcttttgtaccagcggatgtctgacgacatctttgcttgttaatttacagattccgatttcttccacatttttcaaaaccctaagtgctacatccagcccggatttacttcccggggccagatctttttgcgtggcatctccggtaatcacagctttcgagccgaagccgatacgtgtcagaaacattttcatctgtgccggtgtggtgttctgtgcctcatccagaataataaatgcgttgtcgagtgtccgtccacgcatataagccagcggtgcaacctcaatcagacctttttccatatttttctgaaatgactccgcacccataatctgatacagggcatcgtataaagggcgcagatacggatctactttgctctgcagatctcccggaagaaatccgagtttttctcccgcttcaattgccggacgtgtcagaatgatgcgtcccacttcttcattcttaaacgcagtgatcgccatggccatggccagatatgtttttccggttccggcagggcccatcccgaaaacaatcatttttttacggatattatctacataatccttctgtccgagtgttttaggctttaccggttttccctgtatggtatgacagatcacatctttatccatctctaccatctcagaccctttgtgttcctgcaaaagagcaagtgcgtagtttacattctgttcgctgataacatttccccgttttgcaagctcatacaactgttcaaacacttcctgtgcgccgcttgtggcagatggagtaccgataattttcaactgatcatcgcgtacaacaaccgttacacccagtgttcgttctatttttttgatattggcatcaaactgtccgaagacatttgccatatgttccgttggtatccggagcgatacttcattcagactcatttacaggttcctctcgtttcctttcggttggtactaaagttgtgattttttcacacccctttacctgaccatagatatgatagtttttatctatctgttcaatcataacatttttgtcgacaattcgcaccccattttcttccaattccgaaagaaattgtgaaaaatgtgtcaaggcaagctgttttacctgttcttttgtcagcataacggtcttttcctgcagctcagacgttgtgatttctccaaaataaaccggaagataaaaactgtcctgcaggcaaaactgccgggtatccgttacagaacgctccgatgcatactccgcatgcaaagccggagttaccagacgccaattcagaacctgtagaaaatatcgtttgtgtttattaccggtttcttttttttctgtcattttggaagaaatccagtcctcatagggatgcatcgtatatccatatacatcggcatcggcgcttttataatagtattcccgcacttccccgttatcatcccaaatttcctgccgtccacagaccagcacatcgccttttttcactttatcaccctttttcactttggcaagcccgctccttgtaatgaccgatgcaatcgtagcatccgcagatgccgccagatccatacaggtgccctctgcttctttcgtttcctcgtgagaagaaattttctcctgtatctgtacaaccagccgggttcccgtttcgtatacacttgcccagatcaccggttccaagtcctgacgcagggacagctccagtgcatcattgtcgatttcctttgccggcatgccataggtaacgttgtgtgcacttaaatattccagaatggcgtcttctcccagagaggaattccctttgatttcaattctccagattctcgtactgagcacccagactcctgccatgacacacaaaaggacaaaaattccaagttttcttgcgcggtatttctgccagaaaaacggaaagccgatcctttttctgatgtggattctcgtttttgttttccgcagatatggacgcagttcatacagatcctgcaaccggatataaaaagaaacctgcgtcggagaatccggctgtatcttccagaacataatttcgtgacgtgcacataaatttaaaaaacgggaaatgttgcttccgcatgcacaaaccaaaagactgccattgacgaatcgaagaaacctttctatcatggcagaaatgtgatctcctgcatatatccggaaatttcgataagatccgccgaatatttccggatggacagactccttccgacgatccggatatgataggattgtgttgcaattccgatcacctccggacagtattttataattccacggtggttaacgatacaaagtgtacggtttccttccatggaaagaagcggcatccccaggaaaatgtcttttggcagttccatttgttctacgagatgctcctgttttattttgtgtctggtttgattcgaatggcttttcatacttcactatatgaaaagcgaacccgtcctatgtctctaaattcagggatccgtttcggtacgcttccaaaaatacattaaattctacggccatcatcataatatacatgcaaaaatacagccaaagcataatcagggcaatggttgtcaggcttccatacatggaaaatccattaaaataatcaacatagatggaaagcccgaaggaaaaaacataccatgcagctgcacatgccgtggctccaggaagctggcttttaaaggtaagctttgtattcggaagtgcggtaaaaatcacgtcaaaaaacaggatcagaagaagtaacatgataagcccccggaatttgattattatttttacgagatgtgcaataaacggaagataatctgccgctaaatgccgcagactgtttccaaaaaccagcacaacaagcgtaaatacaatcgcaaccagaaaaacaatggtataaataaccgcccagaatcggagtacaaaccagtttcttgtctcttttaattcgtgaaccgcattcagaccatctgccatatactgaatgccttttgcggcagaccatatggcaataattgccgtgaccgaaatgattcccatggatcttgtatagatttcttttacaagggtaaccaaaaacggagcaacatactgcggcatgactctttctatgatttcaaataccatatcctccgtgatactggtatattgaagcatggaagaaaacaccataagaaacggaatgatggataaaataataaaaaaagcgatctgtgcggaataagcatttattttgtctttctggcatttggctaaaaaccgggtaaccagacgtattgctttttgcataccaaatgatcctttcttctttatttatgatatggttcgtgatgcatgatacggtaagaacgataaatctgttccagcagaatcacacgcatcagctgatgggggaatgtcatcttcgaaaagctgagtcgtgcatctgcccgcttaagaaccttgtcggataatccaagagatcctccgattacaaaataaatatggctgactccgccaagcccgagtttttcaatttcacgggaaagttctatcgaatccggctgttttccatcgatcgccagcgcaatcacatagccgtccgggcggatggattttaaaatacgctccccttcccggtctttgaccatggcaatttcggtttcgcttgcctgttcttttgtcttttcatccgccacctccgtaatggataacgtacagtagcggctgagccgtttggaatattccctgacggcttccgtataaaatttttcctttattttgcctacgcagataattgttattttcatgttgttattttactatatttctctgtaaatttgtagtgaaaaatgatatactgtaatcaacaaatacaagagaggtaacgaaattgaaagaattacaggaaagaattaaaaaagatggaattgctgtcaatgaagacatcttaaaagtagacagttttatcaatcatcaggtagatccggtactgatgcagcacatcggggaagcttttgcggaacacttcaaagatcagggcatcacaaaggttgcaaccattgaaagttccggcattgctccggctcttatgacagctatgtgcatgggtcttcctatgattatcttaaaaaaacagccttctaagattttaaacgacaatctgttccagacagaggtcacttcctttaccaaaggaacaagttatgaactgacgctttcttctaagtttgtctcagaaaaagatcatgtcctgatcattgatgattttctggcaaacggagaagcagctaccggagccatccgtctgatccgcaaagcgcacgctaccattgcaggtgtaggtgtcctgatcgaaaaagcatttcagccgggacatgaaaaactggtttctcagggatttgatgtgtatccccttgcaagaatcagccatatggcaaaagatgagattgaatttctggaagattaaaccacctcttccacaacagggagtgttgatatgcccatgcagttataaagcatcggcaatcacactccctgtttgatttttaacaatttctatattattttattcttctgcattgtctgcaggatcatctatatcatcttctgctgtatagtcctgtgaataataaataaaatttcctctatatacatccgaacttaatctcgtcgtatgatcaatgatcacaaccgaaagaatattgtttccttccggaactttgatcggctgcgtataaagatgactggcagcagtcggcgtacttccgtcccaggtatagtaagcactgcagccgcccggaacggtaatcgttacggaagtttccacgccgaaatctccaccgtccggagaaacaatcggttcatccggtgccgggatggaaattttatagtttgcttctgttacctcactgtaaactcccttttcgtttttacataccgcttttacggtataggttttattattttcatccagtttcacaggttctgtgtatcgcaatccgcgttcttttggatctgacccgtctaccgtataataaatttcatagccttttgtggaaagcatctgtagtatctgggcattttcaaaacttccgctctttaaactgaactgtggtccctctacctgataatcggcgaaaagatctttcagactgtcatccacagcctcggagagagaaagtatggcatcggtattgttctgcttctcataaatggcaatcagtcctttgcatgcctgacgatttttcctgtccgcacggatcacttcctgatataaaacaagtgccgaatcataatcgttttcttcggtatacagttttgccagagccagccggacttcaatactgtttttatccaatgccaatgcattttcatagcaggcaattgcatttttggtatctccggctttttgtgctttctctgccagtcccacctggtaatcgaaggaattggcatgattggaacggattgctgctccaagaattaacagggcaaaaataagcacgcatacgattccgagaaccaggaagataatttttttctggcgtgggtcgaggtgttttttccccggatgttttgtctctgcaggtgccggttttttatttctgtccggtctggaacctgaaatcttttgggattcttccgtaagaacctgattcagataatcatcatcgtaaatattgtagtccggcacaatctgtacggctttcccgcattttggacagtacagactcccctcttttaattcctcaccgcaataaatacacttcatcatctatcccctatctgttttatgaataaagtttcatggcatctacacagttatgcatgagcatcgcaattgtcatcggtccaacaccacccggaaccggtgtaatataagaagcgatctgctctgcctcttcgaaacggacatccccgcacagcttattttcttcatttctgtgaattccgacatcgatgacaaccgctccttctttgatataatcggcaccgatataacgtggttttccaatggccacaatcagaatatccgcctctttgcagatttctttgagattttcggtccgtgaatgacagatcgtaaccgttgcattttcccgaagcatcagaagcgccatcggttttccgacaatgttgcttcttccgattaccacacagtgctttccggcaatttcaatattgctgcgttttaacagctggataataccggcgggcgtgcaggagacaaatccttttttcccaaccacaagtgcaccgacattctgcgggtgaaaaccatcgacatctttttgcggatcaattgcctggatcacatgatcttcgcagatatgtttcgggagtggaagctggcacagaattccatgaacatctggattgtcatttagtttctgaatcaatgcaagcagttcctcttccgtggtttcttccggaagttcatacgaaagcgactctattccaatatatgcacaggctttctttttatttctgacatatacgctggatgccggatctgcgcccacctgaatgaccgcaagtgcacatgttttcccctgtgccgcatatgctgcaacttctgtctttaattcttctttgatttccgctgaaatcttctttccatctatgatctttgccatgcccttatctccttagaacaatcctgtgattacaccgtcatcattgacatcaattccgtaagctgccggtttctttggcagacccggaagcgtcatgatcgaaccgttgacagcaacgacaaagccggcaccggcagaaacatatacttcccggacattgatcttaaacccggtcggtcttccgagtttcttcgcatcatccgacagggaatactgtgtctttgccatacataccgggaagtttgccatacccagatccgtaattcgtttcagttcccgctccgctgccggagaataggtaactccatcggcaccgtaaatttcttttgcaaccgtctcgatcttttctttcagtccaagatcatcactgtagagagtatggaaatggctttctttcttttcaagtgtctcgagaattttgtttgccagagcaattccgccctctccgcctttttcccatacttttgccagagcaaattcacagtcatgctctttgcagaactgttctacataagcggtttctgcctctgtatccgaaacaaatgcattcaatgtgacaacgaccggcacaccgaatttctgaaggttttcaatatgtttctccagattgacaattcctttctttaatgcctcaaggttttcattggataattcatccttcaaaactccgccattgtattttaatgcacggatcgtcgcaacgagtaccactgcatccggatgaagccctgccttccggcacttgatatcaaagaatttttccgcacctaaatccgcaccgaatcctgcctcggtaattacataatcggcaagttttaaagcagttgtggtagcacgcacgctgttacatccatgtgcgatattggcaaatggtcctccgtgaacgagcgccggtgtatgctccagtgtctggatcagattcggctttaacgcatcttttaacagagctgccatagatccaactgcttgcagatcttctgcagttaccggcttgccgtcaaacgtatatgccacgataatccgtcccagacgtctctttaaatctttcatatcttcggcaaggcataaaatcgccataatttcggatgctaccgtgattacgaaatgatcctcacgcaccattccgtccattttatttccaagtcccacaaccacattacgaaggacacggtcattcatatccagacagcgtttccataccacctgtcttggatcaatcccaagcgtatttccctgctggatatggttgtccaaaagagctgccagcagattatttgcagaagtaattgcatgaaaatcccctgtaaaatgaagatttaaatcctccatcggaacaacctgggaatatccaccacctgcggcaccgcctttaattccgaaacatggtccaagggaaggctcacgcaacgcaatcattgctttttttccaagttttgcaaatgcctgacccaatcccacggtgactgtcgtttttccttctcctgctggtgttggattgatggcggtcaccagaatcagttttccgtccggattgttgtggcttcgtgcaatcagttcatcggaaatcttcgctttgtactttccgtacaattccagatcttcttcttcaattccaattgttgcggctacctctttgattggctgcaatgttgcttcctgtgcaatttgaatatctgtcttcataattttctcctcctgaaatgttttttataaatcctcttttactgcctgtaattcttcggaagtcatcagaactttccgcggtttcgttccttcctccggtccaacgataccagcttcttccaactggtccataatacgggcagcacggttgaatcccacttttaaatatctctgcagcatacctatggatgctttttccttatctacgataatctgtgctgcttcatcaaaatatgcatccctgccgtcatcctgcgcatccgcatcggagatagacacggtggtaccgccggatgatgcctgcatactgtccactttctgtacaatttcttcgttatacgatgcagtttcattttgttctttgataaattccacaacatcggaaacttctttatcggaaacaaatgctccctgtacacgaatcggtttcggtgccccctgcgggtggaacagcatatctccttttccaagaagcttttctgcgccattcatatccagaatcgttcgggaatccgtacccgaagtcaccgaaaatgcaatccggctcggcatatttgctttgatcagaccggtgatgacattcaccgatggacgctgggttgcaatcaccagatgaatccccgccgctcgtgccagctgtgccagtcggcagatggcctcttccacgtcattggaagctaccatcataagatctgcaagctcgtccacaatgatcacaatctgtggcatcttttgcgggcgctcctgcccttccggtacttcaatggaatctacctttgcgttgtatccattgatttcacgcacatttgcctccgcaaatttttcatatcgttccgtcatttccgcaactgcccagtgcaaagcaccagatgcttttttcggatcggttacaaccggaatcatcaggtgcggaattccgttgtagacacttaactctactactttcggatcaatcatgatcagctttacttcatccggtctcgccttatataaaatactcatgataatcgtattgatgcagacggatttacccgagccggttgcaccggcgatcagcagatgcggcatctttgcaatatcggttacttttgttttcccggaaatatcttttccaactgcaaaactgatcttggactttgccgtctgaaattccggcgattcgatcaggtcacggaaagcaaccataacattttctttgttcggaacttcaattcctaccgctgcttttcccggaatcggcgcctcgatacggatatccgcagctgccagattgagtttgatatcgtcggtcagcccgacaatcttgctcaccttcacacccatttccggctgaatttcatatcttgtcactgccggtccgcagctgatgttggtaacggtgacattgaccccgaagttctttaaagtctgctgcagcttatccgcagtttcccgcaactgatgttcagtattggcagactttttcccttctccctttttcaacagatctatggatggaaaaacatatgctttgtccggtttgtgttccaaacccgacgtctccatttcctgtgctactttctgtacttcgttttggatttcctgttcgtttttctttttttgtgttttttctgccggctttgatgcatcttttgccggttttgggatatgttccggaaccggtgccgcctgcgacggttccggtggaaaagtatccggcataaaatcccccgaaatctccggctgtatttctgccgcgggttcttctaaaaccgccactggtgccggagaagaaattttttccggcatcggagatactgtggtatccggcatcatatcaaatgcaggtgccgacagttctcccatttcatccgattttctctttttattttttttgcctttttcttcaatccgtgtatcgatggatactccggacactttatgatccatgcggcgttctttccgctcctgtgcacggtattccctgtattcccgatacttttcattgctttcctttgcggattcatagacctttttgccgcctttttgcattccacgcaatgccgaacgctctgtaatcagtaccatacagacgatcagcacgataatgtcaataataaaagacccgatcagtccaaatgcctgacacatgtaataagccagacatccgccgatgatgccgccaccggtatgccgttctgcacaatatgtatatgcgtcaagtggatggacccggtcgtttccattcatggccagtcccataaatgtacataaaaagaccaaaaatacaattgccgcaatcaattttacggctgccagcttatttccacggttcgataccgcaaaaaaactgcccacaagaagcagcaccggaagaacatatgccataagtccgaacataccaaaaagaaagccgctgacggttttgccaacggctcctccgaatcccagattactgataaaaagcagcagcgcagctgcaacaacaatccacaacgttacttccacgcgaaatgcctgtgctttctctatttccgccatacgctctttttttgtctgtgtttttcttttatttgatgatttacggtttcccgcagccattggacacactccttcatacaaaactctttttattttatcatatttacaccagaatgtcacccatcagcttttttaattatttttaactattttcccctatcagctgatacagctttgcaaatgcatccgaaattcccccgacagcatcaataatgccttctgacactgcctgtttcccgacaagaatcgtaccgagatccttggtcagcatctgcgtattcatcatcatttctgtcatccgttcctccgaaacgtgacaatgggaagccacgaatccggcaatccgatcctgcatctgtttaaagtaatcatatgtctgttttgccccgatcacggttccactcatccgtaccggatggatcaccatggttccgctcggaacaataaaagagtaatctgtggaaacggccagcggaacaccgatggaatggctcccaccaagcactaaagaaacggtaggtttcgaaagcgacgcgaccatttccgcaatcgcaagtccgctctccacatctccccccatggtattgagcaataacaaaacgccatttacactctcatcgtcctcaatcgctgccagacgtggcaggacatgttcatattttgtcgtttttgaagttgacggaagacattcgtgtccttcaatttctccgataattgataacagataaatggttgtatttctccggtctgcatgtaacattgcctgtccgaattcaataatgttatcattttcttttttggtatctcccattgttttttcacctttgccattcataaaaataagaacggatacaaatgtatccgttcttatcttatgaattattttctgttttattcaccgagaagataattatacagtccctcatagcggaattttgacgcattccatgaaaaatcatttgccattccacggtctaccatctggttccactggcgcttgcggtcatagaaaatatgcttggaataattaatcacctgcagcatttcgtcagcgttgtaatttgtaaaggaaaatccatctccactgttatcatattcattgtaagcctgaaccgtgtcttttaatcctccggtttctcttacaatcgggacggttccataccggaaagaaatcatctgtgtcagaccacacggctcaaagcgggaaggcattaagaacgcatccgctgccgcataaagcttgtgtgccagatcatcagagtaacagatatttgcagaaacccggttcggatatttccatgcgtagtgccggaacatattctcatactgtggttccccggttccgatgactaccagctgggtaaattcatctaccagtccgtccatgacggcattgatcagatccagccccttttgatcggtcagacgggaaatgagtccgatcatgtatttcttcttatctacttccagaccaagttcttcctgcagccgttccttgttcacatacttctttttccggaaactggacgcatcataattcatgtaaatcttggaatcggtctgcggattgtaagttgtataatcaattccgtttacaattccctgcatgtcaaaatgacgtgcagacaacagtccgtttaatccttcaccgtaatattcggtctgaatttcctgtgcataggtatcgctgacggtagtaatataatctgcataaacaagtccgccctttaacatatttgcatctttattaaattccagcttatccggaacaaacagatcacttgagaatcccgtaagtcccttcatggtttttacatcccagattccctggaacttcagattatgtatggtcataatcgaccggatgccccagaagaaagaatccgcctgaaattcgttctttaaataaacaggaatcagtccggcctgccagtcatgacagtgaatgatatccgggcggaaaccgatcagcggaagcatggacaataccgctttgtcgaagaacgtgaatttttcaatatcatagcgcatatctccatacggtacgaaacagttaaaatactcctgattatcaatgaaataataggtgactccatccagtttatattgtaaaacccctacatatttacttggaatataagaaccgcatgccatataaaaatgggtcacatactcaaactgactgcggtatttttccggaatacagctgtaattcggaataacaacacgcacatcccaatccttatgatcaaatgttttaggcaaagccccacatacatcagcaagtcctcctgttttaataaaaggaacacattcggatgctgcaaataagattttcttcatacctgcctcctaatttaaaaccctgttttgcgtatgacgcatttttacagtatgtaattttactcttcccagttgtgatatacttcctgaacatcatcatcgtcatccaggaaatcaagaattcttccgatatttgtaatatcagcctcatcggtcagcgtcacatatgtctgtggaatcatggttacttccgcagatgccatcggaatgttctgctcttcaagtgccttatgtaccgcatcaaaatcttccggagcggtagtgatctcaaagctgtcatccgcatcggaaaaatcttctgcacctacatcaagtgcaagcatcatcagatcatcaccatccatatcacattcttctttgtcaatgataatctgtcctttttcatcgaacatataggatacacatccctgtgtaccgatacttccctgtcccttggtaaatgcattacgcacattggctgctgtacgattcttattatccgtcaggcactttacaataattgctgtgccgcttggtccatatccctcatacgttgttgtctcgtaattaacactgtttccatcgcctgccgcttttttgataccgcgctcgatggtatcattcggcatattgtttgactttgcctttgcgattacctgtgcaagtttgaaattatttgccggatccggaccaccctcttttaccgcaacagcaatttctctaccgatcatggtaaagatctttccctttgctgcatcatttttttcttttttgtgcttgatattcgcaaatttggaatgtcctgacattgttaaaatcctcttttctaaattgtattctatcctgtaaccatccatacttcatgtcattcgtacagaagcattacctgtattttattctatcattctttgccgtttcgcgcaagtgggtcatcctccggccgctgatgctttgcatctgctttttttacaagaacctcacggatcattttatccttcactttccgaatggaaaattcatatccgtacgcctgcaatctggcagtttcaccatcatttggaattttttccatcagggaaaccagaaaaccgttgagcgtgtcaaaatcatcatcatttaccggaatctgtaacgtttccgccacgtccgaaagacttgcgaacccgctcatggtataacttccatctgtattctggcgaatcagctgttcttcctcatcatgctcatcctcgatgtttccgacaatttcttccaggatatcctccatggctaccgcaccggatgtctgtccatattcatctaccactatgaccagatggctcttttttgcctgcattttctggaaaagagtatgaatatttaatgtttccggaacaaaatccacctcccggatcagccccttaatgtctttgatggaagtacggaatacctcatttttctgtgcaaaagcaaatgcgtctttaatatgtaaaacaccgataatattatcgatgtcctccagataaaccggatatcttgacttattgttttcaatgatgaacggaacagcatcattataggaaagttccccatcgatcgcaatcagattctttcgatgtgtcataatatctttggcttctttgtcaccgaattcaaaaatattgtgaatcatctctgcctccgaagcacgaagaactccctgttcgtgtccttcatttaccatggaaataatctcttcttcggtcacatcatcctcatgggaagacgggtttaaaaatcctataattttttttaaaatattcgtcctgccggaactggcactatcgtccatttcgtttctcctttaatgtatataatactccaaatcataccatgggaactgtattccgtcaagttatgtatacaattccaggctgatctccagtgctttgtcaattttcaaaagaatctgatgatccagatgacatactttatctttcagccgctttttgtcaatggtccgcaactgttccagcaaaacgacagaatcctttgccagatcgtatttgtcacagtttaattcgacatgtgtaggaagttttgctttatgcatctgcgaagtaatcgccgcacagatcacggtcgggctgtgccggttcccgatattgttctgaatgataagaaccggccggacgcctccctgttccgatcccacgaccgggcgcagatctgcataataaacatctcctctttgaatcaacatacgttttcaccccatactttgtgatactaaaagtatttccatatttctcacatgtattcaaaaagatgatttcatactatatgttattcaaaaaggagacatctgtgtaatcttatgattcctgtatacagattcttggcacacgcggtgtgatcagacatgcaaattcataattgaaacgaccggataattcgccaagctcttccatcgtgatacattcgctgccgtcttttccgagaagggtcaccggatcgccttcttttgcttccggaatttcggtcacatcgaccataaactggtccatgcagactctgccgcagatcggagccttcttcccgtgaataagaacatagcctttattggaaagccctcttgcataaccatccgcatagccgaccggaatggttgcaattcttttttctgacggtgtctcatagataccgccataactgatcttacgcccttttcccagtgtcttgacaaaagcgatatggctctttaaggacatcaccggatgaagggaaatattgtgtgccacttcctccgatggccacataccataaagagtgattccggctcttaccatatccatatttgcttccgggatctctacaattccggcactgttggagcaatgatggatcggtattttaacattccgttcctctaacattgttatcatcttctgaaaaagtgcaatctgcttttgggttggggttttatcatactcatctgcctgggcaaaatgtgtaaaaattccttcgatctcaatattcggaagttttgcaatccctgcaatcaggtctgcactgtcttcggtaacctgcagaccgatccggctcattccggtatcaattttaatatggatatgacaggttttattttttctgacagcgatatccgaaagagcttttgccgcctcatattcacagattgcaggacgtatttctttttccactatgagctcataatgttccggaaaactgattccaaggatcagaatcggtttctttcgcccatccgcaatcagcatctccgcttcatccgcagttgccacggcaaatccccatacatacggaaggtcctcgattgtttttgctactgtcagtgccccatgcccgtaagcatctgccttgatgacggcggcaattttggttccttctttaatatttttatgcatggattccatattatagcgcagtgcatctaaatcaatgcctgcataaacacgattttttttcatgatttttctacctctttgagtccttctatgatatcggaagccatcattccccggactccacatttttcttttgcggcatctcccgccagcccgtgcacatacaccccaagaggtgctgcttcctctgctttcattccctgggcaagaagggaaccgatcacacctgccagcacatctccgcttccggccgttgccattccattatttcccgataaatttacatacgtcatgccatccgaaacggcagtaaccgtatgaaaatcttttaatacacaaatcacatggaaacgcttcgcaaaggtttcggcagattgctccagtgtggtcagaatttcagaaaccggttttttggtcagccgggacatttctccgggatgcggtgtcagaataatgtccgcctttgcctgttctaaaagttctggttgatccgcaatgatatttaacgcatcggcgtccaaaaccagtggaacgcggcattgttccagaacggtggatgtcatgcggcgtgcacgctgtccggttccgattcccgggccaaatactacggcatccgcccactgcagctgttctgccagcaaagtttcttcctcgttttcctgcccggtgacaagaacagcttccggaacctttgtctgcagaatcagccggttttgttcacaggtgaatacccgcaccaggccacttcccatacgatatgcagcttttgcacaaaaacatgccgctccggacatattaacacttccggcaataattagcaacttcccatacgagcctttattggtatgtgccatacgggagggaagtttttttaaatcttccgattccagaacagccgtatgcggcttatcatccagccagctttcctgtgtaattcccatggaaaccacatgtacctttccgcagtattcattgcccggccacagatactgtccctttttcccgaatgaaaatgtaattgtgtcatctgcccgaaaagccgtgccaagtactgccccatcatcggaactgattccggaagcaatatccacggcaactttccatccagacaattgattgagcacgtcaatatcgtttgcaagtgctccggatatttcccgggacagaccggttccaaacatggcatcaatgaccacatcataggatgcctcccatgcggaaactttctccttttgcacgaccggaatgcggtaggcactgcagatctgtttctgggtgtcataggatggactggtccggtgcccttcttcctctcctgccggccatacggacacaaaaaccccctgttcccgcaaaagtcgggcaatggcaagtccgtcccctccgttatttccacttccacaggcgattaatgctgtcgataatttattttgtttaagcactaaaagcttctgcacaaaagccatcgatgcctgttccatcaataccagttccggtacatgaaacacctgcgatgtattctgatccagaagcttcatttcttttcccgatacaagataacgcaagatttctaactctcctcttccttttgtgattctttcgtatcgttttgtttattttgtgcgctgtcctcttccacatcttcatcttcatagtgaatatcgaacagatccagagtggatggcccgaatatatcgtgcagatacgcataaatctcacgattgttgatatcccggttctgcttacggatgatatttttctttaaatccacacgaacctgattgatccaggcatcaatatcatcggattcctttttattgacacgtattttttcgtaaaaatatcccatgctctgaagcatcagtttccggttgacatcacggatccgacgtggaatttccagcagttcgtcctcattttcttccattttctgattggtttcatcaatcagacgtttatcttcatccagctttttttcccgctgtgcatccatatcttcggatgtagttccgtccatgtttgcgacaatgctttccatcagctgcttttttacttttttcagctgttttaactcttcattcagttttccctgtctggcaagcaaagcattcagctcgttttccgtttcatgaatttcgtctggcttgccatgcacagcaaaaagccgatgccacttctcatcaagtacaagaatcggcacctgtttgtctgccagcgcttttttaaattcttcatcatccttcatcgtatcacctctttgtgtgctacttggagttcttcacgatattatatgataactgcatcagactgtccgacaaatgaacattttcgacaaccacacttttatcacttaaatccagatccacatgggcaaaattccagatggcacggattcccagattcacaagatgctgcgcagtatcttctgccttttctttcgggagtgttaaggctgcaatatctactttattttttttgcagtaatcatccagttcatccatcatataaatcggaatatcacgaacggtctgtccttttaaagatggttttacatcaaacaacgcagtaatgataaaaccaaaccgttcaaattttacataatttgtaattgcctgaccaagatttccggcaccgatcatgataatattatgggtctcatttaaccccagtatttttccgatctcatcatacaggtatttcacattatatccgtaaccctgttgtccaaatccgccaaaattattcaaatcctggcgaatctgagaggccgtcaccatcatccggtgactcagatcattggaggaaatgcgctcaacgccttcctccagcaattctcccagataacggtaatatcttggcatacgacggatgacagcttgtgagatttccttttccacaatttcatcctccaatccttttatttatgaaagagaagcttccagttctgtccggattgccttaataaaattctcactgtttaataccaccggattttcaatggtcgtaatcaaagcaagatcctttgtcatctttccggactcaatggtctttaagcatgctgcttccagtttatccgcaaaatcacagagtgcctgatttttatccagttctccgcgctttctgagtgctcctgtccatgcaaaaatggttgcgacggagtttgtggaagtttcttcacccttcagatgcttataataatgtctctgaacggttccgtgtgcagcttcatactcataatatccatgcggggatacaagtacggaagtcatcatggcaagagagccgaatgcagaactgatcatatcactcataacatcaccgtcatagtttttgcatgcccagataaatccgccttttgacttcataacacgtgcaaccgcatcatcgatcaaagtataaaaatactcaattccggctttttcaaatgcatccttgtaattcttctcaaatacatcctggaaaatatccttaaaggtatggtcatattttttggaaatggtatcctttgttgcaaaccacagatcctgttttgtatccagtgcatatttaaagcagctgtgtgcaaagctttcaatggaatcgtccaggttatgctgtccctgtaatacaccggctccggtaaaattatggatcagctcacgcacgatggttccatcctctgccgtaaataccagctcagccttaccaggtcccggaaccttcatttccgatgccttatacacatcgccatacgcatgtcttgcaatcgtgatcggtttttcccaggtcttaacatttggctcaattccctttacaacaatcggcgcacggaataccgttccgtcaagcatggcacggatggttccgttcggactcttccacatctcttttaaattatattctgtcattcttgcagcattcggagtgatcgttgcgcattttacagcaacaccgtatttctttgttgcatttgcagaatcaaccgttacctgatcgtttgtccggttacgctcttccaatcccagatcataatactctgttttcagatcaataaacggaagtaacagctcatccttgatcattttccagagaattcttgtcatttcatctccgtccatctctaccagtggtgttgtcattgtaatcttgctcatcgcttcattctcctttattttatttcatcagattttcccaaccgattttatccatgttggatatcgtattgcggatatggagtctggcacactcctccgctgtccgggcatcccttgcctttaatgcctcggcaattgcccggtgttcattgatcgacgcatgggcccgtgctttctcttccagtgtgatccgacggatgcgctgcagataatgatgatagtcccgaagcacacgtgtcagttctttgcttgcgcatgcttcatataccatttcgtggaaacggttatccagttccagtatctgatcccagttttctttggaatagtgaaaatcggataaaaatacgatttcttccagttcctccaactgttcctgcgtgatccgctccgctgcccaccgggcgcataatccctctaaaagcgtccgtatctcatagatatctttgacatcctgaagggtaaccccttctacaaacgctcccttgtttggaatgatatgtaccagcccttccagctccagctgccggagtgcttcccggacgggagtccggctcaccccgagatcgtcgccaatattcttttccttcagttcctcattcgcctgatattttccatttaaaatatcttcccgaatggaatgaaaaactttggcacttaatgaataatgatcttctgccataatttcaccttatataatatcgaatttttgcctataacacaataccaagctctttacaaacggaagtaatttctacaacaagctcctgatccgtcataacggttacgcgtccgtcatcgtattgtgtgtctacccagtctttgatccggtgtacaagttctgagtttttgtccactttccggtcatctggcaaatgataataattgttgatccagtgtgcaatacctgccagacctgaggtattcgatactgctaccagaggtggacggtttaaaaattttccggtatcgaaaatgttatagatttcctcgtttttcagtaatccgtctgcgtgaataccggctcttgtcacattaaagttacttccgacaaacggcgtctgcggcggctgtttgtatcccagttctttttcataatattcggaaagttctgtgatcacggtcgtatccatgccgtcgagagtgccgcgcagctgggcatactcaaataccatggcttccagaggcgtattaccggtacgctctccgattccaaacaaagaacagttgacaccacttgctccgtacagccatgcagtggtggaattgttgactgctttgtaaaaatcgttgtgtccatgccactcaatctgggaagaaggaactccggcatgtgttgtcagaccgtaaatgattcccggcacacttcgtggaattacggcaccagggaagtttaccccatatcccatcgtatcgcaggcacgtaccttgatcggaatcttgtactcatcctgcagtttcatcagttccacacagaacggaattacaaatccgtaaatatcggaacgtgtgatatcctcaagatgacagcgcggactgatgccggtctctaaacagtcgcggatcacgctcaggtacagattcataacctcccgtcttgtcattttcattttatagaaaatatggtagtcagaacagctgacaagaatgcccgtctcgcgaagacccaggtctttgaccagctgaaagtcctgtttgctggcacgaatccaggaagtgacttccggaaactgatagccacgttccatacatttatataccgcgtcgcggtctttcttactatataagaagaattcactctgacgaatctttcccttcggaccgccaagtttatgtaagtaatcataaatcgtcacgatctgttcggtggtatacggagcacgggactgctgtccatcacggaatgtggtatctgtaatccagatttcatccggcatattatgcggaacaatacgatcattaaacgcaatcttcggaatctcctcatagggaaaaaggttccggaatgtattcggttcatccacatctaccagctgataaaaatgttcttcgagctgcaacaggtttgatttgtcattcattactacttctctcatgtgctgactactccttttcatacatgaataattgtatacaattattacgttataaaatcattttatctatttactatgtgaaagtcaatgaatttttttagaaaaatatggaacccttttgctgccgtctcatacactatactgtaaatatatttatttggaggtcacttatgagtgatttaactgctacaaactgtggatgttcaacagataacggatgtggatgcaattctattatctggatcattcttcttctctcctgctgtggaaatggatctttctgcggaaacaacaacggatgcggatgcagtggcggcggaaacgactgctgctggctgattcttcttctgttattctgtggcggatgcaatggcggcggaaacggatgcggcggaatcttctaatatttgtgttagaaacgtgtgcagcaaggtgcacaaccaaaaagggatgcagtatctgcatccctttttgcatataaaatgctatccttcttttgtggctttttctttctggatctgacgttccacagcctcttttaccctgcattccgtgggaacattccgtcgtttcaggcattcttcatccacttcataaacactgtttccatcaataatcagtctctcatgcatctattttttcctttttcttttattgtattcatacagacaggcattctctcataaaataatagaaaaattatataggatgtgtgatccatggatgaaaataaatccatcacgtatgacgatctgatccagacgagaaatacgcagatcttaaagtccatcgtaccgtttttagacgttccgacacaaaagccgcttgccatgctgatccagctgatggaatggaaaaatgccacagcagctttctccagacaggagaacagcatggctgcctgttctctgcctgccggtaccaaacggcgggatgcaatgcttagtgcagtccgtaaatattgtaccccaaaagaacaggaaatgattgatacattgcagactctgttttgtattatggaaaatcaggatctgtttcacaatccataaatccgcaggaggtttttgaatggattccaatcttttgaacaatccggcgtttgccaatttaagtccggaaaaattgcaatttctgctctcctttgcacagaaagaaaaacctttaaacatgaaagatgccatgccgtttcttctctcaaatatgaggcaggcaaaggaaaaccatattgatttcacaaagcctgaaatcgaactgttgtgtgatctgctgtccaaagaccttccgcctgagagtcagacgcaaatgaaaaagatcatgtccctgatgtcgatgaaccgttcacatccagctccctgatcgggatttttaaaattttatccagcgggaacaggcttttgcctttcccgtcggttccctcataatatttttctcctgccgattcaaacagaatatataaggtattgtcccttacatcgagttcttccgatgccggaggcatttccactttctttctcggatgtttcggccgggttgcgagtgccgtgacagagtcgtaacaatataaataggaagactggtttcttccgtaggaagtgctcagatatacgtttccggaatcatcgaacgtaactccctgcaccttttgcggaattttataatcactgagggcaatcagtttgtccgtctttttatccagataatatgccaccattcgtgaattcaccagaagtgtatgcgttgcaatccacaatcttccgccataccaggtaatacaggaaggcgtatttttgaccggaaactcctccacaacatctcttgcatccacgacatctccggtattctgatatgccatcagttcaataaaatcgtaggagatccgctccacacagttttcataggaattgcacacccatacattgtcaccgtcaaacgcaattcctcccagatggctgttttcatccattcccagtgtgaccatatattctccggtttcccggtcaaacaccataagctctcccatacagtcatcttccgtggaataagaagtgatcagcacaaattcatcggtcagacaaattccctgcgggcactgggatgcactgaaaatatattcttttaacacatcttcctcccgggtatccggcatacccggaatatcaatttcattgtaaaagccgtaatcaagatctttcaacagaaccagatttttaccgaagcggctctctcttttgtgatagttataatattctacattgtaataattattgatctttgcggtccactttgcgtagagaatgtaatgatccttacgatccgtcggaatggtctttatccgtttgtgaagcgcggcatcggagtaccatccaagaaaccggaatccactccggtatggcgtatacagcggctgctccccgctgaatgccgggtacgattctttattgaaagaattctgtatgccgcctcccaaaaaataccccacggtaaccgtatcgttctttgtgtgaacatttgcaggtttttgaaaggaagaactcgaaggggcataattctccccttcgagttctgtgttttttgcatatgtcggtgtcacgataaaatttaaggttattgcaatcaataatacagcaaacactgtactattcttctgtctccacaactttgcctgccctctcttctatttctcttgctgccacatcctcaggtgcttgttcataccgggcaaattcataagaaaatgttccgcttccgctggtcattgaccgaagctgtgtattatatccatacagttcaagatatggaagatccgcatcgatctcctgatacccgttttctgcattcatattcatcacacgacctctgcgtttattcagatctcccatgatttcaccggtatattcctccggagtaatgatctttacagaggcgatcggctctaacaataccggcttcgcatctaaaaatcctttcttaaatgcctgtttggcggctactttaaatgccatctcggaggaatccaccggatgataggagccatcatagagcaccgctttcactccgattaccgggtaggccgcaagcggtcctttcaaaacagcttctgcaattcctttttccactgctggaaaataatttttcggaacggctccacccacaacacactgttcaaatacataagggacctctaaatccccgctcggctcaaatttcattttaacatggccgtactgtccatgtccaccggactgttttttatatttgtattcaacatctgattttccacgtatggtttcgcggaaagcgacctttggacgcatcagttcaatttctactttatacttttcaagcagcatactctgaacaatttcaagctgctgctcacccatgccatataacagagtctgacgattttcactgtcatttaccacacgcagcgtctgatcttccatcagaattttttgcagcgactgggaaatcttatccacatcccctttgttttttgctttgtagcgcatagatacgtatggttttgagaaattcgtgcgaagataggcaaccggattattccgtacggacagggaatccgttgtctgggacagggacagctttgccagtgctccgatatcccccgcatgaagttcttttacttcctctgttttatttccgcgcagaacgtacagctttccaatcttttcgtcacaatccctgtgatagttaaataagacatcatccgtcttaagcacaccggaatttactttgatcagagaatactttccaatgtaaggatctacaattgtcttaaaaatatacgcactcttcggttttgcgaaatcatagtccgccggatacacctcgttgtttgtcgtattgatgcctgcgcaggtccgtttgtccgggctcggaaaatatttaacaatatctgccatcagcgtatacatcccgcgggcaagcggattcgatcccataagaaccggaacgatagaaccatccatgacatttaccctgagcgcctgacgaatttcgtcctcggagaattcatctccgttaaaataacggtccataaactcctcgctggtttctgccacagcttctaacaaagcttccctgcacagattaagattcttttgtgaatattccggaacttcaaatttttcaacggttccctcatcgatccatcgctttgctttctgctggatgacattgacatatccgacaaactggccatcctccctgaccggcagatgaaacggtgcaattttctttccgtaaagagcctgcagatcttccactacctgacggtaacttgcattgtcaatatccatatctgtcacaaagatcatacgtggaagatgatttttttcacagatttcccaggcgcgccgcgtgcctgtctcgattcccgcttttccggaaataacgataattgctgcatccgctgcggaaactgcctcttcgacttccccgacaaaatcaaaatagcctggggtatccaaaacattaattttgctgtctttccacgggatcgcgaccacagaagtatggatcgaaaactggcgtttcgtctcctccttatcaaaatcactgatggtatttttatctgcgaccgtccccatacgtgtcgtcagacctgccagatatgccatggcttccaccagggaagttttgccgcatcctccatgccccaggagaaccacattacgaattctgtctgtcgtatatacgttcatagtaaaaccctccttttttagaatatttactcttttatggttatattctactaattttcagaaagttttacaacctttttatgcattttgttgaagtatttttgccgcaagttcttccagatacgtccagcgatccattttttcttccaattgtgtttccagctgcattttttcttctgtcagttcattcagcttcacaaaatcccgtgcgcaggatgccatctccccatcaatctctcccagccgtgtttccaaagctgcaatgtcgtcctcaatggtttcatattctttctgttctttatatgaaaattttaatttattttcatgtttccatgtagaacgtgagtcttctgtcgcctgtttttcctgtacatttgccgtctcttcatttttacggaacgaatcgcctgcagtatctacaaattttccttcctcttcggcccgtctgtggtagtccgtatatccgccctcatactggcagagctttccttttccctcaaaagcaaagattctgtgcaccacacggtccagaaaataacggtcatgcgataccgtaatcacaataccgtcataatgatccagataatcttcaagaatggtcagtgtcgtgatatcaagatcgttggttggttcgtcaagaatcagtacattgggagcttccataaggacccgcagcagattcagtctgcgcttttctccgccggacagttttttgatctgtccatactgttcttccggtggaaacaaaaactgatcgagcattgcggatgccgaaaccagtccatcttctgtgcgtacatattctgctgtatttttgatataatcaatcacgcgaagctttgggtccatatatgcaattcccgcattctcatcctgttcgatctcctgtgtgtaatatccgatttttatcgtctgtccaatggttacttccccagcatccggcaaaattctgccatcaataattttcataagtgttgtcttgccgcatccgtttttcccgacaaaaccaatccggtcattttttaagaagatataggaaaaatcagaaatcagtacatgatctccatatgtttttgtgatatgtgataattccacggttgtttttcccatacgggaggacaccgaaccgatttcgatctttttatcaacatccggctttttttgatcccgcaaggcctcatagcgctggatatgtgctttctgtttggtggaacgcgcccttgccccgcgctgcatccattcgatttccttgcgcagaatggactgtcttttccgttcgcctgcccaggcaatgtcttccctctcctgtttggccgcaagatatccggaatagtttgtctcatagctgtaaatctgtcctttatcaacttccacaatccggttgcatacactgtccagaaaataccggtcatgtgtcaccataaccattgctccccggtaatttttcagataattttccagccactctgccatttcggcatccagatggttcgtcggctcatccaaaagcagtacatcacacggagtaaggagcactgcaacaagagccagtcgtttccgctgtccgccggacaaatgtcccaccggttcatcgaaattgtatatgccaagccgcgtcatcatggatttggcattgctttccagattccatttttcatgttcttcccggtcttcctgctgatgcacacttccaatctgcgcataagaaagtacattctcaagtgctcctttttgcgggtcaaattccggcatctgcggcagatagcgaatcacaagatgattggcccgtacgacatttccggcatccggttcttcgagtcctgccataatttttaacagcgtggattttccggttccattgatgcctatgattccgactttttccccatcttgcagataaaacgatgcatcgtgaaacaactcacgctgtgtataaacttttgtaatatgatcaacggtaagtaaattcataaaaattcctctttctgcttcctttcgcctttttattatcacacgaacggacaattgttgcaagtgctgtcacacattcctcttttgacactcctgccattctatagtacaataaacacatcaattacgtaatataaaggaaataaacttatggcttttcaaacaatcggttttatcggactgggtctgattggaggttcgatcgccaaaaaaatgaaatccaatcagccggacatcaaaatttatgccacggcacatcataaagaaaccatcgaagaagcgtaccgtgagggactgatcgaaaacaatgatctgttaccactgtctgctttttcggactgtgattatatttttttatgtgccccggttcaacggaacctcgcatatctgcgtcagttaaaagatattatccgcagcgactgttatatcacagacgttggaagcacaaaaacggaaattcatgaagaagtgatacgtcttggcatggaggccaattttatcggtgggcatcccatgaccggttccgaaaaaacaggcatattaagtgccaccaatacgcttttggaaaatgcatactatattatcaccccgaccgccctgactccaaaggaagaaatttcggaatttcgtgattttgtattgtcgcttggagcaattccactgattttggattataaaatacacgattactctacggcagccatcagccatctgccgcacatgatcgcatattcgctggtcaatctggtccgccagatcgatgatgacaaagaaaccatgaaaaccattgctgccgggggatttaaggatatcacaagaattgcatcttcttcgcctgtgatgtggcagaatatctgtgcttccaaccgggaaccgcttctttcactgatggatcagtaccttgcccttctgacgcagcttcgcggatacattgacagttccaatgaacaggcactgctttccttctttcagcaggcaaaagactaccgggattccatcacactgccaagtgtcaaatcccctacggtatattatgaatgttttgtggatctggtcgatgaaaccggcggtattgccgctgttgccgggctgctcgcacaataccatatcagcatcaaaaacatcggtattgtaaataaccgggaatttgaagaaggtgttcttcagctcgcgtttcctgacaaacagactctgacccgtgccaaacgtctgcttaccgacaatggctatatggttcacgaacggtaaaacataaatggttttcccataaaaaatacaggctccggataatttccggagcctgtatttttatttgcacaaggtatcgagtatttcaaaatagttttcaaacgtcttcctgcagcaggaaggattttcaatcacaataccgtctgtcacaagtcccggaattgcaaaagccatcgcaacccggtgatcctcaaacgtttttattttacatccatgcggttttcccggatgaatcacaatacggttctcatccagctgctcgcatgcgattcccattgccttcagattggtaagaatcgcggcaaaacggtcacattcctgataacggatatgtccgattccggtaatctccacggtttcactggcaaaacacgcaattgccgccagtgtcagagcctgatctgaaaatgcagaaaagtcaaatacccctcccaggaatccttccgtcggcggatacatccggattccatccggttcttcctctgtccggcatcccatctgttccagcacatgtaaaaaagaagtatctccctgtaagctttcccagtgtacatggcagacctttgcaggaacgccgacaaccgggcacatcgcataaaaataagaagctgccgaaacatccggttcaatctgatactctcttgcctgatatgctgcatgttccgcaatcacaaaagtatcggatgcaggtcgttgtacttccacaccaaactgcttcatcatggcaaccgtcatctctacataagccattccatgatgccctttgacgtgaatccggaattctttctgaaacagcacggaagagatcagaagcgcactcagaaactgactgcttttttcaacatcaatggttacttcgtgtctattcacaccactgtttccgatcgcaaatgggaaatgtcctgatgcttccttataagtaacttccgccccaaggtcttgaagtgcctgcagcaattcttccatcgggcgctttttcatctgctcggaagagttcatatgatattctccctcacacagaccaaggtatgccgtcagaaaacgggcagcagttcctgcacttcccacatcaacggaagcttttgtctttggaaccctgcccccttttccttcaatggagacaaccgcatgcggctcatcaatttccaccacaaagcccaggtcctgcaaagcctgcaggaaatgcctgctgtcatccgaaaaaagaacccctttaagaacactctttccgtttgcaagtgctgcaatcagaagtgcccggtttgtaatgctcttcgatcctggaaccgaaacctcaaccggaattatgtctgctttttttacctcataagtatcctgtaagatcatagtttttcccgccttattttacagttcgttaaaaatctgatagatatcaatctttaatgcatcggtatccgtcattccgataaacacaccgccataatgaaatccgtccggcttttcttcgctgcggacaatctggatgactgcatccaccacttcttttgtccatatctggatctttgcatcataataggaattcatttccagtttctttttacagtcaaatccaattccgctttttgaaatatctgttacatccacatgcacaaattttaaagttgtgaccccgtcttcatccagacgctccaactgtacattgacatccagatccagtcttttatttttccttttttcttccattttccatccccttataccttttcaaacgataatataaatattattttattacattcagaaacacattacaagtaaaaaaagggatattccgggcccccttcccggaatatccaataaaaagtaatgattttataaaagtcccgcctgcaccagacgtccgtgaatctgcggtccgatccatgcagcaagaaccattttgataatgtcaaatacaataaacggatagacgcacattgtcaacgccgcctgtacagaggttttcattaccagtacaaaccataccgttccaaagatatagcaaacagcagttccgagaatcatgccgatcatgcccaataccagtttccgtccggacttttcaataaaaattccggcgatcacagccatcggaataaacccgatcagatagccgcctgtcggtccgaacatttttgccggacctgctgtaaaaccggaaaataccggaacgccaaccagtccgatcagaaggtaaacaatatagctgaccgtctccctccgagtgcctaaaatataaagtccgaaataaatcaccagattggtaagagaaatcggaacatctccaatcgggatagacaatggtgctaaaatacaggttacagctgtgagaacaccgatcacagcaatggtttttaccgacattttctttggtgtcgcgcttacagtgtcattcattttttatcttcctttccatgtaaattcaatgtgttaagtatacacgcatgtctttttattgtcaaccttatatttatacaggttaacaattgttttttagtaaaaattattgtgatatatgtaaacaaatgctaatataaaaaaatagtttagggttgaattatgcgaaaacgattataaaagattgtgggttaaacactatgacagatcattctatttcagaaaaaattgaatataatgttcataaaaaagaactgtcacaaaacaggaaatggatgtttcctttttgtaacagttctttttatgattcttttattgaatcagcatagcatcgccaaagctaaagaaacgatatctttcttttacagcgatctcatacgcatgaagcacatgctcccgtcctgcgagtgccgatacaagcattacaagtgtcgactgtggcagatggaagttggtaatcagggcatcaatcactttaaactgataccccggataaataaagatttccgtccagccgctggtctcatgcagccgtccgttttcatctgcggcggcttcgagcgtacgcgtactggtggtaccgaccgcaatcacccggtgtccgctttccttcgcgcggttgatcttatccgcagcttcctgtgacaccatataaaactctgagtgcatatggtgatccagtacattttctacttttaccggacggaacgtgccaagtccgacatgcagggttacttctgcgatatcgactcccatatcctttactttctgcagcagttctttcgtaaaatgaagccctgctgtcggggcagcggcagatccgtcatactttgcatatacggtctgatagcgatttttatctttcagctgatgcgtaatatatggcggcagcggcatctgtcccagctgatccagaatctcttcaaaaattccgtcataatggaactgaatcagacggtttccttcttctactacatccacgacttctgccgtcagaagcccgtctccgaacacaagttttgtgcccggttttgcttttttccccggttttacgagtgtctcccagatatcattttccttgcgttttaacaaaagtacttcgatttttgcctgtgtgtcctctttcactccgaacagacgcgccggaatcacctttgtgttgttgatcaccagacaatcacccgggtgaagatattccagaatatccgtaaaatgccggtgttccacgtccccggtctgacggtcaagcaccatcagccgggagctggaacgatcctccagagggtcctgagcgatcagttcctccggcagatcatagtcataatcttttacattcattccttctgtcatgattagcctctcaactggattccgatatttttcagtccgcttaagattttatccatagcacccgtaatatcgctctcttccagattcttatcttttccgcggaacttcagagagtatgcgacagacttaaagcctttttcaatctgctctccttcgtatacatcaaataactcataattttccagatatttcccaccgttttcctcgaatactttctcgatatcacctaccagaatattctttggaacaaccatggacaagtcacgggaagaaaccgggaagttggtaattccctcatatttgtaatcaaaggatgcacgggatacaatctccggcatatcaatcactgcaatatatacacgctctttgatggcataatttgcagcaaccgttggatgtacctctccgagatatccgatcacagctccatcatatacgatagccgccttgcgtcccgggtgcaggaacggaagctcggcatgtggatcatactgcgccttcttgcgaagacctgtctggtataagagttcctcgatcacacccttcatggtaaagaaatcaccgtctccgtacataccaaacgtcagctgcatacgttcttccggaagttccgtcagcggaagctgcttcggcagatagatatttcccatctcgtacaggcgtacatctttgtttctgcgtccaaagttcgtagacagggaagtcagcattccgttcagtggcagcgtacgcataatggaataatcttccccaagcggattggaaatcacaaccgttttacgccacttggaatcctccggaatcagtaatttgtcaaatactttcggactctcgaaagaataagtcattgcctgtgaaaaaccacagaactctgcaatctcacgtgccttttcttccatacgcagcttaaagctctttcctccggcagtggattctccgctcggaagagaagttccgatcttgtcatagccgtagaaacgtgctacttcctctgccatatctgcgtcacaaagcagatcctgtctccaggacggaacaagaatctcattcgttgcttcgtcatatcccagatctatttttttgaaatatccgatcatatccccggctggaatatccgttcccaaaagcttattgtacttgtccggttcgaacggaatctttacgccctcacgcttcacaggataaatgtcaacggctccacctacaacctcgccgacgcctaactcttctaccagctggcaggcacggttcattgcttccatggcaagatttggatctaagcctttttcaaacttagctgaggcatcggtacgcagtccgatgcgctttccggatttgcggatattggttccatcaaagcatgctgcctcaaataacatggttgttacatggtcggtaatcatggaattttctccacccatgataccggcaatgcctactgctttttttgcatcacagatcatcagtacattttcatccagctgacgttcctgtccgtccagcgtcacaaatttttcacctgcagctgcacggcggacaataatctcttttccttcaatcgtatccagatcataggcgtgcatcggctgtccgtattcttccatcacataattcgtaatatctacaagattattgatcggacggattccatgtgcacgaagacgttcctgcatccacttcggagatggggcaaacttaatattctttacaactcttgccgtgtaacggctgcaaagatcctgatcctttaccgatactttgatgtaatcattgacatcttcgttatttccggtttctgttacgacaggaggtacaaattccttatggaacgtggctgctgcctcacgcgcaatgccgagtacggaaaaacagtctacacggttggatgtaatctcatattcgacaacgctgtcatccagtcctaaataagcaaccgcattttctccgacaggtgcatcctcgtcaaagatatacagtccgttctccggtgcgtccgggaacatttcacggttcgaaccaagttcttcaatcgagcacatcatgccagaagactcaaccccgcgaagctttccttttttaattttgattccaccaggagtttttgttccatcatgtcctcctgcgacacgtccgccatctaaaacaaccggaacttttgccccttcaaatacatttggtgcaccggtcacaatctgcaacgtttcgcttccaacgtttacctggcagatgacaagtttgtcggcatccgggtgtttttcaatctttgtaacctgtccgacgacgatcttgtcaagatctgcatcgagctgctcatatccctcaacttttgatccggaaagtgtcatggcatcgacatactcctgcacgccgcagtcaagtcccggaactaaagctttgatccattttaatgatgtattcattctttttctcctcctagaactgttttaagaaacgatcgtcattctcatacagcagacgcatatcgtcaatctcatatttcaacagggtaatacgctccagaccgataccaaatgcaaagccggaatattcttccggatcaataccgctcatacgaagcactcttggatgtaccattccacagccaaggatttcgatccatccttcacctttgcagaaacggcatccttttccgccacatttaaaacaggaaacatccatctcggccgatggctccgtaaatgggaaatgatgcggacggaattttacttttgtttcttttccaaacagcttctgtacaaactgggtcagtgttccctttaagttagaaaacgtgattcccttgtcaatgaccattccctcaatctgatggaaagaaggcgaatgggtcgcatccacttcatccgcacggaacacacgtcccggtgcgatcatacggatcggaggtttcttctgctccatcacacgcacctgaaccggtgaagtctgtgtacgcagcaggatcttatcattgatgtagaaggtatcctgctcatcttttgccggatggtttgccggaatgtttaatgcttcaaagttgtaataatcgtattccacttccggtccttctacaacttcatatcccataccggtaaaaatacgctctacctcttcaagtaccatggtattcggatggctgtgtcccacacggtttttctttgccggaagggtaacgtcgatcacttcattttccagacgatgttcaagctccgcagcctcgagttttttcttcatctcatcgagtttattttcaatttcctgacgggtttcatttacccactgtcccaccttcgggcgatcctccggtgcaacctctttcatactctttaatacggcggtgagttcccctttctttccaagaacggcgacacgcacatcgttgagttttgcaagtccgtcagaattttcaatctgtgctattgcattttctctgattttctgcaatttttctttcatggtactctccttttacatattttctttcataataattgtttttacgcaattttctactgtggaaccggaaccgttttctggcataaaaaaatccctgctatgcataattgcatatcagggacgaaaaattccgcgttaccacccagattcccatatcctgtatctatatgggctctcattctgcttaacgtgcagtgaccgtcgcaggctaaaaatccttgtgttcacctgcgcagctcctgtgggaaaattcacatgctggcgtatcataaggaagcttacagccgatgacttcctctctctgtatgtcgttcagatgctactgacacattcattgctttttacacatttgtcattctaccacagtctccttttatgtgtcaagatcaaagacattggtaaatgtaacatccttaaaataaaatccgagaatttcctgccatttctttccttcttttcccatggcgtccgcaccgtactgactcattccgattccatgcccgaatccgcctccggtcagcacgatggttccttttttctgactttttatttcaaagcacgcactcgggacggaagaggcacgatgtttattggttccgtctgcaagatcaagatccagcagatactttccgagtgcataccggatttcattttccttttcgatcgtccgctctcctttttcaaaaaccatggtaagagacagtacatatccggaagtgcttcgtttattgactttcagttttttcagttttccatatgtttcatccatgcccagctttgccgacagggtagccgtccatcggaaatacggggaattttcatcataggcatccgcttttgctgtaataaatttatgaaaggctttatccgaagacagatcttttgtcttttccctggtatggttttccgccagcagatatcccggagatgcggcattccatacttccggattttcagaatatcccggggaagtggaataataataacagtccgcaagttttcctttgtacgtcatcaccatacctgcggtatccgccacagcctgatccgtcacttcataggaagttgttgcatgataggcctgataggcaatggaatcatccagatttgctccgtaccgggcataagtatcgtttttcatctgcccgtatgtaaatgtgcgcgcacataccgcctgtgcttttaaggcttcataggaaaaagataatggcatttccgaaggcagaacataacgaatataatcttccatcggaatttcattgatcaggacatatccccctttttccttccggagaatcagatctccctcgtacccggaaccacacgggtttccgtttttatcacagcgatacaaaaggccaccggtatccggagaaatttttatctcttttcccgttttttcccccttcagaagtttttctgcatctgttacggtgtccttcttccttttatttccatccacggtataggcatccccgctgcaaacaaaaagactggcatatgtattttcttttccgtttttgagcagcacacggaccttttctgccatgtcctcctgatagcttacaagtgcacaggctttctgctctgcaacaaccagttccactttggaatttcctacaacaagatctgaaatctttccctgacggacaggaatttttgcatgtccggaacttgccacaagatacaccggcagatctttttctgccgaaagcggttcatatccctctatctgaacactttttgaggagtaacttgtcagaacccccttgatcgttgaaggtttcgcataaattttagtaacctttcccttcgtcagttcaatatccgcaacccccgtatattttttctccggctttccctccgcaaaataggtttctccccgatataatacaatgatatccttttcttcactctttaagatatatgcattgctgagcatcccggaaacggaacggtcaaatgtttcttctttttgatctttccctgccgttttagaaagacgggataccagaattaaagtgatcgcaacggtaattaccgcaagcagtagaatcagaatccccatcatcttcattttgtctctttttttcatgaagcactctccgtttttattaattcatctgtcattgacacaaaataaggagccaccgttctccggcagctccccttctcttttgtacgctataacattctttggtatataataaattctttggtatcttaatattaaatactttttctttggtatgttacccaaaatgccggttcctgcaatttagactcctagccaatgctaggtgggcgaccgcagtttcccttctgtcttccgctgactgtggcggcctgacatccagaaaaatcatataggaatcccgtttaaagtaaatgtaggttctaaatagcaagagttgtcgtacatttcaggcatctctttctgccgtcttttatgcgataccgcatccggcagctttctcttttgtactgcacttattatactttatttttacctgaatttcaaggtctgattctatgtacttttttccatttccgcatactgctttaagggaaaaatttgtcttttattttacgcattccgcttacaaatgcaaacaatgctgccaaaaatgcaccaagttccacatatgtccagatgcgtccgagcgtaatcaccttagtatcacataaaattccgattgctcccacaacaaccgctaccgccgcaaatccatacagccacggtgttattccccggatatacgcctcgggatctttacacttcttaatttcttctttcgggacaaccaggtcactgatctgtccgctttttttcatttttgcagcagaaacagccagataaatgcctacaaaaacgatcacaatatccataagtaaaattgttttcatgatttttcctcctgttttatagtatcacacacgaaaaaactttttaccatcggcaaaaatagtcaaatttcattgattattttatacatttatagtaaaatatacttaatatgtaacaaaaaggagaatgtatatgcgcattgaggacactacaattttaattactgacgattcgattcttgcacgtaaacagttaaaggacatcatttccactctcggcactccggtattcgtggaagccaccgatggacagagtgcaattgacaaatataaagaagtacatccggatctggtatttcttgacattgttatgccaaaaaaagacggcaatgatgccatccgtgatattatggaatttgatccggaagctacaatcatcatcgcttcttctgtcggaacacagtcccagctgaaaaatgcactggaagcgggcgcaaaagatttcattcaaaagccactggacaaggaacaggtgcttgctgtcgttaagcgcttcctggaagggagataaacgttatgtatacacaattttttggaaattatctgcttgccaacggatatgttacccgtgatcagctgttttcagcgatgcgtcaggaagcagatcagcatatgaaactcggtacccttgcccttcatgccggatacatgaatgcagcccaggtagatgatgttgtcattcaccagacccaccaggacaatcgtttcggtgagctggcgattcagctcggatacctgaccgaagctcaggtggaagaactgttaaaacagcagacccctgccttcctttcccttggacaggttcttttggatgaaggagttctgacaaacaccgatttcgaacagatcatacaggattaccgttccaaaaacggcatggaagatgaagaaagccttatcgagcgccggaaaaatatccagcagttgtttgaaaactttttttcatcaaccgacgctgctctttcggaaaaaggacatatgtttatcgagcttttatttaacgattttatccgttttatcggttccgattacacaccgctttccgtggaagaagtcacagaggcttccattgcctgttgtgtaaagcaggaaattcatggtgactatgcgattaacacctatatttccatggatctggacacggcgatttcctttgctacccgctatgtccatgagcagttccattcttacgatgaatacgttcaggcttctctggaggattttgtgaatctgcagaacggattattcattgtaaatgtatcaaacacctctaacacagagttaacactcggtgctccagagcatattaccgtttccccgattcagttttcaggacgcaccttgcatatcccggttctgtatacgtttggaacgattgatttttatatggaacgtgtttccattaaagaataaaataggattttccttaaagtaaaatgccataaaaaacgtctgccacaaggcagacgtttttatgtttccactataatactttagaaaggaactcgcacaaacgtggattttccgggtgggagaaaaattccttcggtgtattctcctcctgaatctgtccttcattgatgaacattacacggcttgccacttcccgggcaaatcccatctcatgtgtgacaaccaccatcgtcattccatctctggcaagttctttcataatctcaagtacttctcctaccatttccggatcaagtgcagaagtcggctcatcaaacaacatcacatccggattcatggcaagtgcacgtgcaatcgcaatccgctgcttttgcccaccggaaagcatggccggatagacatccgctttatccgccagtcccacacgaaccagcagttcatctgcccgcttagaagcttcttcttttgtcatcagtccggtctgaaccggagcaagcataatgtttcctttcaccgtataattcgggaaaagattaaactgttggaataccataccgattttctggcgcattttattgatatcaaccgaagcatctgtaatatccgttccctcaaagagaatggaaccagatgtcggttcttccaaaagattcatagaacgcaaaaatgtagattttccacaaccggacgggccgataatcgcaacaacctcaccctgggaaatggtcgtcgatattccatttaataccttaacatcatcaaaggatttacaaagatcttttacttcgatcaaaacatttttcttatcgctcatttgtccgcaacctcgtttccagtttgtgtacacctgctgtaaggatcattaccagtaccagataaatggcggcaactccaagcagcggaagaaacgcatcatacgtctggctacgaataaggtctcctccttttgtcagatctggaattgcaatatatccactgatggaggtttccttcaaaagtgtgataaattcatttgccagagccggaagaacatttttaaatgcctgtggaagaataatcaggcgcatggtctgtccgtaattcaagcccagactacgtccggcttcaaattgtccctcatcgaccgacataataccggaacggacaatttctgcaacataagctgcagaatttaacccgaaggcaatgactgcaactaaaatcttattatccagcgcaaccagaataatataatacatgattaacagctgcaccatggtaggagttccccgccatatggtcagatatactttacagatgacatttaaaatctttaacccgccatgtttatcatgggtagaccggacaattgcaactaaaaatcccagtacaattcctaagataactgcaagcgctgtaatcagtaatgtatttcccaatccacgcagcaggtacaggtaacgatcactttctataaaatcctgttgaaattttgcaataaaatcactcacggtttttcctccgaaacaaactatttgtttctaacaacgattacctgacaagcttttgtataggtatctgtaaaatcaatgtttttcttgcgatcctctgttaccgtaattccggctgcaccaaaatcagcttttccggaagataccgctgcgatgatcgcatcaaactccatatcttcaatcttcagctcatatccgagtttatcacagattgcttttgcaatatctgcatcaattcctacaatctgatctccgtcataatattcgtatggctcaaactgcgcattggttgccatagtaagtgttccgtttggatactcggttccgtccggtgtctcatatggatgctttccaacctcatctccgatataattgctggtgatggaatcaatggttccgtccttttgcagttcttcaatcgcactgttaaatttatcggtcagatccgaattgcctttggcaatacagatggcatactcttccggatcaaacgtatcggataaaatctttaaatcatcatttttttcaacaaaagcttctgccggctgctgatcaatgatcacacagtcaatctttcctgtttttaatgcctgaatggcatctgcgcctttattgtaacgctctaccgtactgccatcattcttttcatactctgtggcatccgaatctccggttgtaccgagctgtactccgatttttttccccggaagatcatctctggagttcacactgttggcaggtacggatgaaccgcagcctgctgttgcagctgccatggcagaaacaagtaaaagcgaaatcaatttctttttcataatctttgtcctcttttcatatgtattttaaacaccaaggaattttttaacaacctgtggcatttcttccacttcacataccgtatcatgaagtaccggtgcggtacgaatctcttcgatcgcctgtggaactttgacatttccgattctggaaagctcatctaccagctcaaagtcacccatagcatcatatttcggatcaatcgcatccataacgcttcgggtaaacttaaacggacttgccgtgctggcaatcacggtctttgtctcggtatccccggtatccttcttatacttatcgtatacccctgccgcaactgctgtatgggtatcaatgatatatccggtatcctcatataattttttgatggtctttgcagtctcttcctcgcttgtataatttccgtagaaatcagcaagttgcgcacgcatctcgtctgtgattgcatattttccgtctgtggaaagttcttccatcatctttgtattcttttctgcgtcgtttccggcaatacggtaaatcagacgctccagattggaagaaatcagaatatccatggatggagaacttgtaagaatgaaatcacggtttctgtcgtatgttccggtggagaagaaatcatacaatactttgttctcattggatgcacagatcagttttgcaattggaagtcccatattctttgcataaaaagcagcaaggatatttccgaaatttccggttggaacaacaacgttgatcttttcatcttttgcaattgcaccatttttatataattttgcatatgcatatacataatatgccacctgaggaatcagacgtccgatattgatggaatttgcagatgagaactgataacctgcaacatcaagttctgcttcaagtgcagtatcattaaacatcttcttcacaccagtctgtgcctgatcaaagtttccgtggattccaaccacacaggtatttgcacctttctgtgtgatcatctgcttttcctggatcgggctgacaccgttcttcggataaaatacaacaatctttgtgccttccacatctgcaaatcctgcaagggcagcttttccggtatctccggatgtcgctgttaaaataacaatatcatttttcacctgattttttcttgcagaggtaatcaaaagatgtggcagaatggaaagtgccatatccttaaatgcaattgtcgggccatggaacagttccagataataagcaccgtccgcatctaccagcggtgcgatctccggcgtatcaaatttgctgtcgtatgcttttttgatacaatcctttaactcatcttctgtaaaatccgtaaagaaacggctcatgacttcataagcagtctcctgataggacatatctgcaagtgtatccatcgggacatccagtgccgggatacgctccggtacaaaaagtcctccatcatctgccagaccctttaaaattgcctgggatgcagtcagttttactttatcatttctggtgcttgaatacattaattccattttttcttcatcattttacaaaaatttaatcataacgtttctcgtacattataggtaaaaaagtgggtggtgtcaatgaatttcctatgttatactactaaaataacctgtcagggcgaaaggagaatttatgttaaccggtgtatatcttgcgacaaaaaaagacaaaaccgtatactatcgctccaatattacgcacaaaggccgtcatatcagcctcggaagcttccccacggaagttcaggcacaccaggcatacactgccgcctgcgagctgttatccggtacagaaaccatcgatgaggcattttaccggaccaaccagcttgcctttgaaaaaattgtttcgctgatcaatttccgggataatcatatgtatattcctacccccatctatctgcgcaaaaattatttcagttattatctgagtattcaccgggagttaaaatttgacattgatgacctcttctattacagcagccaccggattctgacgcgccagggacatctgtatgtcaatcactatggaatgcagcttacgcttctcggccgctacggcatcaaaacccatgcggtaaacggcagggatttttgttttgtcaacggcgatgaaaatgatttccgctactcaaacctcaaaatcatcaatccgtattttggtgtcgaacgcatcgacaaaaacggaaccgaacactataaagtacgtatccatatccacggcaacatcactgtcggtaattacacaaatgcgattgatgcggcaattgcctataacaaagccgtagatctggcgcatcaggccggcatatcaaaaaattttccggaaaactatatcgaggagctgtctgcttcgtcctatgccgatatttaccagcagatttccctttctcctaaatatctttcttacctaaaaggacttccccgcaaataagggaagtcctctctgacatctttttattatttctggttgatataattgacaagaccttcgcagtcaataatcttctgcataaatggtggaaatgcctgtccctggaatttctttccggttgtcacatctgtgatgattccggaatcaaaatctacttccacctcatcccctgcctgtatttcctttgcggcctgtgggcactcaatgatcggcaaaccgatattgatggcattccggtaaaagattctggcaaatgtctcagcaatgacacagctgacaccggatgccttgatggaaatcggtgcatgctcacgggaagaaccacatccaaagtttttattggctacaataatatctcccacatgtacattttttacgaaatctttatcgatatcttccatacagtgtgtggcaagttctttcggatcggaagaattcaaatatcttgccggaatgataacatccgtatctacgttatcgccatatttaaatacactaccatgtgctgctttcatttcttatctgacctcctttttctccggcatcttctacattacttccgccgggcctgaaatctttccggtgatggcacttgccgctgcaaccgccgggcttgcaagatatacttccgaatctacatgtcccatacgtccgacaaagttacggtttgttgtggatacacagcgttcaccttctgcaagtactcccatatatccgccaagacacggtccacaggtcggtgtacttacgattgcacctgcttcgataaagatcttaagaagcccctcttccatggcatccagataaatctgctgggttgccgggattacgatcacgcggagtcctttggctactttctttccttttaagatttctgcagctgtacgaagatcttccatacgtccgtttgtgcaggaaccaatcacaacctgatcaattttcacatcgcccacttcatcaatcgtacgtgtgttatccggcagatgtgggaatgaaacggttgactttaaagttgaaagatcaatcgtatattcttcgtcatactctgcatccgcatctgcttcatattccacgaacggtctcttggaatgttctttcatgtatgcacgggtcagatcgtctaccgggaaaataccgttctttccaccggcctcaattgccatgtttgcgatggtaaaacgggcatccatggaaaggtatttgattccttccccaacaaattccatggatttataaagggctccatccacaccgatcattccgatgatatgaagaatcacatcttttccgctgatccatttgtccggctttcctacaatattaaatttgattgcagacggtactttaaaccatgcttttccggtagccatgccggctgccatatctgtacttcccacaccagtagaaaatgcaccaagtgcaccgtatgtacatgtatgggaatctgcaccgataatcacatctcccgcaaccgtaagtcctttttccggaaggagtgcatgctctattcccatctcacctacatcaaaatagtttgtaatatcatttttgcaggcgaactcacgtacgcatttgcaatgctctgcggatttaatgtctttatttggagcaaagtgatccatcacaagtgcgattttatctttgtgaaatacaccctctacattcatttttccgatttcatgaattgcaaccggagaagtaatatcattgcccagaaccagatccaggtctgcctcgatcagctgtccggcgctgacagaaggcaggcctgcatgtgctgcaagaatcttctgagtcattgtcattcccatggataattcctcctttaatatcttaaactactatgattttagcacagattatttcataatcctaatacataataaacatatttaccataactatattttatgatataataacttattataataaacggaggcaataatgaatcagaatttatcttcttactggattttttatacggttgccaatgctggaaatatttccaaggcagccaaagaactctacatcagccagcctgccatcagcaaatccattcagaaactggaagaaaatttaggatgcaaactgttttcccgcagttcccgcggcgttgtactgacggacgagggccagttactttatggacatgtaaaggaagcctttgaaacattgacacttggggaagacaaattaaaacgctccatcgatcttggtgtcggtcacctgcagatcggtgtcagttccacactctgcaaatttgtacttctgccctatctgaaagaattcatacggcagaatccgcatatcagtatttccatcaactgtcagtcgaccaacgaaacgcttgatctgctggatgaaaataaaattgacatcggtctgattggaaagccggataatctcaaaaacatcaatttttactatctggacaacattgaagacatttttgtagccaatccggactatctctcaaatctgaaaaaaagagggattaccagagattccatccttggcaattccacacttatgcttttggataagcataacatgacgcggcagtatattgacgattatctgcaggacaatcatatttccgtagcggaatccattgatatctcgaacatggatctgttaattgatttcgcaaagatcggtgtcggcgttgcctgtgtcatcaaaagttttgtcacacgggaactccaagagggatctctcgtggaaattccgctcggcatcccgatccacaaacgggaaatcggctttgcatacaaggaaaacttaaagccatccaaatccttacagacctttattgacttttaccgtacttacagaccggaggaaacactatgaaagaacagcttcacaccatcccaatttcagacgccatggcaaatgccggagaatgtccattctgctatattgaaaaaaaaaccgaagaacacatgatggatttcgtcctcggacatggtgcctcctacatggaagccgatatccgcgacatgacagaccgggaaggattctgccgcgcacatttcaaaaaaatgtttgattatggaaattcgctcggcaatgcctggattttaaaaacactgatgaaacgtcacgaagaggaaatggatcatgtctggaaaaccttccgtccggacgctgctgcaaaacgcagcagtctgttcggcaaaaaaacagatggttcttccaattccattgtcgagtggatcaaccggcgggaatccacctgtttcatctgtagcagtgtaaaaaatacctttcaggcttacatgaaaaccttcttttccatgtacaaaaaagatgtggatttccgtgcacaggtggcaaataccaaaggattctgcctcgatcactttaaagttctctgcgaaggtgccgacgaacagctttccggtgaagagaaaaaagaattctatgccaccgtccttcctctgatgaaggaaaatttccaccgcgtctatgaagacgttgcatggtttattgaaaaatatgattacaaaaacaaagatgccgactggaaagattcaaaagatgccattcagcgtggcatgcagaaattgcgtggcagcgacccgtccctgcctcctcatgtgttaaaaaaataacttttagtttttccttccggcaactataagatagcccgcatccatcaaaagcatgcacagaaatacaagtgccgcatagccaataagataccccggatttcccatcctgtctgccagccagacaagcggagatccggcggatggccagttcacaaacatataattcacatcatatcttttatcaaaccagtaaatcggtatcacaaccgcagtcagaaataacaccacctgccagagttttacaaaatccggtcggatttcatgggatgcaagttttcctgccacatacagtacaattcccatatgaaacaaaaagccttccagtgtaatgaaatgaatgaccggataaaagttccagtttggaaataaaagtgccagcactgttcccgggagacagatggtatacagcacctgccccagccatttccatttcgtcagacaatgaacggcacacaaaattccagccatgctgcacagatgaaacgggagttcatataaaaacgcttcatggatcacggcaatataaattgctctcacgacaatccacaccacaagggaacatgccgtcagaccatccatccggcgtttttttctttcatccccttttttataaatccatacatatctgacgcatatgacaaaaataatcgagagccacaacagatgccatggaccgaacaacgcaaatccaatgccatccggaatatgggtttcatatgtaaaaaaataagaaagatatgaaagtttcacatcaaagacctccttttttacagtatctgtgttttcctttttattatgcaaaacaccctgcgccttttgcgcagggtgcctttcccttagaaatcttctgtctgctgttttctggcagacaggaaacattttatttcattacaatgttcacaagtcttcccggtacataaatctctttgacaatatttccggtcagtttatctgcaatgacttcttttgcctttgcaattacctgatccttcggatcatctttctggataccaagcgttccctttaccttaccattgatctgaacggcaatctccacggaagattccaccgtctttgcctcatcgaactccggccatgtctgctgatatactcttccctcgcatccgataatctgccacatttcttctgtaatatgcggagcaaccggattcagcagaatgatcagtgtctttaactctcccctggtgatagagccttttttataaaaatcattcaaaagtgtcatcatggcagcaatcgccgtattgtacttgaggttttcaaagtcattggataccttcttgatggtctgatgcatcttggtctcaagatccttggagtatccctcctcatcagtcataagatcctgcaatttccagacacggtctaagaatctgcggcatccctttactccatcttccgaccaggatgcagccagatcaaatgctccgatgaacatttcatacgtacgcagagtgtctgcaccatactcctgcacaatatcgtccggattgactacatttcctctggactttgacatcttctctccgttctcaccgagaatcatgccatgggaagtacgcttctggtatggttccggagtcggaacaacgccctgatcatacaggaatttatgccagaatctggaatacagcagatgcagggtcgtgtgctccataccaccattgtaccagtcaaccggcagccagtatttgagtgcttccggacttgccagtgccttgtcattgtgtggatcggtataacgcaggaaataccaggaagatccagcccactgcggcattgtatcggtctcacgctttgcaggaccaccacagcatggacaagtcgtatttacccagtcggtcattgctgcaagcggagattctccgttgtctgtcggcatataactttctacttccggaagaagcagcggcagctcgctctcatcgatcggcacatacccacatttatcgcagtgaacaatcggaatcggctccccccagtaacgctgacgggagaatacccagtctcttaatttataatttgtctttgcctgaccaattcctttttcttccaggaatttgatcatcttttcctttgcatcttttacttccaggccgtttaagaagtcggagttgatcagcacacccgtcgctacatcggtaaaagcagcctcattgacatccacttcttctccgttctttgcaactacctgaatgatcggaagatgaaatttctttgcaaactcccagtctctctcatcatgtgccggaactgccatgatagcaccggtaccatagctcatcagtacataatcagatacccagatcggaacttcttttccgttgaccggattgattgcagtcagaccgtcaattgccacaccagtcttgtcttttgcaagctccgcccgctcaaaatcagactttctggaagcctgctcgcggtatgcaacgatttcctcccagtttttaatctgatccttgtacttatccagatatggatgctctggtgaaacaaccatataggtaacaccaaacaatgtatcacaacgtgtggtgtaaatacgcagcttgtcttctgtatctttgatccggaaatcaacctcggcacctgtagaacgtccgatccagtttttctgtgaaaccttgacacgttcaatgtagtctacatcattcagtccttcgatcagcttatccgcataatcggtaatctttaacatccattcgctctttaccttgcggacaaccggagcgccacaccgctcacatacaccgtttacaacttcctcgtttgcaagacctaccttacaggaagtacaccagttgatcggcatctcttttttgtatgcaagaccggccttgaataatttcaggaaaatccactgggtccacttataatactttggatctgttgtgttaatctcacgatcccagtcaaaagaatatcccagagaatgtaactgatccttaaaatgctttacattattctctgttacgatttttggatggattttatttttaattgcatagttttctgtcggaagtccaaatgcatcccatcccatcggatataatacattatatccctgcattcttctcttacgggcaacaatatccaatgctgtatatggtctcggatgaccaacgtgaagtccctgtccagatggatatgggaattcaaccaacgcataatatttcggtttggaataatcattggttgcagcaaaagccttttcatcatcccagactttctgccactttttctctaccactttgtggttgtatacttctgccatgtcttcgcctcttcatttttcatattttttcacaatacatttattttacacataccggggtagtttgtcaaatgtcaccccatcacaaaaacaaaaaccccgatgatggtactcaccggggtttttaaaatcagtttctgattagttgttgatgagcttgtcgctctcgttgttccagctgtacagcttacggatctcagcaccaaccttctctgatggatgctcagaagcaagctttctcatagccttgaaatgaacctgacgtcctgccggagacatatccagtaagaactcttttgcaaatgtaccatcctgaatatcagtaaggatctgcttcatagccttctttgtctcagcagtaacaatctttggtccggtgatgtaatcaccatactcagctgtattagagatagaatatctcattcctgcgaaacctgactggtaaattaagtctacgatcagtttcatctcatggatacactcaaagtatgcatttctcggatcataaccagcctcgcaaagtgtttcgaaaccagcctgcataagtgcacaaacaccaccacaaagtacagcctgctcaccgaagaggtcagtctctgtctctgtacggaatgttgtctcaagaagtccggctcttgctccgccgattccaagaccatatgcaagtgcaagatcccatgcctttccggtagcatcctgctcaacagcgatcagacaaggagttcccttaccagcctgatactcagaacgtactgtatgtcctggtgccttaggtgcgatcattgtaacatcgacatcctttggtggcttgatgcatccgaaatggatattgaaaccatgtgcgaacattaacatgttacctggctcaaggtttggctcgatatctttcttgtacatatcagcctgtaattcatcgttaatcagaatcatgataatatcagcttttttagcagcttctgctgcaacgtataccttaaatccctgctcttcggctttcttccaggacttgcttccctcataaagaccgataatgacgttgcatccggactcctttaagtttaatgcatgtgcatgtccctggctaccatagccgatgattgcgattgtctttccatccagtaatgaaaggttacaatcttcctgataaaaaattcttgcttctgacatatcattgtcctcctaaatatgtatactcttatataaaaaaatatttttaataagtagccgtaactaatccaaaaaacggacatccgacgatccacgggtaagtcccgtaattccggtacgtgcaagttccagaatttcatatccatccagcagatctaaaaaggcatccagtttatcctgatgtcctaccagctgaattaccatggaatcgtttgtgacatctacgatctttccatgaaaaatctctgtcacattcataatcggctgacgctcgttatcctttgcgcggatctttacaagaatcagctcccgggtaacagaaagtcccggttccagttttttgatatccaacacatcttccagtttcagtaactgtttctcgatctgatccagaataagttcatcaccactggcaacaattgtaattctggtatatttcggatctgcagtcacaccggatgaaaaactgtcaatattatatccgcggcgactgaacaatccggatatccggctcgtcacgcctgggttattttccactaaaagcgataacgcctgtcttctcatatctcgaaaaccttctactttctttgtgttgtttagatcataatactataatctgtgtttgtcaagcactatttttattataacttccagttatattatgaataactcccatctatcagaatgggactttaaaagtgaaacatatgggaataaagaaaggttccgattcccacccccagtaaaatgatcacaataattttcataagaagcgcgatcacactgcagatcacacccgcaagagccattcctctgctgctgccgtacttgggtttctgtaatgcgataattccaagaatcagaccggcagctgcgacaagaaatgtcagccattttcctccggcacagcatgccagcagaatggcaacaatcccaaggatcattgaagcaattccaagcccgtttgcaccttcgtccatattctgcggtgttccgccataggtatacggattatctggatttgtaggtgttccacaatatccgcacatgacagaatcatcgggaatctctcttccacattttctacaatacatgatttctcctttgttctaatataatgttttgatcgcgccgttgtaatactgcaggatctttaaagcatccgtcagatctactttcccgtcgcggtttacatctgcggcggttttctccgcactggtaaacgtctttgtattattgtaatactgaatgacgtacagtacatcaatcagatttacttttccgtccccgctgacatctcccagtgtatgctgctgatctgtgatcgtcacactcgatgtcgccgaattgtaggaaaaaatatccccctgctgatcttccacagactcaatggcaactgtaacatccgtactgattccgttgttggaataggctgtcattccattggcaagctgaaaatcaatatacatcagatttcccgaagtatttacatctgctgctgccgtatattctgtcgtaagataccctccataggaagacatattgtaatcactctgcgtaagtgtcgactgtacttcaggtgccagtgtcacagactggaatgcaagaatatttttattgtatgaaattccaagtttgatcttgttgaatccgtcatttctggaaaaatataccggaacggaaatatgcccgtttccctttacgattccaagggaaagtgtcacggtctttgcctgggaattcgtcagtgtcagtttctgcgttttcagttccacatccgatccgtttgtgcgaagataagatggacggaaggtaatgtcggtctttattaccggttttgccgaggtaaattttaatgttgcaatcgatgatcccgatacttttaccggatctgcaatctgtgcggtggtatttcctgccgcatcctttttataataatccacggacagaaaatgtgtgtacccattataagaagccttccactctccgttattgtctgtctttccggatgtggtgcccccgtcaacaactaccgtaaccgaagtaaatactgaattgtcataagtcaggtatcctccgaatccggaagtctccgcattgacagaaaatgtcacatcaaatgactgtcccgcatttaaattgatggagtcactggcagtcttcatttccagcgaacctgcagtggttcctgccgcatacacatctgacggctccacaccagttcccgcaataaacatacatgcaagcatgattccggctattaatttctttgcttttctcataagaattcccccacttatatgtgttttgatcctttgtaactcattctatgtcttatcctaccattctctgtagcaaaaggcaagaagtaacaaagctggaaatttttctcttctgcggtaattttaagaaacaacaatttttaacacgaccggaaattcagaataaaaaccggaggtcttcacatgcagaccttctgcgtccgttttccattccggggatttttcatatccaagaacttctacctgtctgataatcccatggaattccgggagattctggtcactgctttctgccagagactgaacgcaaaagtttccatcctgcgggcactttaacgcaatggcataaatatttccatgattcactgtaaaacggtaatcctgcggcgtatagaccatctctttctgatctgagaactgtccctcctgcatctttgtcggaccttcggacgattttctccatacctttgctccatggatggcttcccggttcaccgccatccagtccgccagatcccggagaatctttttatctccttccggaagcgtgccatccgccttcggtccgacatttaataaaagatttccgtttttacttaccacatccaccagcgtacagatgatttcttgacttgttttatagatcagtgtatccgtatagcaccaagaatttcttgcaattgcggtatctgtctgccacggatacggttttgcctccgcaaagccgccacgttccatttctacaattccactgccaaacgccatcgcatcatgcttgtaacagatggcaacattcgtcccccattccgctccgcaattataataaaacgcggcaagtttctttaaatagggcttaaatgcctcatgctggacccaccagtcaaaatacaacaggcgcggacggtaattaaggataagttctgccgtccgtgccagccagtcatcgagaaactcttctgtcggatacggtctggaatacaggtcctccggatctgcctccggcatggatggccagtaaaaatccccttttttcagtggttcatggatatcactgtcaaacgtttttccatttccgaggaaaaaccagtgttccgcacggtgggaagatgtacagaaatgaattccccgcttttttgcttcctctttcagttccccgagaacatcccgtttcggtcccatgtcgaccgcgttccaatcggaaagatcactccggtacatctgaaatccatcatgatgttccgctaccggaaacacataaccggctcctgccgcctgaaacagttccatccactccgccgggcaaaaatgttcagcccgaaacatcggaataaaatccttatacccgaagttcttctgcaatccataagtttttctgtgatgctcatatgccggcattccttctttgtacatgttgcgcggataccactcattggaatttgccggaacactgtaaacaccccagtgtataaaaataccgagtttttctttcgccagccactgcggcatctgcgcttcacacagcgatgcccatgaagcctcataaggtcccctagcaatcttttcttctaccttctgtaaaatttccttttcccgttgtgcaattctcatccatcattctccttaaccgttcgattgccggataattattgggattgatctgctctttcgatgggagttcatccatacggaaaaaacaaagtttttctacttcctcctgctggcagatgatctgtccggaaaatttccggcataaaaagatctcttctgcggcataaatttcatccccgtttggatagacataatgtacttcttctccggagacattcataaagtgttcgaggtttccgcagatcagtcctgtttcctcctgtacttcccgtctggcacagtcttcaaagctgtccccgagttccatagaacccccgggatatccccataacccgttgtctgcacgtttctgcagaagcaactcccttttttcattcaaaagcagcactcctgcacaggtcataatcaacggccgatgacctacctgttttctcaattccaatatatatcccatatgttttgttctctctttcttttttctgtctccatcatagcatgggaaaagaaaaaagaaaaccgcgcatcttttcagatgcacggcatttgctgcttatatcgtaatatcctgtgtcaactggatatcctgcagggagcttccgacataaatgcggtaatccccatgttttaatctccatgttccggcagcttcatcataatgcatgaaatcttccatcgtgattttcaaaagcacggtcttggtttccctcggacgaagacagattttttcaaatgccttcagttccttcaccgggttttccggagaaaccgtcttctctccaagatacaactgaaccgtctcttttccctccagtgctcctacattgcgcacctgaagctgtacatcaaatccattggcacgcgctttggaaggaatttcctcaatttttaaattatcataggtaaagtctgtataagacaatccatgtccgaaacaaaactgtaccggaatccggttcttttcgtaataacggtatcccacgaagatgccttctgcataggtctgtgtcaaatgtgcattcatatgtttcttctcttcgtctgtcagaggtcttcccgggaaatacgcttctttccggaaacattccggaatctcttccggaagcgtttctgcaagttttccggaaggatttactgcaccaaacaatacctctgcaagcgcagtgcctccttccataccgctgtaactcatccaaacaattgcctttgccctgtccgcccatggtttcatggaaaccggacttccggcaagcattacaattgtcatatccggtcgaacctcaagaagctctgtaatcagccggtcctgtccgtatggcagggttaaatccgcacggtcctgtccttccagatcctgatcatgatttaaaccacccacataaatgacatgcttatattcttttgccagttccacagcttctttccgcagacgtgcactgtcctcggtttcctttgctgtctcagccgccgctttgcttgcatcaaggctgtcttcctgccagttatgatcgctttccttttttgccggaatatcatatcctctggcataacggacttcgcagtttccaccgagaaacttgctgattccaagcagtggtgtaatctcatacaaagctttaatctccgcacttccgccacccatagcctgtgaaatcactgcattctgcccaatgacaagaactttatcgattgcaggatcaagcggaagtttccggtcttcattttttaacagtgtgatcgattctcttgctacttttaaaacttcaaaacggtgttttgccgtattataacttcccgctttccggttcttgttcttctgaaccagaattttcttttttccatcagaatccggtacttctgtcagttcaatcatatgcaggcgtaccatcatccgcagaatattgcgcactttttcgtccacacaggcctcatctatattcccttttcggatttcgctgatcagcggattcgcaagaaaatagtcatcaaaatcactggttaccgacatttcgatatcaagcggtccctctgcggtcccctttgttgtatgtacggctccccagtcagagataatggttccgtcaaatccccattctttgcgcagtacggttcccataatatctttgttttcacagacatgtgttccgcggatcagattataagagcccatgatcgactttgcacccgctttttgtacaaccgcctgaaatgccgggaaataaatttcacgcattgtacgctcatccgcttccacatttacccagagccgttcggtttcctgattgttcattgcaaaatgctttacacatgctgccacatcagacgtctcgattccacgaactatcggaacggcaagttcactggtcagtcttggatcttcactgatatattcaaaatttcttccgcatgcaggtgttcttttgatattaatacccggagcaagaatcacatctttgcctcttccgcgtgcttcttctcccaacacttttcctgcattgcgtgcaagtttgcggttccatgtcatcgcaatcgcactgttgctcggacaatatgtcacataatcatctggtgttccgaccggcatccactgatcattgacaaactcgctgcgcacacccatcggtccatcggacatctttaaagggggaatatgaattctttccacccccgcggtgcgaaacagacccgcaccgtggatcatgccggttttctcttccagtgtcatttccttgatcagaagacagatccggttttccaatactttatccatcaatttttcctcttacctgattttactgtatacactctatgtggctctcacagtcacgaagaatggtgtttttattttctttggatgcctttgcgcccttcacatctaaaatgcctgtattaaccagttctacggtaaacggctttttgctgtcgcagtcgatcacaagcttatcctctatgcgttttaccacaatggaagccactttattctgatccatatcgtagatttcagcagctgcctcatcctgtacatcatatacacggaatgtcacctgatcggcataatcatactctggtccctcttcgctgtttccaagcggaagtaccgtattcggacgtaccatcagcggaatctccgtataagcatatgtgcgggtataccagtctccgccttcctgctgcctgccggtgaagaaatcggtccatatgccgttctcctttggcagatagtattctccaattccctcatcgttaaagattggagcaactagtaagctgtcgccgagcatatactgcttatccagataattgcacattttatcatttgtgtaagaaagaaccatcgcacgcatgcttggaattccctcgttatgtgctgtcagcgcggtcttccacaggtatggcatcagacgtgctttcaggcgtacaaagctgcgcagcacatccacggcctcatcgtcataagcccacggcacacggtatgatgtacttccatgcagacggctgtgagaagaaagcagaccaaacgcacaccatctcttatagacatccgcggtagaagtgttttcaaatccgccgatatcatggctccagaacccaaatccggaaagctgtaaggataatccgccacgcagactttcttccatggattcataatcagaccagcagtctccgccccagtgtaccgggaatttctgtccacctgcggtagcagatctcgcaaacagtactgcctcatcttttcctttctttttctcaagaacttcaaatacagcttcattatataaataggtataataattgtgcattttttccggatttttcttgtcatagtaaacgcaatcggttggaattctctcaccaaaatctgtcttgaaacaatccacacccatatcaaccaatgcttcgagtttcttctgataccatttctttgcctccgggttggtaaagtcgacgattgccatgcccggctgccacatgtcccactgccatacagaaccgtccggacgcttcaggaaatatccgccttccatgccctcgtcaaacatcacggattcctgtgcaatatacggattaatccatacacagatctttaatccctttgctttcatacgggaaagcatcccctccgggtccgggaatacacgctcatcccacaggaaatcggtccagtggaaatctttcatccagaagcagtcaaaatggaatactttaagcggaattccacgatcgagcataccatcgataaagctcataactgttttttcatcatagtttgtcgtaaaggatgtggaaagccagaggccaaatgtccaggccggaggaagtgccggttttccggtcagatccgtatagcggcgcagaacatccttcagatccggtccgttaaagaagaaataatccagactctctcccggcacagaaaattctacttttgtgaccgcttccgttgccacttcaaatgatactttctcggtatggttgacaaacacaccatatcccttgtttgaaatataaaacggaatatttttataagactgatcggtggaggtaccgccatcttcattccagatatctatggactgaccgtttctggtaaatgcggcaaagcgctcaccaagaccgtagatcagctctcccacacctaaagaaagctgctgtctcatataggcatccttatctgcgctctttacataagcatcacccttccagtccgtcttcatataggcaagatcacgccatgcactggtactgagcttcttatccccgttatagtaagtcatggaccagttctctttggtaataaccagttttgcatttccgctttttacaacaatcttctcatcatcttcggtggcatcaattgctgtctgtttgggaagatttaatgcaaactgtggtccatcctgaattgcgcccttataatgatacgtctttacacggattacttccggcatcggagtggtaatttcaaccgtaagattgattccgcccaatgtatctcctctgtgattaatcttatgtgtcggtgcacagagcactactttatctttttcaatttttgtaaaataaacttctgccggtgaaaagcaggcgcagccttctttctgcagccagcatccattactgaatttcatatcttattttcctctctttcccttcgccatacgaatgttttattttcccttatccacactatacaaaatttatccgtgctttcctactagaaattttagacgtaatttactataatatttatagaatttgccagacggtattatcccttaattttataacaaaggatattttatgaaactacatattaataaaatacatgatacacattctgtcagaagtcagctgcttcgtatttttctgctggcaggcatgtttccgcttctggtaatcggcatcttttccattgccagcgtgcgaaaacagatgcttgcccgctatgaatctctggagaaggcagatggcctgcgtgttgcctcctccttaaacgacatcacaactaccatatattcatcttccgataccctgcttaacagtaatcagtgtctgagtctgtttgcggcagaatcactggattccggtatcgaggaacagcttacggctctggagcgggcactccagacttattttgagaatacagcagccgttgcccgcattcagatttataccaacaatccaaaccttcaaaattccgagcatattcattatcagcagaattttgtcctggacgaatggcgcaaaaccctgggaaataactggagtacatgggcttccctgcagcgatacacggcaatcgtccggcagccttaccgtgaactgacactgatccggcggatcggtgttgcctccagtaaatatcaggcatttctggttgtcggtctggaccgcaataccattaaaaatcatctggagcagtccagcaatgaaacaaccatcagtctggacggaacccagatcatctatgccacagactctgttctgatcggcaaagacatggagtttcccgatgatttttccggctatatttaccgctacaccggtccgaaagaaatcggaaaccagatgcgtctggtcaactatgtaactctgcagtcctacaaatccaacaatttgttttatgtgcggaccgtggacccggatgccttaaaaacaatcaatcataccgttgccgtatttgtcctgattctggtacttgccctgcttgtaccattgattctgatgatctgtttttcggactatttcagcacaaggattacaaccctgaaatcagcaatgcaccgtgccagcctcggcgattacaatatcatcgaacaattccgcggtgatgatgagttaagcgatacctttaaagacctcaaactgaccgtggatgcgattcacgataaggaagcgcagttttatgaagcacggatccgggaacagcaactggtcaaccggcagcagcaaatggaatttgaaatgcttgccagtcagatcaatccgcatttcttgtataacactctggaaacgatccggatgcaggcactctcctgtggcaaccggaatgtagcaacttccattaaactgcttggaaaatccatgcgttacgtgctcgataataccggcacaagtttcaccacactgaccaaagagctcgaatatatcaaaacgtatctctccattcagcagctccgctttggggaccgcgtaaattacacccttcaggtggacgaagatctcgacaccaacagttgcaagattcttccgctgctcctgcaacctgtggtagaaaatgcaattcttcacggacttgagagcaaaacggaagacggtatgatcaccatccagattgcttctgcggacgcaaccctgctgatcacgatcaaagataacggacagggaatgacaaacgaagaactcgacgcactgcgggatcgaatcagaaaccacccttcctccgatacccacagcatcggtctttacaacatcaatcagagaatttccctgttctacggggaaggatattatatggagattgacagcgcaatcggagccggtacgaccgtccggctgaaaataccaaaaacaatttaggaaacaggatgaaaaacatggcaaacaaaattatcaacgtacttattgtagatgatgaacaaattgtaagagagggactccgctatatcattgactggaacaccctgggattttgtatctgcggggaagccgccaacggagaagatgccctggaaatgatccgccagtaccgcccgggactggttcttctcgatatccggatgtccggaatgcttggcacggaactgatggaaaaagcgcgcagtgaaggattttccggtgcatttattatcttaagcggttactcggattttaagtacgcacagacggcactgcaatttggtgcctcctactatctgaccaaaccgattgatgaagatgagctggaaaaagcagtacaggacgtccacgaaaaaattgaatttcagctaaacagcgagacatcccgcaaccagtacctgaaaaaagcaaaaaccaccgtactatacgatctgctgaccggaaatgattttaacccgtccattgattatcaggaattagggctctcctatccgatctatcaggtgctgatttacgaaagctatatgccatattttcgttcctacagtttcagtgatctgctgcgtgtcaccaacaaagacaacaattcctttgagcatgtcaatatcgacaatcatgacattatattactcaaaggcaattttgcactggaacggttaaatgcctgtctgcaccactatgacaagggaacgcagaaaggatctccgctggatacgatctttctaatctacggaccgacggtttcttccctttcacagattcacgaatcttacgagctgtgccagcggctgttgtcccggcgtttcttctgcggagaaaaccagcatgttctctcctatgaggaactgccggcagaaaattccgcctccgcaagtctggacgcagaaaaaacaagacattacagcgcgttacttaccgattacattaaaacctgtaatcagcgccggatttccgaagttctcgaagatctgcgacagtttctttttaatagtaactgtgatgtatcgagtatcaaatattttctggcagatatttttctggagatcaaacaggcgatcacacacacgtacagcaacaccagtatcccgtttgtacataatgcggcgatcatagaactcattgaaaataaatactatctgtacgagattctattgtattttaacgaacagttcgatatgatcatgcgcgcgatcggaagcaattcctcggcaagtgtgttcgatgatattttaaattacatcaatcacaattatgccagccagctgaaattagagactctggccccactgtttggttacaacagttcctacctcggaaaactgtttacccagaaaatgggtgttcgtttcaatacctatctggatcaggtacgcattgaaaaagcaaccgagctgcttgatcagacagatatgaagatttatgaaattgcggcaagtgtcggatataaaaatgttgattattttcaccagaaatttaaagcgagcaaaaatatcagccctgcggaataccgtaaaaatcaggatcattgattataagcaaaagaaagccgggtgcatcacgcacccggcttttgttaagggttttatctgattttatccaattacttagattcgcttaatacatcattgatgcactttactttatcttcataatctttcttatctacttcaaatacctgatcgtatccaagaccctttacggtatcctgcatatcttttaagatcttgttgaactcagcttcattctttgcaaataccatctgccatgaatctgcaacgattgtctgcttgcactgctctttgatggtactgatatcggtagagtactccggtgtggaatagtttgttcctggaagaactaacagattaccggttttctcaaagtgttcgatctctgtggtatctccatcattatgtgctgaccagtcttcttttaacttggtagaagtcttctcaagataatcatcccatctctgatagttgtagcagataccggtatccggatctgtatcaacgataccatttgccttaaagttcaatgcagatacaccatctttccatgttccgctgccccattcatccggcactttcaggctctcgtcaatatcaacaaatgcctttacaccgaaatctgtaagtacaggcttaccatctttcatttcccatgtcaggccttccggtccacagttaccaccactctgtgcagaagaagcttcaattccttccggagagtataaccagttgataaaatcaaccattctctgtgggtcttttgtctggctgccgaccatgataccaacactcatcttaccatccggcatagaaccgtaagacaggcacttcatatccttaattgtcgcagaggcaaatcccttaccttccgaagtattctctgttgtgttgtatacaccggcaccaagccatggccagaagctgtataatacatcaccattacggaactttgtctgtaacgtatcgaaattctgtgtggtagactccggatcaataagtcctttctgatttgcttcaaacaggaacttcaatgcacgtacatacatgctatcgctgtcaattacactctggatttcagatccgtctactttgccgagtgcaaatccaaggttctcatatccgtacagagcacagaaagcacctgcattctgcatggtatctccatcccagtctttgaagagagaaagcgcatagacatcttttccgtctttgctggttccctttgccttttcctgcatctgttccagaaccggaatcatatcttccagtgtatccatttccggatatccaacttctccgtacacatcccagcgaagagatggtgcattggttggctcagatgcctcacaaggctcagttgccggctgattggaaatttcactcggtactgcccatactccatccgttccggaaagtttacttgcggtattgattgcatccatacgatcctgtaaatatttctcatccttaatataatcactcatatcaaggacaagtcctgcggtcaccatatctttcaaacgactggaatccagatttgtgataattaagtcaccaagattaccgtttgcagaacgtgtctgatataaagtatctccaccacctgccacgtttggtgcaataatgttcaatttgatattgaacttatctttgatcagttttgcaaaccatccggtctgctcaccctggaagtttgcctgactgtcgaacacatcaatcgtcagctccttggcatattttccattggatgacttgcccccctgtgtggaatcactgtctgagctttttccgcagcctgctacggttccggcgagcatcgttgcagcgagtgccagtgcaagcgcacgctgtacattctttttcttcattgtaaatcctcctctataatattttacatgaatgtatgtaaaagaaacaagtgtttcttttagcctttcactgatccgatcataatacctttgacaaaggatttctggaaaatcggatatacgaacagaatcggcagtacaacgataacggaaatcgtcatacggatggatgtcggtgtctgctgggttgccaggttcgcaacggcagatacatttccaccggactgctgtaccatggttgccagtgaacttgcctgattcaggtaagtataaagtaaatactgtaaggaatataacttctggtctgtaatataaatcaacgtatcctggaaggagttccactgtcctactgcggaccagatggcgatggttgccataatcggtttacaggttggaagaatgacttttgcgaatacggtcatggttccggctccatcgatctctgccgcctcctgcaatgcaggcggaatggattctacataagtctttgccataatgatgttgaacggctgtacaattgccgggatgatgtatacccagaaactgttggtcagatgtaaggtcttcatggtcatgtacattgggatcagacctgcgttaaagtacatggtaattaccataaaacgataccacagttttctgtgccacatccgctgctgggtaaacatgaatcccagataaacggaagcaagtaccgtacagattgtaccgatcacagttcttccaagggataccattgctgcggttccaagaccattcagctggaatacttttacatagttctcaagctgaaaaccatgcggcagaaaatttactttaccacttgcactcagatcgtttgcactgatcgagttgatgatcagatagtaaaaaggataagcacaaatgatagcaaagatagcaaaaatcagaatattgattacctgaaatgtgcggtctcctttacttgttttaatcttcattgctttttcctcctattaaatcatgctctcgccacgtgtcttcttcgaaacgaagtttacaattgcaagaagtgttacgctgacgatactctttaagataccaattgccgttgcaagggataaacttcgtccggtcataccaatgttgtatacatacagatcaagtacctgaattgttgatttgttaaatgcattctggaacacaaagtactgatccataccattgttcaggaagtttgctaccgaaagcattaacattacgaagtatgtaggcataatggatggaatcgtgatgtttttgataatctggaaacgtccggctccgtccacctttgccgcatcatacatttcctgatcgattcctgcgattgctgccagatacataattgcgccccatccaaggcctttccatgtactccagagaatcatctgcagccatacatgcctgccactgtcgagaatctttaacggttctgagattacgccaaggttctgcatcactgtgttgaacatacctgtggtagaaaacagacagaaagcaatggagtaaaccagtgtccagctgatgaagtttggcagtgtagtcagtgtctgtaccagattcttaaaccatttgcatttgatctcgtttaagaatacggcaaacagtaccgggagaaatgaagttgcaataccgagtaaactcattgcaaatgtgttcttcattacctgaatcagctgcattacctgcgtcttgttactaaacagtgtcttaaaccatttcaatcctacgaactgacactgggaaagtttcagcggtgctttgtaatcatagagtgcgtagatccagccatgcagcggaaagtacgaaaacaaaaagcacaaaatgagaaatgggagaatcataaggaataacttcattccctgactctttttctttttggtcgtcataatagttcctccttctcgtaaccgttttatggttcaccgatgttttatgttgttattctatcatcaggaaatatttcctcctaccggaagaattcaaggagagttcccagaatttttagatgttcatagattttttacgatatatcagatttttatggtaatttttctggaatttttcatgtatttgcccgggcacaattcaaaatatgaaaaaagagatgctcttaccgcatctcccttcccatatttaccggattttttttataaagtttcgttgaaaaaacgaagcatatgttcgctccatgctttggccgaagtagcatatcctaacccgatgccgtgatctcccgtcggaaaagtctcgcacagatgcttcactcctgctttcgtaagtgccgcgtccaaccgggtcgtattgctggccggaacacagccgtcatcgagattcgcataagcgtatgttggcggatatccggtcagatcatgaagttctacagacagttttttctgaagatccgacttcccgcctgtattatagcgacagcttccctcatgatattccgaggtaaaactgatcaccgggtacaacagtcctaccccgtccggccgcgcagaaatccttccatatagtttttccagctccggatgcacacaaaaaatttctgttttcagttcttcatgcagcattgccgtgcttgcgcacaaatgcccaccggcagaagctcccaccacaagaatacgattttcgtcaattccatactgccgtgcatgtgcacgtacatgcataatagccagtgccaaatccatctgacactgcggataggtattgggctgaatgcgatagcttaaaattaatgctttatagtctccgtcacgctccatgcgctgtgcaagctgcacaccttccgaataataagaaagcatctcatatccgcctcccggacagaaaataactgccggacgcttcttttcctgtcttcgttctttgcaaacagcggcagacggatacggtggaacggatgcacagtcatcaaaatgcataaatgcctgctgatccacatccggatttcccgtaaacagccatacaccctcttcgtcattttgatcctcttttggaatccacccctctttttgcgtatgccagagaggtacaaacagaaatttttgtttctctgcggtctccatcagcatattggcacagtttaccagtggctgggaccagaatgcttcgccccactccatgtgcaccctgtcatggatctgttccatcgtttcttcctcatgcccctgcagcaatatgctccaacaggtcggaaacagatctcccaatgccgtatccaccggttttgttgtttttatttctttccatgtcgatttcattgaaaacatatagtttcactccctgccaaaaaccatatcataaatcacatccgtaatttcagaattgtccggcaaaatacctgttataaaaagtcacgcagcatacgttttctgctcggtgcaccaagtttacgcagtgcctttgcctcaatctgacggatacgctctcttgtcacatgaaacatctgtcccacttcttccagcgtgtgcggctgatttccgtcaagaccgaaccgcagtgtgatcacttcctgctcacgatccgtcaggtctttcatggcaagtgaaatctgcttattacgcatctccgcaatcgcattctcctccggggataacgcattggaatcctgcacaaaatcacccagatgggaatcgtcctcatcccctaccggagcctccatggaaaccggatcctgactaaaactcatgatctccgttacacgatcttcatcttcgccaagcatctccgcaatttccttattggatggttctcttcccagctcctgtgtcagggtacggcgtgcacggacaaccttattgattgtctccaccatatgtaccggaacacggatcgtctttgcctgatctgcaattgcacgggtaattgcctgacggatccaccatgtcgcatatgtggaaaacttaaatcctttttcgtactcaaacttatcgactgctttcatcaggccgatattcccctcctgaatcagatccagaagcggcaatcccctgccgacatacttcttggcaatacttactaccagtctgagattggcttcaatcagttccttcttggcttccggatcaccctcactgatccgcttggcaatcttttgctcttcttccatggtaagcagacgcacctgtccgatcgtctttaaatactgacgtaccggatccgtgatatccgccccctccataaccgacagatcttcctcgatattttcctcggaatcttcctcaatatcatcatcaatatccaaaagaatcttactttcttccagttcttcgtcatccacctcatccggttctttctcctttgcagacaaagaaaccgtctgctccatgtcattttttgagcgaaggacttcgatcttgttatcttctaaaacttttaaaatgttgtcaaactgctcagaggaaatctctacccctgaaaatgtatccaggattttgctgtatgcgatcttatcctgattctttttgccctgttcgatcaggcctgctaccatttgaataatagaacgtttatcttctgtcacgaaaaatactccttatcaataaattcccctattttattttatatcttcttttaggttctaaaacattttaccacaattcaaaaataattccacaccttttttcgtatttatgttcattatttgatactgccgtttattctcccctgtgctctgctcctgcattgccttgttattcccggctctttcgtcctgctggtggcagccgatccccctcatgtatctctgataccctatcaacgcactgtctctcataactccggtgggcggtgtcgtttggaatgtccggattgtatacaggctttccatacttccgtattactattgttatttattgtgacaaatattttgtctgaatacttatcgccaaccctgtttgattcaatttccgattttggaatagccttctttcatacgctccatagtttgccccattggcagctttcctgaagaagtgatttccaatcggttgtcatataccacaacctgtatcgtaccatgatccagataacgatatttaatggtattgaatcaaaaatattatgtctcactttattctcttctttacaggcactttctcggcatattcctgttccagttcctccgccagatacgcatcgctcatgcagtgcatatcggaaacaccatcacggatcagctgataaaccagtgaatgataaaagaaatccaaagccgcatccagtgaaagtccctgctgtttagcaaagcattcaataacacggctatattttttctgaagcaaaatcggattcgctgtcatagtgtttcactcccttcaaaacgcagcagagacagtgctttctctgtgcggaaacatatttgcaggttcggcttttcataacgcaggcggttgatagcttccgttttatcaatcagtccgtcaaagaacagctccaccgtattgaacaccttatcattggcaacaccgcctacaacaaggtcataatccgtcaaatcttttccactgcggcagttcagaataaaatccagccattcttcggaataagaatcgaatttcagcgtttttagttcagcttcccggctttcatcgtattcatacctggagataataccatttttcccacggtgtttgaacttgccgcaccactttgctgcctgttcatacaacggtgtgacataaaagccacgcccgaagtctacgttagggcgggaatgaaccaaatccggcttagcaatctctaagaaagaaccatgatagagaatcatacttccacgcccctttctttcatcacatcaagaagatcattaacgatatattcccggctctgggtatgcagcacttcatattccggcacgatataaccgttcagaatgttgcttttttcagtaaatgcctgatacacacgctctgcatccacacccagctttgccgctacattttcaatgcaaaacacggcaaactccaactctctggaatttttgattttttcatccgccatcacgtgtcaacctttcctatatttttaataattcatagacttttttaaaaattcaacctttgttctatttccttatctgcacaataaaatcaaaataatcttttccaattttagtttcgacatctggataacctgatgtatcaactatccaatgattttatgggctttccttatattatatttaatttaaaattatttattgttatttacagttttttgcttttattttgctaacgcggtcaaacttctaattcatttaatttcttcatgtactctgccttctctttataccctctgatttcatttgcaccaagttgtaatgctctgcgaatatactcttcatcattttcatcagacgcatgtttacaccttctagtatgattctgctgcagttttgaagaacatggatacaattcttttactattacgatcaactacagtataccatcaaaacaagacgatttctattatatctacattttccaccaaatgattcacaataaaattgtacttatcaatagaaaccaatcgcggaatactgccaacttctcgagacagttttgtcctgtttaaaatatctacataagatacgataaaatacagaccatggaacaattgtgttgcagggtggctgacctctattttattttacatagaatgggggtggtgctgataaacaagagatttgattttaaagacctcatgacctttggtctgttcattcttgcattactgacattcgtatttacgtttatcagatagtgttttaaagcatagaaaaaccaccccaactttgaccgagtaccagggtggatttttctaaccaatttgtgaggtcaaccacttgtgggcaattgttcctcttttatttacattaactataacacgacacgttccaaaaaacaagtggcattatttatatcatatgatagccctaaaatcacagaaggcaagctcataatcaaacaaaattatcctaaccgttacaataaaacgcttaagggtgtctgtattccggacaccctctttttatatctaaatccggcgggaaatttgcgtcctaccgtttgtgttctacgtgcgtcctacgtggcaaaatttaaggctatcgcggaacattgtaaaccacgatagcccttgattttactgtgtttcttagaacttaccagcctttgcagcttcctcaacggatactgcaacagcaacagtagcaccaaccattgggttattacccattccgatcagacccatcatctcaacgtgagccggtacggaagaagatccagcgaactgtgcatcagagtgcatacgtcccatagtatctgtcataccataagaagcaggacctgctgccatgttatctgggtgaagtgtacgtcctgtaccaccgccggatgctacggagaagtacttcttaccctgctcgatacattccttcttgtatgtacctgcaaccggatgctggaaacgtgttgggtttgtagagttaccagtgatggaaacacctacgttctcatgatgcatgattgcaacaccttcctgaacatcatcagcaccgtaacattttacagttgcgcgaagtccgttagagtatgctttctcatatacgatgttaagctttgcagccttgtaatcatactttgtctctacgaatgtaaatccgttgatacgggaaatgatctgtgctgcgtcttttccaagaccgtttaagataacacgaagaggtttctgacgaaccttgtttgccttctcagcgataccgattgcaccctcagcagctgcaaatgactcatgtccagctaagaaacagaagcactctgtctcctcctcaaggagcatcttaccaaggttaccatgtcctaaacctactttacgatgatctgcaacagatccaggaatacagaatgcctgaagtccttcaccgattgctgcggcagcatcagcagctctcttgcatcccttcttgattgcgattgcagcacctacagtgtaagcccagcaagcgttctcgaaacaaattggctgaatcttcttaacctgatcgtaaacgttcagtccagcgtcctttgtaatcttttcagcttcttcgatagagctgatcccatagctgtttaaaacagcgttaatctggtcaattcttctttcatatccttcaaataatgatgccattatatcgttctcctttccaattattcctgacgtggatcgataatcttaactgcatcgtccacacggccatactgacccttggctttctcccaagctgtgttaggatcatcacccttcttaatgaagtcagtcatctttccaagagaaacgaactggtaaccaattacctcgttattctcgtcaagagcgatacctgtaacatatccttcagccatctcaaggtaacgaacacccttctcttttgttgcatacatagtaccaacctgagaacgaagtccctttcctaaatcttccagaccagcacctacagcaagtccgtcatcagagaatgcagactgtgtacgtccatatacgatctgtaagaaaagttctctcatagctgtgttgatagcatcacaaactaagtctgtatttaaagcttccagaattgtcttaccctgtaaaacttctgcagccatggcagctgaatgagtcataccagagcaaccgattgtctcaactaatgcttcctcaatgataccgttctttacgttaagagaaagcttgcaggcaccctgctgtggtgcacaccagccgacaccgtgtgtaaatcctgaaatgtcctcaattttcttggaatgaacccactttccctcttccgggataggagctggctcatgctttgcgccctttgctacaggacacatgttttcaacttcctttgtgtaaatcatcttaagactcctttcgcatgttaattgtagataaactcgttatcattcgacataccgctaatatttttgcatatttttttcctaaagtctagtgcaaattcgcacttttttagatacaactactatttttctttttttgccacaatatggtctgcatccttgtagatatggtttgccggaatcactccgcggacagaagaaagcggatagacattacaattcgggcagataaccgtacctggatttaaaacggagttacatcctacctctacgtgatctccgagcatagctccaaatttcttaagtcctgtttcaatttcttcaccggaatctctgctgtcctttacaaccacaagtgttttatccgattttacattggaggtaatcgaaccggctcccatatgggacttgtaaccgagaatggaatccccgacgtaattgtaatgtggtacctgtaccgtgttaaaaatgatatcatttttgatctccgtggaatttccgacaaccgatccttttccaatgatcgcactcccgcgaataaatgcacagtgacggatctcggcatcttcatcaataatcagcggtccgttcaggcatgcagtaggcgcaacggttgcactctttgccacccagatattttccccacgtttctcataaatttccggatcaagttccggcccaagttttttgataaaatcgctgatgccttttaatgcttcccacggatatgtaaactgtgaaaggtactctcctgcaatagactgtgacaaatcatacatgtttttgatttttgcgttttccattttttaatctccttacattttaattttcatgattactgatcgtttttctttcggactcttccgtttccttcaaagccgttgtttcctctgcggctgctgcttccttcggcggtgcctcccccggattatcaaaatcaaacgaaatctgatcattttcatatttcaggcaggtgtcaaatgtattgcctgcctttgaggtaaatccggcaatcttctgcttcgtctttccggtcgtcagcagttctttcatcacttcttcggaaagttccaccttagcaacggtatgccagatcttaaatccgcacgcacattcatacctccactgcgtcttcatcagcattttgccgcatttcgggcacggcacggttgtctcttccggtctcggtttctccggaaaatcaaatgcgatctccccttcttccgtcagtttcagcggcgcatcaaatttcataccggtctttgccacaaatcccgaaattacctctgtcttctttttcgtcagaagctctttcacctgcgcttctttcagccggacacttgcgatacttccaatcataaagctgcagctttccttatcatcttttttatgattggcacacataaatccaaacggtgccactacaatatccccaccacacttcgggcacttcacatctttgactttctttggctctacattgtcaaaatcaaatttcagcccggttactttcccgttttcatcttttgcgagagctacgcgcgcatcaaatttcttccctgtttttgacttaaacccacgcatggtttccgtaatgccatcgtttaaaagctgccggacctgtgcttccgtaaaagatttctctgccatcttcccaatagaaaacctgcagctgttttcatcgcccggcttatagttagcacatccataaccaaaagaggtcgcaatgatctcacccccacagagcggacactttacatcgcggatcactttctgttccacgctgtcaaaatcaaatacaatattcgtctttccctcttcggttttctccagtttcagacaggcatcaaattttttaccggtttttgatttaaaaccgcgcagggtatctgtgtgaccatccgtcaggagctgctttaccgcagtaaccggcagggtttttccggcgatcgttccaatggaaaaccggcagctgttctcatcgtccggtgaaaagttcacacatccatagccgaaagatgtctttttcatctgtccaccacataccgggcactttacctccggaataatttccggttctacgtctgaaaaatcaaatgcaatattaacttttccgttttcatctttatctaccttgagttttgcatcgaaccgtttgcctgccttggatttaaacccgcgaatggtctgggtatgcccctgttcgataagttcttttacctgttcctcactcagctgaacacctgcaatttcgccaatattaaaattacatcctgatttatcattcttataattcgcacatccatagccaaatggcgtggttacaagttctccaccgcatgccgggcatctgacgccaatctttcttctcgcaccggcaccccttgcatgtttcccggcaaaattactgatacgttccgcaagcggttcccgcagatcctgtccgatcatcttttccgtttcagtacggatgaaatcttccagtttcgtccggtaatcccagaaatccacggttccccgtgtaattccatcaagtcccttttcccaggaagctgtcatcttcgggttcaaaagtgccgggacggtcatgctcaccacttcaaataccatctccccgagattttccggtgtgagcacctgcgtccgtttattcagattgaggtaatggatacggaccagtttcttaatgatctccgcacgggtggcagaagtaccaattcccgaacctttgatctgttcccgaagctcctcgtcttcaatcagctgtcctgcattttccatggcaagcaccatggaaccggaggtgtaccgcttcggcggtgaagtttttccctctttcacctcatatccatccacggaaatctcatcgccctttttcagctgatctgccagatgtagcagttccttcggatccgaatcttcttcctctttctttggaattcctgcaatttccaaataaccgggtgtctttaacacacgtgcggacgcataaaaacgttccttcttttcccccacatccacaacagccgtcatttttacattctgatattctgccgccggataaaacacactgagaaatctccgcacgatcagatcaaataccgatttctgcagagtattcagtttcccaagctccgtgagctgaccggtcggaatgatcgcatagtggtctgtcactttagcatcatcggtatactgcgttcctgcaatatttccatacagctttctgtcgagaatctgctccacaaaatccgaagtcggctcatatccccgcaaacggctgatatttttatggatttcctttgccaccggagtggaaagcacacgcgcatcggtacgcggatacgttgtcagtttccgttcatacagatcctgcgccacctgtaaggtttcatccgggctgatcttgaatcgttttgcacattctgcctgcagctctgccagattaaatagtaacggtgcccgttttctggaaatatttttttcgatggattccacaatcgcaggatgtccctgcacgcggtcaatcaatgccagtgcatccttcttttcccgaaatccgttttccttatacaaaagcggcgatgcaaagtaccctgatccctcgacggctttccactcgccctggacatgtgcatctgtgaaatttccgacaacacggtaaaacggtgtctccttaaaattgcggatctcgcgctcacggatcacgaccatcccaagcacacaggtcatcacgcgcccgaccgcaatagcggtataagaacgtgttcccgccgcattgtttaacaaccctccatattttaccgacattacacgggaaaaattaatgcccatggcataatcttcaatggtacgcataataccggattttccgagattttcataggcagacatcggttttgcttcccggattccccgttggatctcttcctctgtctgcgaatcgatccagacccggagttcctccatgccgtctcgcacaccgccgaaattgcggatattttcctcgatcgtctgtccttcttttccggcatctcctgcccagtagacacggtcaatatcttcacgcatcaacattccgtgaaccacatcatactgccggctgacatctttgatcacatcatatttatattcttttggaagaaatggcagatcttccagtttccactttttgtattttatatcataactttccggatataccatggctaccagatgtcccacgcaccaggtgattacatatttctggttttccagatagccatccctgcggcctccgctcaccccgagaacttttgcaaattcctgggcaaccgacggtttctccgttatgatcagtgactttcccatcttctatcccctattggcaaactttttctataattcgttcatatcaatcagctcaaaccggtcatccgttttggcatgttctgccaacatcggttcaaaccgcgttgcagagaataaaaagatatgctccgaacggatttttgccttttccatgttctgatacagttcctcgcacatctgcgatgtcagctgtggctgatcccaattacatagtcccacaatatttctgcggtctgtgctctgggcaataatatcaatgtttcctgtctttccaacccaggttccgatcttatgaactggaaacggcatgcgtcccatctgattcaaaagcatcatatactccatgcagacattccggaaataacgtttcagatacgtgccaagttccggtgcaatgtagcggtcgtaaaattcatgcggtttcagcagataaagatccgacatgtggggaaatataaatttaaaccagaaattaataaatgtatctttgatctggtataccccttttttggcattctcccagccaccggtctgaaatgactgcactttctctacaatatcaaaatggctgagatttttcatataaacactgatctttgcacgggaatatccggttttcaaatacaggtcattcagtttattatatccctgtgcaattgcagataaaattgtgttatagacggaaagttcacgcaattctgccgaaattttctgttctgccatatgaaacagatatcccccctccgtcagcacaagccggtaaatattctccctgtatgaaatttccggattccaggcttccatatatcccggcaccccaccgatggttccataaatacggatacagtcgctgaccgaaagtgccggaaatgtccggacaacttccaggaaattcagatcttccactttatgcagtacatcaatacgacggaatccatccccgaacgcatcttttgcatcctgcgtggcccatacaatggaagaagacgccagaatgatcatcaccggtcccggataaagccgtttcatctttaattttaaaatacttttgacaaattccggatctcttttaattgcatactgtgcctcatcaatcacaatcaccagttttgatgcatctccgctttttacccggttaaaaaattcatcataggaatatctgctcagcttcatctgaaaagcattttgaatttcttctcccattttctgcatctgttcctgtgcggaaagctgtctgcaccgataataaaaatactttttccccacacagaattctttgatcagctgttctttccggcagtccatcccaccatacaaaagcatcagctggtttcccgattttgcataccagccttccagttctttgagatctgttttttttgcgttcatcccgattcctccgtacaaaattccttctgctaaaagaaattatatcactgattaatatctctcacaaggttttcggcaaaaagaaagaagtgcagtttttgcacttctctcccaaaatccgtatttcaatttactgcttatttctttgtgatatatccctgtgcctttaacagctctgcacataaaactgcaccaccggctgcaccacgaacggtattgtgggataatccgacgaatttccagtcatatacggtatcctctctcagacgtccgacagagattcccatgccatgctcaaagtttacatccaggctgacctgtggacggttatcctcttctaagtactggatgaaatgctccggtgcactcgggagcttcagttcctgtggcacaccactgtaattcttcagtgcttcgatcagctgctctttggttggcttcttcttgaatttaacaaatacagctgctgtatgtccgtttaataccggtacacggatacactggcaggtaatgaccggtgaagctgctggaacaatctgcttcttctcatcatctacatgcccccagatacgcagaggctctttctcagacttttcttcctcaccaccgatgtatggaataatatttccaagcatctccggccagtccttgaacgtctttcctgctccggaaatagcctgataggtagtggcaactacttcatatggctcaaactctttccatgcagtcagaaccggtgcataactctggatggagcagtttggctttactgctacgaaaccgcgctttgtaccaagacgctctttctgatacttgataacttccatgtgctgtggattgatttccggaactaccatcggcacatccggtgtccagcggtgtgcactgttgttggaaacaaccggtgtctctgtctttgcgtaatcttcctcgatctttttgatctcttcttttgtcatgtctacagcagaaaatacaaagtcgacctgagaagctacctgctctacctcatttacattcattactacaatattctttacagcttccggcatcggagtatccatcttccaacggtctcccactgcctgctcataagtctttcctgcacttcgtgggcttgctgcaatcgtggtaacctcaaaccatggatgattctccagcaaagagataaatctctgtcctaccatacctgttccgccaaggataccaacttttaacttctcactcatttttccaatctcctctgttcttttctttatacgcggacacctgtcttttacagaaaaacatttttgttttttgtccgtgttgcacgaacatgtgtctttataggaaatatattacttgaaaccaggtaaaattacaaggaacaaattgtcctaaataaataaaatattcctcaaatatatgtaggacttgcacaatccgaaataccgactaagtggtatttcaggcaatgcatcagagatgtaccgcaattacgtacatcgcatcgcacaagcgattctgcatacgatgtgctccttttgtctcattttttctccagatatgcctcttcgattgcgatcactttcttcatcgcctcatcccctggtgcaccgatcgtcagacgcttgttgacacaggtttccatggagattgcatcatagacatcctcctcaaataccggagaaaactgttttaattcttccagactcatatcgtcaatcggcatctgtttgtccagacagtacaaaacaatacgtccgataattccatgcgcatcgcggaacggaaccccgtgatttacaagataatcggcagcatccgtcgcgttggtaaagccgtgtgcggcactctttctcataacatccttattgaatttcatggtatcaagcatgcccgtgaataacacaatacagcctttcgttgtgtcgatggcatcaaaggaaagttccttgtcttcctgcatgtctttattgtaagcaagcggaatccccttcatcgtggtcagaagcgacatgagcgcgccatacacacgcccggtcttgcctcggacaagttctgcaatatctggatttttcttctgtggcatgatactgcttccggtactgtatgcatcatcaatctctacgaatttgtattcgttggaattccagatgataatttcctcggagaagcggcttaaatgcatcataatggttgccatggcagacagatattcgatcaggtaatcgcggtcggaaacaccgtccatactgtttaaggtcggtccgtaaaagccaagaagctctgcagtatattcgcggtcaagtggataggttgttcctgccagtgcgccggaaccaagcggacagtaattcatgcgctcgtaaatatcgtgcatacgggaacggtcacgcttaaacatttcaaagtacgcccccatatgatgtgcgagtgtgatcggctgcgctttctgcaaatgggtaaatcctggcataatcgtctgcgtattttctttcataatgcgaagcagtacctgcagcagctgttccagcagttcatccgtctcaagaacctgctgccgggtatacagacgcatgtccagtgccacctgatcatttctgcttcgtccggtatgcagtttctttccggtatctcccagacggtcaataaggtttgcttccacaaaactgtgaatatcctcatattccgaagtgatggcaagctttccgctctccacatccgcaagaatttcctgtaaacaggaaacaatcgcctgcatctcttcctgtgtcagaatgccctgctttccaagcatacgcacatgtgcaatggaaccctcaatatcctgcttgtaaaatttctgatcaaacgaaatggatgcattaaaattgtaaaccagctggtctgtctccttcgtaaatcttccgccccataactgtgccatatctaaattcctctctttcttaaattctttgtttttttataaaatctgttcttcctgctgtctgcgcagtacgatttcacggtcgcggtcacgcttggaatacacacacccacagtagtactgccggtacatgtgatactccttagaaatttcggtcgactttttatagccttccttctttttaaaatccgaaaacagataacggacaccaaaggtatctgccagttctgctccgatctgatttaacttttccgcatttttcagcggactgatggatagtgttgtcgtaaagaaatcaaatccgtgcgcttttgcataggacgcagcctcggaaagccgcagccggtaacaggcaaaacagcgctctcccccttccgggatctcttccatgccctttgccatatcgtaaaaccgctgtgtatcgtatgcaccttccacaaaagaaaccggatattttgtaggaaactcagcaataaaacgttcctgctcctttgcccgcatatgatattcttccggcggataaatattgggattgtaataaaataccgttacatggaaatgttctgcaagacatgcaatacaataagaactgcacggtgcacaacagctgtgcaaaaggaggcttggagcctcccctgccgtacagttttcacggatcagatcttccattattttctgataattttttttattcatctttcatctgtatacatctgattaaaaatttcttttccggtctgcgtccggaaaatttgctgatatgcctgttcaattccgtgacgattgacgtcatcttcatataaattgaccagaaaatctgcctccaccagaatctgataatccagtccttcgatattatcatatgtatgatgatgtccgatcagatagcagatacggtcgatcagataattttcaattcccacatcggaaagcattctctgtgccacaatcggtccttcctgctcctgcagctttccgtcacaccgtccatacttttcttctgccggacggattccaatgtcatgggtataagcggctgcttccaatataaaaagggatgtctcgtcaagcccttcttttgttccgatgattcttgcgaaactatgcactttcatgaaatgctgaatccgtttcggatctccggaaaaaaaggcgatcatctgtaaaaacagctcatccagctgttgcctgctgtaataactactgtcactactgtccattctgtgtttctcctttatctaacatctgcagtgcaaacgtcgctgcaatgtaaacaactgcacataaaataatcaatactgttttttccccggcaacaccggcacaaagttctgccagaataagaagtccatgcacccagagttccgcatgatgcagcatcactgcaataactgcctcaatgataacaagcagacacataggaactaccggaacgttaaggactctcacccctacaatcaccataattgcaacaattgctgcaaaggccagtaatgtcggtacctgaaacgtctttttgttcttgtccattttttacctcaacctttattcttattttctttgtctgcgcccattataccaatttcatgcctaagaaacaagcactttttaaagtaaaaaagacacgtcttccatcggatacccgatacaaaacgtgtctgaaacgaagccaataaggggactcgaacccctgacccacgcattacgaatgcgttgctctaccaactgagccatattggcaaaacgtacttgtatataataccaaaatcgattcagaaaatcaactgttttttcataaaatttatattaaaaaaagattgacttttcacatggattctgtagaatagaaattgttgagtttataattagtaaacaaaaaatcaactaacaaccatgtttcataaatttacgggaggcatgccatggacattggacaccgcatgaaagaactgcgcatccagtacggactgacgcaacaggagctggcggaccgtgccgagctgaccaagggctttatctcacagttggaacgaaaccagaactctccgtccatcggaactcttctggatatcatccagtgccttggtacgacaccagcagaattttttacagatgaagagccggaacagattgttttcaaacaggaagattattttgaaaaaaccgacgaagaaaaacactgctgtattgaatgggtcgttcccaatgcacagaaaaaccagatggaaccggttcgtctgactttacacgccggtggacggtcagaagtttatcagccccatgagggggaggatttcggttatgtaatcaaaggaaacgtccgtatccactatgccggacaaaaccagacggtacatgccggggaatctttctattttaaagcagggaaaaagcattatctggaaaacaccggtgcaaaagatgctgtcatcatctgggtgactaccccaccaaatttttaagaggacaaacgtatgagtaaacatttaattgattttattggaatttccaaatcctacgattccaatcttgtgttggatgatttaaatctgtatgtccgggagaatgaatttttgacccttttaggtccgtccggatgcggaaaaactacaaccctgcgtctgctgggaggctttgaaagcccagacaagggacagattctgtttgacggacaggatatcacagctcttgccgccaatgaacggaaactgaataccgtttttcagaagtattctcttttcccgcatatgtccatcgccgaaaacattgcattcggccttaaaataagtaagaaaagcaaagcatatattcaggataaaatcaaatatgccttaaaactggtcaatctggaaggatttgaaaaccgttcggtcgattctctctccggtggtcagcagcagcgtatcgccatcgcccgtgcgattgtaaacgagccaaaagtccttcttctggatgaaccgcttggtgcacttgatttaaaactgcgccagagcatgcagtatgagctcatccgtctgaaagaagaacttggaattacttttgtatatgtcacccacgatcaggaagaagcactgaccatgtccgataccattgttgtcatgaatcagggatatatccagcagatcggtactccggaaaacatttacaacgaaccggaaaacgcatttgttgccgattttatcggacacagcaatatcattgacggaaccatgataaaagacgaacttgtagagattctcggtgcccgttgggcatgtgtcgacaaaggattcggcaataacaagccggtcgacgttgtcatccgtccggaagatgtagaacttgtcgatccttcggagggaacgctgcagggcgaagtaacctccctgatttttaaaggcgttcactatgaacttgatgtcatggccggcggctatgaatggctggttcacaccaccagatttgttccggtcggcacaaaagtcggcatcaaagtaatcccgttcaatatccagattatgcgtaagccggaatcttccgatgaaaaggcggtggagatcgatgcgtaaatttaaacagcaatttcttgccggtccatacctcatatggatcatcggttttatcctcctgccgcttatcatgattctttactatgcatttacaaacggcgatggcagttttacgttatcctatatcacagcgatagcagatgaaaccaaccgcaaagccatgggactttccctgagacttggaattatatgcaccatcgtgtgcctggttctctcctatccgctggcaatgattttaaataataagaagatcaaaaatcagggactggttgtttttatctttatgcttccgatgtggatgaactttatgctccgtatcctggcatggaaacttctgctttccaaaaatggtgtaatcaactccattctcacaggtttcggactttcccgcatcaatatcataaatacaccaacggcagttgtccttggcatggtatacgacttcctgccatttatgctgctgccaatctacaactccatgacacgaatccgtaaagactggattgaggcggcccgtgatctgggtgccggaaatgtaaccatctttttaaagattatccttccgcttaccgtatccggaatcatcagcggaatcgtcatggtatttgtcccgtcacttacctcgtttgcaatctcgcaggtattaggcggtggtcatgttcttttaatcggaaatgtgatcgaacaggattttatgcagggtatgcaatggaatgccggaagcggtctttcctttgttcttatgatttttgtgattgcaagtatgactattgtaaatatatttgataaagaaggggagggaacatccatatgttaaaaaaatgtgcatcccggatctatatggtcctgatttttgccttcctttaccttccgattattgtgttgattgctttgtctttcaacgattcccgttccaaggtaaaatggggtggcttcacgctccggtggtataccggctgttttcaggacgaaaagattatgactgcatttgtcacaactttgcaggtcactttcctgtccgcaatgatttccacactgatcggaacacttgccgcgctcggcatagccgccatgaaaaaacggcaccagaccatttatctcggcgcgaccaatattccgcttctgaatgcggatatcgtaaccggtatctccatgatgcttttgtttgtgaaatttatcgacctcggatttgtgacggttcttttagcgcacattacttttagtattccttatgttattttaaatgtgcttccgaaaatgaaacagacaaaccgcagcacctatgaggcggcacttgatctcggagcaacgccgctgtatgcattttacaaagtcacctggccggaaatccgtcccggtgtgttctccggatttatgatggcagtcaccatgtcactggatgatttttccatcacctattttaccaaaggagccggggtcaataccctctccaccatgctctacacagaacttcgcaaaggaatcaaaccggaattgtatgcactttccacgattctgttctttgccgttctgctcattcttcttgccggaaatgtttatccggggaagaagcgtgttgcagccaaataaattttccattggaattttattccagccgaaaggagtcctattatgaaaaaaagaattttctctgccctcttaatttctgctctggcagtcagcgcactcactgcctgtgggggatcttcctctgcgaaaaaaagcggacagaccttaaccgttttaaattacggaaaatatatcgatgagtccgtagtcaaacagtttgaaaaagaaaccggtatcaccgtcaaatacgaagaatatgaaagtccggaagaaatgtataccaaatacaaagccggttccatcaactatgatgtaatctgctcttccgaatatatggttgagcgtctgatcaacgagggcgaagttctcgaagaagattacgatgccatggacaactacaaaaatctggatccaacgatccttgatatgtctgcttcctatgacaagaatcacacctattccgttccatatttttacgggactcttggccttctctacaacaaaacaaccattgatgccaaaaccgtatcaagctgggactgcctgtgggaccctacctatgaggatgaaatcatcatggaaaattccgtccgtgatacgtttgcccctgccctgatctccaaagggtattccttaaacgataccgatgaaaatcatctgcgggaagccctcgacatattaaaaaagcaaaaagatgataaaatcgtatatgcctactatgtagacgagacagccgatgccatgatcggagaagaagcctccatcgcactgtgctattccggcgaggctgcactggccatggcagagaacgacaatctggattattcggttccaaaagagggatccaacctctggatcgattcctggttcattccaaagtcctgcactaaccagaccaacgctttaaaattcttaaatttcctgtgcaaggatgatatcgcagaaaagaatttcgaatatgtgcagtatgcctctccgattacatctgtggtagaaaatcaggacgctgacgtaaaaaataacgaagctgtcaatccttccagtgacacgataaaaagatgtgaaatctataaagcattaagtgatgatgattccgccaagtacacaaagctgtggcaggaacttctctcttattaaaaaaccgagaaaaatgattgcaatttcagtcaaaacatgctaaagtaaatccacggtgtctggttaacaccgtggatttttcatcttcggaaacggtcattccgaaatttcccatatatacatttgttttcaattacatatgaactatcaggaatttttaacaacgatccgtacacagctttctctgcgtatcgagacgggtgtcactttagacattcgttcctttaccaaaaataacggaacacattacgatggtctggtacttctccatccgaagaaaaacgtgtcacctgcgatctatctgatgccatactatcatcgctatctggaagggatatgccttgaagaaatctgtgaagatattcttcatacctatcaggcgcatgccccggaagaaaattttgacacgtcctactttaccgatttttcccgtgccagcgagcacatcgtcatgcgtcttgtaagctttgaaaaaaatcaggaactgttaaaagaggttccgtttttccgctatcaggatctggccgtaatcttttactgtctgctccatgcaagtgccgaaaaccaggcaaatattctgatccacaatcatcacttaaacctttggaaaaccgacaaagaaacgctctaccggcttgcgaagaaaaacactccacagcttcttcccccacagcttaccccgatgagcagtcttctcaaagaaatgcagctcgtcgcggaaactccactcccggaagcagccccgccactgtatgttctgaccaatacgtaccggaccaacggtgcaaccgttctcctctacgatgacatcttaaaagaactgtccgatttgtttgaaaaggatctgatcattctgccaagcagtattcacgaagtactgattcttgccgccgatgaaaacgacaggcagaatctcgaccattacaccgcaatggtaaaagaagtgaatgcctcacagcttcaggatgaagaaattctgtccgaccatgcctactattactgccggcacagccatctgctgaccatgccgcagccggtctgcacttcatagattatatttccagacacaaaatccccgcagaaaaaattctgcggggaacatctattacatttctaccagtttatcatatagattctcatatgcatgtgccgaagcattccaggaaaaattgcgatccatcgcacgatagatcagttctttccatgcggccttttgttcatgctccacacgatacgcataccggacaatatctgccatttcctgtgcattaaaattcgcaaatgaaaaaccacatcctgtattttcatattcattgtatggttctaccgtatcccggagtcctccggtttcacgcacgatcggaagtgttccgtaacgcatggcaatcatctgtgccagcccgcatggctcaaacatggaaggcatcagcagcacatcacttgccgcgtatatatggtgcgaacgctcctcggtaaatccgatatgtacgcttaccttgtccggatacttactctgataatggtggaacatattttcatactggctctctccggaaccaagaaccaccagctgtatatccatttcggttaaaagttcatccaatacgcagccgatcaggtcaaatcctttctggctggtcatacgcgatacgattccgatcaggaaagcatcctccctgactggaagcccaagttctttctgtaatgcagctttgttttcttttttcccactcactgcatcttttttcgaataatttaccggaatataaggatctgtctgtggattatattcttcataatcaattccgtttaaaataccataaaggcggtcctttcgggcagtcatcaggccacttaagccctctccaccttctacggtcgtaatctcatttgcatacgtcgggctgacggtagtaatataatctgcatataccacgccaccctttaagtaatttgcctccccataagattccagttcatatgcattgaaaatgtgtgccggaagtcctgtaatatccataatctcctgaattcgccagcgtccctgaaactgcaggttatgaatcgtaaacacggttttgattcccgcataaaaattatcatctccaaataccgtatgcagaaacaccggaataagtcctgtctgccagtcattgcaatggataatgtccggggcaaaatcaatatacggcagactagcaagtactgccttggaaaaatatgcaaacttttccacatcttcatagatattgttgtatggagattctcctgcgaaataaaattcattgtccacaaaataaaagtgaacaccatgatattctgactcgaaaattccaacatactgcctgcgccagttcagatttacataaaaatggcacaaaaattttaaatttggaagaaatgagcgatccatgcaggcgtatttcggaattactacccgcacatcatactcttttttgtcaaaatatttcggaagtgatccgacaacatcggcaagacccccggttttcacatatggcactgcctctgatgaaacaaacagaatcttcttcatacacaacactcctttacttacccttcatctgtaatcgtattttgtccgtaataagagcgataaattccgagttggtcggttttccttttccattactgatggtatatccgaacagatcatccaacgtatccatcttgccacggctccatgctacttcaattgcatgacggatggcacgctcgacacggcttggtgtcgtatcaaatttctttgcgatccccggatataaaattttcgtaatagaatttaacatgtccatattcgtcacagacatgatgattgcctcccgcaaatactggtatcccttgatatgtgccggaaccccaacctcatgaattatctctgtgacatcctcttccagtgtctgtaacgagtacttttccgatttcttttccatctcaaccggtctgccaatttcttttcgtactttgttttttcgacggttgagtgtcttgatccggtccaaaacaatattccggtcaaacggcttcataatataataatctgctccccgctcaaacgcatcttcggtaattttttcattgctgattccgctgatcatcagaaatgtcggccggttttttagcgtgtgatctgccctgatcctgtcaaggactgccagaccgtccaatttcggcataataatatccaataatacaacatccggttctttttccctgatcagatgacaggcttcttctccatccttcgccatcccgatcaggtgcagttcatcatcactggttaccatttcttccaataagtcacgcataacctcgttatcatctgcaattgcgacatttagttttcccatgtaggcctcctagaatgtcaaattcagtcaaaaataagcataccagaaagcactgtccgattttgtcaaaatttgtcgataaatacagttaaactatagcacaactgccaatttatttcaatgtcttatgcattctcttcgaactgggaattatacagatctgcataaaatcccttttgtgccagaagctgttcgtgtgtcccctgctctatgatatcgccatctttcatcaccagaatcagatccgcatttcttatcgtagagagtcgatgcgcaatgataaagctggtccgtccacgcatcagattatccaatgccttctgaatccgcacttcggtacgggtatctaccgaagaggttgcctcatccagaatcagaatcgggttatccgcaaggatagcacgtgcaattgtaagaagctgtttctgtccctgggaaacattacttgcatcctcgtttaactccatctggtagccacccggaagtgtctggataaaatggtgggcatgtgcggcttttgccgcctcaatcacttcctcatctgtggcatctaaacggccataccggatgttttccatgatagatcccttaaacagccaggtatcctgcaataccataccaaatgcatcccgaagttcctgacggttaaagtcgcggatatcatgcccatccacctgaatggctccgcctgtcacatcatagaaacgcataagcagtttgaccattgtggtttttcctgctcccgttggtccgacaattgcaattttctgtccaggtgttacatgagcggaaaaatccctgataatgatctggcccggattgtatccgaaacttacatgggaaaaatccacgtaaccatccacatggtcgagatgcacagcatgttcaaccgtcagttcttcttcctcttcgtctagaaattcaaatacgcgctcggaggctgcagacatcgactgcagcatatttgccacctgcgcaatctgctggatcggctgagtaaaattccggacatactgaataaatgcctgaatttcaccaaccccgatggttccgcggattgccagaagtcctccggaaattgccactccgacataaccgaggtttccgacaaactgcatgatcggctgcatcagtccggataaaaactgggacttccatgccgattgaaacagaatctgattggtatcttcaaattttttgatggtgctctcctgcttattatatgcctgcaccaccagatgtccgccatagacctcttccacctgtccgttgatatgtcccagatattcctgctgctggcggaaatatttctgcgaatgtttgataataaacgaaatcaggatggcagataccggaagaatcacaagtgaaatcaatgtcataattccggaaattgaaatcatcatcacaagtgttccgaccagtgtcgccacactcgtaatgatctgcgtcacactctgatttaaactctgtccaagtgtatccacatcattggtgatgcgggatagcacctctccgtacgtgcgactctcgaaatatttcattggcatgcggttgattttctctgaaatttccttacgcatgcggtaacaggttttctgcgtgattcctgtcatgatcattccctgtataaaactgaatactgcagaacagatatacaggccaagtgtaaacaataacactttggcaatataggtaaaatcaataaatccggttcccgcgatcttttttccgagaccttccaccaatgcattcgttgcacgtgccataacctttggtccggcaacggaaaagacggtagacaccgccgcaaaaatcataacggcaacgattgcataccagtatcttccgagataacgaaccagtttttcgatagagtttttgaaatcttttggcttttctcccggcatcattcctctgcccgggccgcccatcggaccgtgaggtcttcttgtacgttgttctgccatcttatttcacctcctcagaaagtcccagttctttggcagacagctggctcctggcaatctgctcgtaaacttcgcaattgtgcagtaattcctcatgcgtgccttttccgacaatctttccatcgtcgagtaccagtatctggtccgcatgcagaattgtactgattcgctgtgcgacaatgatcacggtcgtatgttccgtctttgtctcaagtgctctgcggagtgccgcatcggtcttcatatccagagcggaaaaactgtcatcaaacacataaatctttggattttttgcaattgctctggcaatggcaagccgctgcttctgtccgccggaaacattgcttccgccctgtgcaatcgcactctcatacccatcctgtttgctgtcaataaactctgttgcctgcgcaatctccgctgcttcccggatctgctcatctgacgcatcctctgccccgaagcgcagattgcttgcaattgtaccagagaaaagaattcccttctgtggtacaaatccgatatgttcccgcagatcctgcaatgtatacttgcggatatccgttccgtcaaacgtgatctctccgcctgtcacatcataaaaacgcggaagcaggttgaccagcgtagatttaccacatccggtacttccgataattgcagtggtctttcccggctctgcaacaaaatcaatatccgaaagcacatcttccgtggctcccggataccggaaatttacatgatgaaaggcaatcacaccctcacactgttccatggcaaccggctctttcggatctgtaatcgtactttttgtgcgtacaacctcatctatacgctctgcagctacaccggctctcggcatcatgatagacatcatggtcagcatcagaaatgccataacgatcatcattgtgtaagtaataaatgccgtcatggaaccaacctgcatatatccgccatcgatccgctttgcggcaacccacacaatcagaagcgtaatgcagtacatgatcatcatcattcccggcatcataaatgtcataacacggttggtaaacaactgcgtctttgtcagattgcggttggcctcatcaaaccgctcttcttcccgtttttcccttccaaatgcacgaatgacatttaatcctgtcagaatctctctcgaaaccagattcagccggtccacgagattctgcataatcttaaacttcggcatggcaagggaggtaagaagcattacaaatccaagaataacaagcaccgcaagcgcgatcacccattccattcctgcatgggtctgtgcaaccttaatcacaccaccgattccaatgatcggagcataaagaatcattcgcagaaatactgcagtcaccatctgaatctgctgtacatcattggtacttctcgtaatcagggatgccgttgaaaaatgatccatctctgcattggagtactgtacaacattgcggaatgtcttatcacgcagatcccgtccgatggatgctcccacacgggaagcacaatatccgacaaccactgccgccataaccatcagcagcgcaaaaccaagcatcttggctccggtggtccataagtaatgtttctgaatggcatctacatccacacctgcatttttatcacaggagatcgcataggtcacacccatggatttcaatgtagaagatccgatcgcatcaatctgtccagacacctgctttcgcatctcaagaatctgctgatccggtacctggccggctgccagtgcctgcatcagctgcttcatatctacctgcgtcccatccgttcccattttcgccgtgatagccttctcgtcaatatcggactccttcatctgggacatctgatataccatgacgatcggctccaacagagactcatccatatcgtcaagcgtatcctcttcacaatttctcacatagtttccgtcttttttttgctccttataacaggcggcaaatgttttcttttccctgctggtcataaaaagctgtgctgacacaaaatcttcctgtgtcatttcttccggaagaatatgctccactccgctgctcatgattccgacatcgataatatccgatgtatactgtggcagggacagatcacaaaatgcctgcatcacaagaaaagccacaataaccagaatccatttccagtatgggagcatgtttttaaatatttttcccatgatttaactccttttcatatgcatagcttttatactatcacgaactgatttccagaacaattcctattatataaaacttttcttaaattaaaatgaaatgtgtggtgcaaccatgggcaccacacatttcattttctgattttatactgctggaattatataaccggccttcttcatttcttttgtaaaatcatcgacagacattcctgctttttctgcacctgtttccacggggatgatcccatcctgcaccagggatgcatatgcacgaatctgtccttcgcgctgtccttcgattcgaccttccacacgttcctcattcaattcatccgccattaaaacacgtaatgcctcacacataatcctttcacttcctttccatttttgcactttctccatgttactgtttacaataacctggagcacaacatctgcaagattcttctctctttccgaaaatgcactcaccctcaataaatactgacgcatcaacgattcttccagatgattcgtcaatgcttttagctgtacatgcatatccacatccagttccgatgacgctatgatctgcaccggaaacatcactccactgacatagtaaatccctactgtttcttttttacattcatacccggatttttccagttcctgcatcagcttcaccggcttccgatcacgaatcagtgtaatggtaatctcctctgccggaatctcattcacatgatttggcaatactttatacaggcacgcatacgcaaccgccttgtaaaaagtatcaatgttcagctcatccatcggggatttatattcaaaaatattgtgtttccggaagatcttcccgatttcattttttattttgcagtccttctttacttttacaaccgtacagtcaatctgcaaaggtttctccgtaagctggaactcatcggtaaattccaaattttctgcatcctccaatagttccaggcgcaaggctgaacagaatgccggatgccactgcagcttttgggactttttctgattctcctgttgattcttctcctgttgatttttcgtttgttctttttccaaatgttctccttatattatatgtggtttttgcttttatttcaacgcataaaaattgcagactgttaaaccccgaccgtcaaactcagaccgtcaaaacctgaccgtcaaaggcacatcaaagttcacatctttcacttatacaacaaaacaaatggaatttctggcaggaactgccactgaaaaaagatatgtttactataccatatgtttatgaccgctgcaagaaaaaacatcccgagctgaaaaaacaataggaaaaacaaaaagccatgcaatggaaaaatccaatactgcatggctttacaaaattaattttataccgcagggattacataacctgccagcttcatttcctttgtgaaatcatcgacagacattcccgctttttctgcacctgtttccacggtgatgatcccatcctgcaccagggatgcatatgcacgaatctgtccttcgcgctgaccttccatacgctcctcattcaattcatctgccatcaaaacacgtaatgcctcacacattgtctgttcacttcctttccatttttgcactttctccatgttactgtttacaataacctgaagcacaacatccgcaagattcttttccctctctgtaaaaacgctaacttcctgcagatacttccacatcagcggttcatccaaattgtcagtcagtgccttgagctgtacatgcaaatgcatatccagttccgatgatgcaatgatctgcaccgggaacatcacaccactgacataatagattccggctgtttctttcctgcattcatacccatcactacttaatttctgaagaagcttcaccggcttgcggtctcgaatcagtgtaatggtaatctcctctgccggaatttcatccacatgatttggtaatactttatacaggcacgcatacgcaaccgccttgtaaaaagtatcaatgttcagctcatcctttggggatttatattcaaaaatattatactttcgaaagatcttcccgatttcattttttatcctgcagtttttctttactttgacaaccgtacagtcaatctgcaaaggtttttccgtaagctggaactcatcggtaaattccagattttctgcatcctccagcagttccagacgcaaggctgaacagaatgccggatgccactgcagcttttgggacttctcctgttgatttttcgtttgttctttttccaaatgttctccttatattatatgtggtttttgcttttatttcaacgcacaaaaattgcagactgttaaaccctgaccgtcaatctccgaccgtcaaaacctgactgttaaaacctgaccgtcaaaggcacattaaagttcacatctttcacttatacaacaaaacaaatgggatttctggcagaaactgccactgaaaaaagatatgtttaccatagcatatccccaccttcctggcaaggaaaactttacgtatactgcatatatgtaattgcaaaacgtattctacctgtgaccatcataaaaaagacacacaatgcgatactctctcacattgtgtgtcttttcttaaatccccatactaatcaagcaaaaacaaattctgtgattccattttcacagtagtttttcccacccttggtgttccatccggatttttggacttattgttataaatttcaaaaacaatatccccttccttctttttgttttcccctgtcgtgtcataaataaagtaatactcactcatatttttcaggttttcaaacacatattttttaggattctcctttgttgcttttccctcaatcaccgttccgtcttttttataaattttatctacataagttccatccttgtattggatcgaacaggtcagcttcgttctgacggtattcagctcgaccgggctgaagcggattttttccttagtaccgtcaaggttatttccatattctttcatccagttcatcttatacacaagatttggatcacttccatttccggactcctcttttaaaagctccgcctcttcattcaggatctcgaccattggtggctcatatgtggtacggtatgcggcaatcatcgtattaatgaaaagttttgcctccatatctccatctaccgtagaatgacctactccggaataaaaaacatttcccttactgtaaatataataattattggctgcatcattcggggaagccccataggtggcaccggttccatctccgtttgaatccgtacctgcccatgcacacggatctccgttctcattatccgaaagacagtaccagaccgtaacttccggatcttccatgtccagctgataccactgcccatgcgttgatgcaattttaagtgtttcgtcaattttaaacggatattccgtaatctgtcccgtatttgtcttcgttgcacgcgttgtcaggtcattattattgttaaatcctgtcaatttcacgttattgttattcacgccacagatatattcatcttttttataacttctgatcatataccggtatgggatgatctgatccgtatttttcttttcccatcccagacgtttcatggcatagtaagtaaatccctgggtattaccaagtgccgttgtagaaagtgtaccgtcactgccaacggttgtctgggtcattgtatcatacttatgtttcgcctgataagccagcagttcctttcgttcgctctcggtcagtttcccactcacagctttataccggttcattcccatgacatcacgcagatatgtattggcagaatatccgaaatccccactgttcacattatgcatagaagtaaaatcatgcgtaaacaaaacactttttccagaggcgataaaatatttcaggaaatcaatcgcaccgtttttattcgacatatttaccttatggaacgtatcgccaaatcccagaataaacatattgtatgtatgatacagttccttttgttttttcgacattttaactggattttcgtttcctttttgggctgaaatatccctggaataatcatacacaaatttctccccgaaataattcttctgaaaatcagaaaccgtagtcgttaccacggaaattttataatcattcaatgcattataatatttcgtaaacagcgtattttcttccagattcagataccccttattattagtatccgtatccggcataatctgaagcaccttaatctcccgtttctgtccggtctggttttttgcaaccgagcagccggtacgtgtaaaatgaatgtccggattatccttgcggtatacaacaatcttccactggatcagcccgaagtacagtttggaaagttttaccggtgtaatgttctgttccccgtctcctgccgtaaaaacatctccctcataataaacttcccctgtatcatccgaatcatccgcatccccggagccatccacatctgccagcccctcttcaaatttaccatcctgattctggtcaatataaactttacactgatactgtgcggatggcacatccgtcacctgaaaaccaaaatcaagttttgatctgccaaaaccgtccacatccagataatttgcctgactgtcatctacggaaacagacgtatcatttttcccctcagacgaagtcgttccctgatattcatttggcagttttgtaaacgcaattttcggacagacctcttttacctttgcaatcagcccattggtatctgacgtctggtaaatggttttctttttcttcttactctccctgaccagatccgcaaggtttgaaccggcatctattttatcggacaggcgatagaggtcatcaaccgcaacaaccggataaccggcatgtaaaaagttctccagttccgctttcttaatctttgtaatgtcatttcccgggaaacggagtgtcgtatcctctataacattatttccgcttccagcccacaggaacttgaccgaacggcttatgccgtctgacctgctatactctgcactggtcattttatctccggtatggaaatatatttttccattcatggaagtatcattccacaccgtctgattctctttgatccatttcacgttgccatctgcatctttataggttacatccttttctaccagattgtaagcgccctgatccagcccaagataaatcatgttgtacttgctgtttagatcctccgtggaaccaataaactctgccgtagtcatatgggtaatcttaatatccccgataaaattcggaatcataagctggatataactctttttcagagagtatccgttctttcggtcatagcatggctcaatatccaatatccgcagttctccatccacatgatcctttgatgttttatatccgagaatataacggactgcatctgccggtgtcgctttgggatcatttcccgtaaattccttaaaatccgtaaacttagacttcggatccgatgccggaaccgttcccgtgccaaaatcctgtgtggaagttttatcccccttaaacacaaacagtctgccatttaaatatccctgattttcatcggatgtaatttctcctgcggttttatatgtttcccatttgtccggcttcgtccagtaatggtaccagttttcaccaatcacacgtccatccacatcggacggaaggaacgtaaacttcgaccagtatgcccgtgcatcccctgtctgtgcagtaaacacccccgtctcaaccccgtcaattttctccgtctgaatcagcgcatcctctccgccatccagatacaggcgttcaaacagttctgaatccatggaaaacagcatcactgccagtttatacatattattgttatagccggtatcattatatgtataaatggtagggttcatattccagtccagaatatgaaacgtaaccgattttccctcacctaaacatccctgtgaaggtatatacactccggaatccataaagatcggagcatagttctcctcctgattaatcttctggtacattttcacggcaacatcccagctgatatctttcgatccattaaatccattcgtatacgaagaaacagacgaatgctttccgtacctgttgtgtcttttccagatcgttctgatattatcctccccggaatgcatcttaggggaaaccacatacaaatccgcataatctgcccatttcggctgtgcattcagctcttccggtgtaatcgttttaataatcaccgaataattgtctgcttcctcctgtgttttacagccgatgctgtcctttaaaaaataatcattgtttttatatagatagtaattatttgttacattgatattatcctttgatttatcaccggtactttttctttttgtataaatccggtcgccctcattggtaagttcacgatccgtcttttcatcaaatgtctgatctttatcatccgatttttcgaaatcatttactgtatgccagataatatttccatgatcctgtctgacaaacgataagctttcatttccgtcttccccttttacgattttttggacaaacgtaccttccccatctttaacgcgctcatagtatccggtatattctgcatctttcatgccatcctcacagacacgcatatttccagaatattttgaaatgtccccttctggctcatccgggaaaaaataagccgttttcatttcacattttgcaccggttattgttttaaccgtattaatatcagcatccccataacgcatctcttccacatttaccggttcacatccactgatctggtatccaaactctgcgtattcttcataaggcacaatttcaagaatcagaaacgggttttccctggttccaagctttgccgctgcggcattcgcatcgtaaatgttgcgcttcgactccggaatctgctctatctggtcaacgactcctcttgtcatcaccggaagtttctcatccgcctttaatttattccggtacccgacaaccccaagacagacaacaagcacccccagcatacagactgcggatgcaattcttttattcctgtttccgttattttttttctgccgatgccatcttaccatcttcaatacgaacgccccttccttacctgagtacatttctcagcttgaattcattttgtatcgtatacttctgttccagatattgcatatcaaaagaaaccgcaacggatgccttttccgtggaagcatttactgtgccggtaaatgccgtaacatattcgccgatcagattttcctgcacctcatccgtagctgcagaaatcaccgttgtatcggtttttggatctgccacagccattttctttgtatataatttctttccacctgcagagatccagatcacccgcttgcttgcagcctccggggctgcggcacctgccggattggttaccgacggggtgttcggaatcgtataaatggcgatcccacggacaccggacacggatgggtcaagttcctccacccggtttccttccatcacccacatgccgatctgctccatcagaatctgtgactccgactgcagatcaatctgcgcagacgcgtggttataatttttgtgcgccattccaaggaaaagcgttgcagcgcccaaaataaccgttgaaattgcaatcgcgataatcagttccacaagcgtaattcccctatgatcgttcggcacactgccaccccctttaaaaagttactgctccgtaaaatgcctgccggtatctttcaccagccggattgtgtatgccgggacaccatcaatataaatggcattcacatttgtacaatcgtcataaaatgccgttttcttataagcaatcttaataaatgtcccaccggcacccggttctgtcagttcctccccggtgctgctgtccttacggattttaattgtattattacacagcttcgtcccgtcagatgtcagctttgtatcgtcaaaactgcccagattatcggacaggacacgcgtataatatccattgtccagcttgtaaatatacagataagaactgccggctttgctcatcgtcctaacctgaagcgcatccagcgaagaatccagcgtccttaccaccttctgcgtattggcatagtgcagatgcccgatcatcatgacagacgtgcttgcaagaatgccaataatcgcaataacgataatgatttcaacgagcgtaattccattctgccccaaaagttttcgtttcttcattggcacaccccttacccgttcttcttccaattatcatagttcaaataagaatccagatcaaggtttccagaaatatttgatgccgcaagggaagaacagcctttgaaaaactgggaaaacagcggagtatcccgtttctggtcctcggtaaacagctgggaaaccaaaagcttgtttccccgtaccgaagcgttggaatcaaaagagatcaccccaccggaaataatcattccctcaaactggccggacaccctgacatccccggttgcaatgacaattccctttgtaaccgtagctggaagtgcataagttccggcattttcaatcaggtatacatctgcggccggggaatacaccgtttccgaagccgtcggggatgccttgtgtttctccacctctgtggtaaatgcactccggtcaatcagatagtcaaacagcggatttaccgttttgtcaatcacttcatgcccactggcatccgtagatgtcagacggacattgtcttcggtcactccctgcccctgatccgtcagtcccagttccagcgacttatagcgcacggcaagctttgaacagtacttccagtataacccactgctgtctttccagttgtccggcgcaatcgtatacgttccaacctccagcatatctgcagaagccgcccgttttaaaatgtccccggaaaacgtcataatcgtattggaatccacaatcaatgcatcctcatccagatagatattggcatactgtgccgttttcccctgattgttcacataatactcggaaaaaaagtcattcgcagacttctccgaattaaaattcaggtaataatagaccccacccggaaaataatagggaaccacctgccggctgctgtttaaatatcctttcagcgtactttcactgattccggtatatgccgcatacttcttttgatccagacttctgccatctcccgacacatattcctgtggaacataatatgccagctggttcgtccgcgcggagatggactcgcccatcagaatatcctcgttactggcatcgagctttcgcgaaataaacgtccgccctgccaaaagcaggtaattcaaccctttgatatccagatggctgctttttccattgaccatcatggcactgctaaactccgcctttttcgcggaatccggatcctgtgcgccataatttttctggaaattatagccgtaataattgccctgcaaagtcacggaactccccctgccagccagttccagatcatccgccacatacatatttccgttcatatggatagaggaagcaccgtttgtcccggcagacgatgtccttatattttccgcccagatcgaggaaccaccgtccccgaccgtcaggtctgatccgctctccgtcacgatatccccgcgtgtaagaaccgtcttccccttgatcgtaccgtttccgcccgtggacgcataaattccgtctgccccggcatacacattgccatccactgtcacattctgtgccccgatgttgatctgtctgtcggctatcagcgcataacgcataaactcctgcacctgccccctgccggagaaattcatcttcggagtggaaaacaccaggtcggttttgatcgttgtctcataatcctgtgcatccttataccggatctgcacaccctttaacgtaaacgtccctgcgccgtaatccacctcatattttggatctacggcagggatatagcatccctggtctgcggcttctttgatgcagctttttaccgtatccgtatcatagccggaaacccggtatgccacattgccggaagcgtccatggtatccgacgcaccaactgccggatctgtgtggttttctgcaaactgcttctgcagcccgtccatatatctggtggcaaatactttctgcacgtcccctccggaagcagaatacgtcaggtaattttcaaggacatccgcatacgctttctccagtgactgctctgcaagttcccttgcaccggcacgcagattatccatcagttcatccgcactgtagaaatttttcttcgtgccgcgttccacttccttcatctcaatattgacaatcgtaatcttcgtgatcaccacggcaatcaggcttaccacaaccatcagaaccagtacggcaagcagggaggcaccacggttatcctgtttgaaccggtttcttttcatcgctactctcctttcgacgtgctgaccgtaatataacggtacttttccttatccgggtggtttccgcccttgcctttcttatatacactgaccgtcagatcgacctttcgcactcccccgctgcttgccaccagaggggcaaccgatcctgccggcagcttaaagctgtcctgataaacggctcccttgttggtcaccgcagacgggtcatccggatacgacttgttgccaaggtttgatgccacagacggcatcgggcatccctgcggcaataccgtcatcttataatccggtctgatgctgttgacatccgcaatattctggcatacaaacaccagcttagggttcacacctgcagcgtatgtaacctccatcgtatcgctgtcctgcgccacatggtacataagataaatatgctccacatcacggatgtcttcctctgcaaactcattacattcgtatacttccgaaggatctatgcccaatacctcatcgcctgtttccccacatgtatagctgcatgccacccggacatgcgtactgtctgccgtaaccgaaaatttccgcttcatcttcgcctgcagttcgctgtccccaagcggaagcgttcccggatgtgcagcggcatatgtcatatttttttccgaaaaatacgtcattgcttcctgcagctggttatgttccagtgccacgacatcctttgtgtcatcaatcccttcgatctgtgggatattggtgtcattttcagctgcagccgtactgacagaaacctcgacatcatacgtgctgccagaagtgcctgccgccgcgtagtacacattctccgcctgaaatgccggtgccggggcagccgccggagtctcacggagcagggtgtagccatttccttccagatagggaacacgaaatcctgcccctgtcgtcaccacagccagctctttttggttttttaaatcctcgagcacttcctgcgccagattggttgcatgctgtttgtccgccatcatcgcattgtacttcatggactgcgtaaaataagacagcagcggaatggaaataatggcaagaattgccatggcaaggatgacttccagcagggaaaatccaccattgttattcggttgtctcttcatctgcgggcctccttcccatccgttttacggtgcagtttcaagcgatgtgcttctgccaaaaatactcatcacaccttttgacatattcggaaataccggtggaacatactcttttccggtgttctccagataatacatattcagtgtcatctccccgtttaattttccggtggaatcatcataatttgccgtaaactgtgaaatcgttgtacgatccttaaaattgttgacataagcgatcatttcctttaatccggcatagcctgcctcatagcggataccgatcgaggcataatatccccgaacctctttttgctctggtcctgtcgtttcctgttctgctgcatctgccccctgtgtgctctcctcactctggctttcggatgtagaagatgcctctgcatccggtgcggtagtggaagaagcatccgttcctgcagccgtgtccgtgccattggtctgcacatccacagcaagcggctggttcatggtaaacgtaatgtccgtaatatggaaatcgctgctgttatcctcatacgcctgtaacgactcaatagccttctcggttgtcattgcagaaggatacgtactgataatcgtcttctgcttttttaccatcagctggatattttcttttaccttcggaagtcctgcctccatctgttccatctgctgcacttttgcctgatcggccgtattctgttcttcaatcttcgctgccttgctcattcccttactgaaaataaagaaatacgaacatgccactatgacaatcgcacagaaaatgagcagcagccgcttgtcggaatctgaaattttaattctattcattggtctgctcctctccttccacgctgtctgtatcggtatctgtatcggcctctgcatccgcagacggaaccgcttcttttatgagatgcccgtcctcgccgagaaatgcgccggtataataagcatttaacgtatacgtccacgtcaccgtgccgctgtcttcatcagactcctccgacatggacggaatcgaaagattttcaagcagcgtcacatccgcaaaattcaaaagcatctgtccgaccgtaactttccggtctgcctccatattcagcgttaccagcgaaccgtccgtctggatgttttttacatggatggttgtcggaagttcattttccagctgcgcaatcagcggatacaactgctcatttttcgtgatggtggcaagatccagtttctcatacacctgttcctccgcctgtacccgcgcgtaatcgtcatacgtctcctgcacataagaaagatcattgatccgtttggtcaggttgcggtgctcacgataagccagcagctgacgcacaccggaaccgagaatcagcaggacacttaccaatactgcccccgccagaatcacatatgccgtgtgcaggtcgttctttttggaatctgccacaagcatgtcctttggtctggcatcaatcggatgaaccgccgcaccgatgaccgaaaggaaaccgacagccgttgccgccttcggtctcgtcccggaagatgccgcatccggtgttaccgtcccctcagccgccttgttttttccgctccgtaaatcgatgaccttcgtgaaatcaatttcctgcagcggaagcggaagctcctgtgcaaacagtttgtgcatacctgcaaaacgggaaccatcgccaaccagatagacattcccgacaaattcctgtttgacctggttctgataatactcaaccgccgtgtttgcaatgcgcagatgataccgcagggactccgccagatcctcatatgcctcttctgccagagcctgctgacgcttcatctcctcctggtttcccatctccggaatcgtcggacggttgtatatcacattgtggtctaaaaggaaatcaagtgctttctcctcatcgtcaatgccaagcaccggatggtcgatcaccgctgtgatcgttgctccatagccatacggtgtcacacgctgaaagaccagttttttattttccagaatactgatcaccgttgcctgttcttccagctgcacgaccacggcattttccagaaaactgtcgcacaaaagctgtaccgttccgtttccgatatagtcaaacgtctccaccttaagccctgccagctcggcaaaggtcacatagttgtttaaaaggttatccggaattgcaacgagaagcagcttaagcatcttctttccgtcttcttcctccacgtccatcttgctgtagctgatggtgtaattgctcacatccatcgggaagtaatcacggatctgtgcctcgatgattcccatgatcttattgtccttgacaaatgggattatgacctcgcgggtaacaaccttagaggacgaaagggtaaataccacttccttctcatggatatcgtgtctgcttagttcggcctttaatgccgatgcaaacgcttctttatcgcggatatagccatcttccaccgcatgttccggggtgcggaacgcaaacgctttatgtaccggcggatttttcttgcggtaatcgaccagtgcgacttttgtccaccatacaccggcctcaatacttactactcttttgaccattttcattttctcctttatattttctagcagttgtgctggaaaatgtatgaaagacaattatccccctcgagaaaaatcgcgtgtgctaattggctttcatacattttccatcgttatgttgtgatgtaaaatttagatggcgaataagaagtatgttcaaaattcgccacggaaaacaaataactttatgttttcttgaaacattactccttggcagtttataccagatttcatttaatagatgcccatcatgccaagataccaggcccagaaacggctgccccagagtgcggcgatgaatatgcctgccgaaaggtacgggccgagtgcaagcaggttgtttcgcttgtttactttcatacggatggtatggatgacggagccaagaatgcatgcaagaataaatgcaaaaataatgttttttgcgcctaaaagcaggcctgcatatgccatgagtttgatgtctcccccaccgattgctttgccggaggagaaataatacaggccatacaaaaacaggctgacaatgactgccccgatgatatgggacaggatatgccggaaatcatacacggtcatgatgataccgagcagtcccagaaacaggttctgggaaaccggtatctgataggttctctcatcgatgaccgcaatgacaatcagggcagatgtcatgagacaatacagcacactgctgaacgtgaaaccgcccgccatgaaaacgaccacatacagcacaccatttaaagcctcgattaatgggtactgtatggaaatcctagcaccacattgccggcatctgccccgaagaattatgtaggaaaatacgggaaccatgtcccgccagcccagcttacgtccgcagttcatacagtgcgaggactgcacgatattctcttttttcgggatacgaaagatcagcacatttaagaaactgccgatgacgattccgtataaaaatgcaacgatgtaaagaaaaatcgtaagttgggttagcatatgtatatactcctaatcatcaaataattaacactatattgtagcctcgacatctttaatcggatattttggtgtttttccagtattgtactcaacatgtgtaatagccttatgctttgtaatatcaaactgaactgtaatttgtttaatatcagcttttccatctgcaccgaacgttgctgtaaaattagctaatgtattatagccaatagtgctctgaacatctttttgtacctgagcctcagtcgtatcagttggagctgtaccaaatacatcaagtgtccaagctgttgtcattgcgttttctgaataagcagcaacagcggctgttgaaatactatttaaaagttgttgatcctttgcgaccttagacttattaatatacggaattacctgtgtaccaacaatacctaccaaaattgccataatcgcgataacgataatcaactctacgagagagaaacctttgttatccttcttttcattctttgccttcatgttctgaagcagttccataatcttcttcataccctttgttctccttttactaaatatgttttttatgtatctatcatcacatgtctcatggcagacatgtaacaacccttcttctgcctgcggtcaggctccgatgctgtcgtacagactgtacatcggcatcatgatcgcaaggacgatcggcaccacaacaactgccatcacaataatgatgagcggttccattgcggcaagcagtgcctcggtcgccgactccacctcttcatcataatatgctgcgactttgtcgagcatgtcttccatattaccggtttcctccccgatctctatcatatggtagaccatcggtggaaagaccccggaatctgccagcggcttcgagagcgggattccacggctgacctcttcggtcgcatcttttaatgcctgcttaaccacggcattccccatcatctcggtcacaagcccgagtgcatccaccagctggacaccggagcccatcagtgtggacagtgttcgcgtcatgcgcgaggatgccgtcttgatgctgagcgggccgaccagcggtacctttagaataaattttcccaatatatgtgccccactctctgtctttttccacgcatggataaatatggcaatccctgcgatgatggcaacaataaaataccagctgtgcacaaagaaatcactgactgccatgactgcaagcgtgatgcccggcagttttccgccgacttcgtcaaactgggaagtaaaggtaggcacaatcttaatcatcatgatggctacaacaacgataataacaagaatcaggatgaccggataaatcgccgacttgatgatcagccccttcaggtgagcctctttttcaaactggcttcccacacggctgaacgctttatccagtccaccggaggattcccctgcggcaaccatctgcaccatgaggtttggaaaaatcttcgggtgctccgccatcgcaacggcgagggtctccccacgctgtacggaatcccgcacttctgcgattgcattggcaaacggtttgttctcggtctgctcggatagcatgtcgagtgcctcaacgacggtcacgccggcatttaatacgctctcaaactggcggcagaatacgctcatttcgcggacgctgacggcttttccgatatggatttcgagatctttgttaaatgcgttggctcttgcgatggaaacgatggtgttgccgccggatttgagttctgccgaagcgacctccatgttcatggcctcgatggtgccggtttttggttttccatcggccccgaccacttcgtatttataacttgccatgtcttaactcctttttaaaacagcttctgctgcatgtttcctgtatcctgtgcatactccacggcatttgccgcatcaattttgtgcttcagataaagactgaataaggaatcatccatcgtctgcataccaatcttcttgcttgtctgcatgatggatggaatctggtgtgccttatcctcccggatcaggtttttgatcgccggggtaccgagcatgacttcaaatgccgccacacgggattttccgtcgatcgtcggcagaagttgctgcgaaataacagcttccaaaaccgatgccagctgggaacggatctgattctgctgatgcggtggaaacacatcaacaatacgctcgatcgttggtgccgcaccaatggtatgcaatgtggaaaataccagatgtccggtctctgccgccgtaatcgcggtggaaatcgtatcaaaatctctcatctctcccacaaggataatatccgggtcctcacggagcgccgcacggagcgcatttccataggaatcggtatccaacccgatctccctttggtttacgatggaccggttatgcttatgtaaatactcgatcggatcttcgagtgtaatgatatgttcgttccgttctttattgatgacatcgatcaaagatgccagtgtggtggatttaccgcttccggtcggtcccgtgacaaggacaagcccacgctttttctttgtcagcccaaggacagcttccggcaccccgaggtcctccggtgtcgggatatcgcttgccacgatacgcagtacagccgcataggaacctctctggtggaaagcgttgacacggaaccgtcccacacgcgtatccgtgtaggcaaagtccacttcccctgtggcctccatggttgccttctgtttcggtccaaacatggattccaccagttctttggtcatcgccggtgtcagtttctcaaatccgtccatttcataaagtgttccgctgatcctgcacttcggccgtacccccacggtaatatgtaagtcggacgcatgatgcgcttttgctatcgaaagaagcgtatacattgacaattccatctgttttgctgccttcccttccctgttttatttaatcctcttcgtcatcgtatgccacacgctgcacttcctcgacggtggtgattccgcgcagtgcgtaatcaatggcactcatgcgaagcgttttcatgccatgtgtgagtgcgatctcctcaagcacatccgcattctccccgcggttgatcgcctgccgcaggtctgccgtgaccggcatgatctcataaataccgattcttccatagtatccggttccgccgcagcggacacattctttgtgccccggtgtgcggacattgatccgtctggtaggatcctttatgccgagtatctttttctcccctgcggttgcctcccggacaattccgcatgccggacagacccggcgcaccagacgctgggcgattactccgaccacggaatccgcaatcagatagttttccactcccatatctgccagacgggtgatggtatttgccgaactgtttgtatgtaaggtgctgaccaccagatgtccggtgatggatgcctttaccgcaatctctgcggtctcctggtcacggatctccccgatcatgatgatgtccggatcctgacgcaggatggaacgcagtgccgaggaaaaggttagtcccgccttttcgtttacctgtacctgattaaccccgtttaagttcgcctcaaccggatcttctaccgtgatgatattgacgccttctacgtttaattcatttaatgcggtatataatgtcgtggacttaccgcttccggtcggtcccgtgacgagaataagcccgttcggatggcttaggatatggtcaaatttttttaattcgtcctccgggaatcccagatcccgcttgtccaatgtcagtgcttttttctgtgcgagacgcataacgaccttttccccatagacggtcggaagcacggacacacggatgtcgtattcctgccggtccacaatgctggtcgcacggccgtcctgtgggcggcgcttttcggaaatgtcaagtccgctgacaattttgattcttgcaatcagtgctgcatgcaggctgatgtcgtgccgcatggcttcatgcagcacgccatccacacggaaccggatccgcacctggttttccatcggctcgatatggatatcgctggctctcttatggactgcctgctcgatgatctgtcctaacagtttgacaatcggtgcctgctggacattgttctcatcgtttccactcccgggatctagggctgccctggcttttgcctgttcctgcttttccctcgtatactgttctgccacacgcagggcttctgcatttccatagtaacggtcgatggctgccgcaatatcactcggggttgcagcaaaacgctccacctgacacccggtaatgatggaaacatcgtccatcgcccggatatccagcggatcgctcattgccacgcacaaaagattgggatttttctcattgaacttaaacggaatcagattatacttccgcagcactgcctcgtccaaaagccggatgatttcctctgggatgcgcagggtcgacagatcgacactctgtattttcagctgtgccttcagtgcctctacgatctgtttttcgtctgtaaaccccagatcgatcagtaccactccgagacgctctccctgtttttctgttttctggacctgtaacgcttttaccagctgatcctgcgaaatgactcctgcatccacaagcagatcgcccagtcgcttcttccgggcaaaccctaccaacttatccatgtaatactcccactacgttaaacatttattattttcgaatattttcgagcaattaatgattattataaccttttttgttctctattgcaatcctttttcatgtataaaatataacttttttgcattttaccgtttctttttttgtgcagatttcacatctaggtcttttgtcctattttatttcccgtcatttcctccacaaaaatgccatatcctttcgttggatcgttaacaagcacatgggtcacggcaccgatcagttttccatcctgcaggatcgggcttccggagagtccctgcacgattccgccggtcagcttcagcaggttctcatcctccacatgaaaacggatgcccttatttttatctcccggtgtataatcaagatcatcaattacgatgcgatacgactgcagttccccggacgcatccgacagaattaccgcatcctttgtctgaatctcctgtttgtaaccgaccggacacaacagactttcgtttttcttttcttcccggaagtttttcgtcaacgtgccatagataccgatttgtgtattgctggacacttctccgatctggttgtctttcccataatagacaactccctccagctctcccggtgttccccggacaccttttttgataccgagcacctgtgctttgtacagccggccgtctgacagacggagcaggtctttggtctgtccgtttccgattccgtgtcccagtgccccgaagtttccgtcctgatcaaaataggtcagcgtgccgatccctgccatgtcatctttcacccagagtcccagacgatagcctttgtgttctgctgcctcaaccggctccaccgatacctgaatctgctcggctccgcgccacagggtcagcaccaccggttgttccccgtactgattgatccgctccatcagttcttcttttttcgtgaccgcttttccatttacagcagtaatataatcccccggaaatacaatgtgttctgccggctgccggctgcttccgtccacagtttccaccgggccggatcccagcaccagtactccctgggcagccccgtaaatgcccaccacctgtccgctcacgtataaagattttccgttcaccacggaaacctgcacctctttcataggaaggatgccaaacagatagcaggtcagtgtatattccccctgcttcagctggctgcacgtttccactgcccgttcctgcttcattgcctgaaacgtccgctccccgatctgtgccataacggattgcggttttgtggacattgccagtgtgaccggtatttttttatccagttccagcttctgtccctcctgcacgtatacatgatcgggaatggcatatatcatggtggcataggcaaagcagcacagcgccagaacataaatacagataatatttttgaatatacgcatataaaaagaccgcatgccaaaggttctcctatcttctcggatacctttagtatgcggactttggttttatctattcgtatttttctgccagacgtttcatctcgcgtgcgttttgtaaaaccgtatccgtgatctccacgccgccaagcatccgcgccagttcctcgatactttcctcttcccgcagcggatgaatctgggaaaccgtggacgcatgctccaccgatttttcaatcaggaaatgggcatctgccatggcagcaatctggggcagatgagtgatgcagatgatctggtgcgtctttgccagcagtttcatcttctgcgataccatctgtgccgtacgcccgctgattccactgtcaatctcatcaaagatcaacgtcggaatctcatccgtatccgccatgacggtcttgaccgcgagcgcaatacgggaaagttctccgccggaagcgacctttcccagaggctttaacggttctcccggattggtggagatcataaattctgcctcatcccagcctccggcactgtactccgtcttccggaattccatcgtaaactgcacatctaaaaaattcagatcttcaagtgcctgtgcaatcgctttcgtcaatccctttgccgctttcttccggattccggaaacctctgcacacagcccgtccaattcttctttcttccggttcatggaagttaaaagatcatttaagtatttatcatagtcctgtaatacggcaatacgctttgttttttcttccgctgactgcagaatctcttccatcgtatttccatacttggatttcaggtgattgatctcatcaagcctcttttcggtctgataaaagacttcgtcatcaaattcctcccccgacaggtaggaagaaatctcatgattgaaatcgctcagcagattatcaatatcggtaagcatctgttccatctgcgcaatgcgctcctcatatgccgaaaccgaactgacttcccgcagggcacggctgataagttccgatgcattctctccggtaccgccgtctcccccggtagctgcaccggcagccgatatggcatccatgatcttttttgcgtttgcaaatctgcgatactgttcttccagccgggtatcctccccgacggaaagctgtgcctcttcgatttcctttacttcatacgcaagaaacgacaactctctggcgcgctcctcggtatccaaagacgaggactcccactcttttttcagtttccggtattcctgataacaggcgacaagacgctcttttttttctcccagcgcgtcttttgcataggcatcgaggatttccagatgtttcttttgggaaagaagggactggtgctcatgctgtccgtgaatatcgatgagcagagacgccacctcttttaaccgggaagcagacactgcttctccattgatccgcgcaattgcccttccggaagttatcttacgacttaatattacggtttcatcctctgtttctattcccagtgcacggatcgcatccagaacctttgggttttcaaccgaaaagaccagctccacaagtgcggtctcttcgttatcccggagcagctccttgggaaccttctctccgagtgccagtgcaaccgaaccgatgatgatggatttaccggcaccagtctctcctgttaaaatattaagtccttctttaaattccacctctgtctctgtgataagagcgaggttcttcacatgtagattttgtaacatacattctccttctacttttccgaagcatttttattactgttctacaattttccgaagctttttcatgatgtgcaccgcgtcatcggacgtacggatcacacaaagaatcgtgtcgtctcccgcaagtgagccgacaatctcctgtatccgcatggcatctactgcagccgcaacggctcccgccataccggagaccgttttgatcacaacaatattttccgctgcatccacggacaaaaatccttccctaagaaccctcgcatatttttccatcatattggaatccgcgtccataatcaccgcatatttttgtctgccgttgtcggtcgcaatctttgtcagcttcagttcacggatatcacgggatacggttgcctgggtcacctgaaacccttctttttcgagatatgcggacaattcttcctgtgtttccacatcgtttttctgaatcaattcgagtatctttgcctgtcgtgttgttttcatatgtcctcctttgcgtcctacggtctcatctttttcctcagtatttccaggaaactctggttactgattttgcagatccagatggtactttgtgcctgtgcaatccgcacacggtctcccacgtgcagatgctccggtgtgtccccgtcaaagctgacacatgccgtctcgtccttttgaaaccgtctgcttcccatcttaatctccacaacatcctccgctccaaacacaatgcttttggagtttaagtcatgtgcattgatcggtgtcagaagaagtacccttgctttcgggtccacgatcggacctccagtggaaagattataccccgtggaaccggtcggtgtcgcaacaatcacgccatctgcgtggtaagttgtcagatattccccattgacatacacatttaaaagcagcatggacagatccccggaccagtggatcacgacatcattcaatgccatatgtgcgccgtttccgccaattttttcgccggtcagaacaatccgctcttccatgatgcaatcatcctgcatcagacagtcgatggcatgaaatacggtagcttcctcaagctcacacagataccccagtgtcccaaggttgacaccgatcagcggaatctgcagcgcctccaccttggttgctgcgcggattaacgtgccgtctccgccgagaacaaggatacattccgtgtctgccggaatctcggaaagtgcaaaatctttctggttatcatcctccacattgctgacacagattgcagcactgccgcccttttgttgtatgtacgagacaatttcgtttgagagtgtcagatcacgatctttgtaccggttcgtgatcagcataaatttacgcatctacttatccaattctccgtgtgctgcttccacaactgcgtgaatatccacggattcctcctttattgcttcgtccgatttttcaatatgcacgagatactcgatgtttccctccggtcccttgatcggtgagtattccagatggtgtaccgaaaatccgttttccagtgcaaaggtaatgatcctctcgatcacttcctcgtgaacggccttatcacgtaccacgcctttctttcccactttttcccgtccggcttcaaactgtggtttgatcagacacaccatctgtccgccgtcctttaacagtgcatatgccgccgggagcactttggtcagggaaataaatgagacatccaccgaggcaaaatcgagcacatcatcgatatcttccggtgtgacatagcggatgtttgttttttccatacagacaacccttgggtcctggcgcagtttccatgcaaactggccatatcccacatcaacggaatacactttctttgccccgttttgcagcatgcagtcggtaaacccgcccgtcgaagcaccgatgtccatgcacaccatgccatctaaggaaatggaaaaatgtgtcatcgctttttccagtttcagaccgccgcggctgacatatttcaatgtatttccgtggatctcaatcggagcatcctctgcaaaagtgcttcccgccttatcctcccggttattgttgacaaatacattgccttccataatcatggtctttgccttttcccgcgatggtgccagaccacgttttacaagaagtacatccaatcgttctttcataattcctccggtaattctgctaatattttttccgtcacggaatctgcatccagtcccagtgctttttttaattcgccaacacttccatgttccacaaagcagtcaggaattgcaatcctgaggacctttgtatgcagtgcttcctcctccagaaatgcagccacatgctctccaaatcccccgcttgccacgttctcttccatcgtcacaagaagcggatgggattctgccagtttccgcaggcagtttttatccagtggcatggcaaatcttgcatttaccaccgctgtcgggattcctttttctgccagtttttttcttacctgccaggcggtttccaccatcgaaccgattgcaaaaagtgcaacctctgtaccctcggcgagtacttccgcacagcctttttgaatcggtgcccgctgatctttccagagatcgcaggcttctccgcgcggataacggatcgccaccggttcctctgcagcaatcgcatacttgagcatatcggaaagctcccatttgtttttcggagccataaccgtcaggttcggaatacttgacagatacgacaggtcaaaaattccctgatgcgtggcgccatcctttccgactaatcctgcacggtctacggcaaacacaaccgggagattctgtgcacacacatcatgtaatacctggtcataggcacgctgtaaaaaagaagaatacaccgcaaataccggtttgagtcccgcctttgccataccggccgcaaacgtcaccgcatgctcctctgcaattcccacatcaaaaaaacgttccgggaaaagatttttaaatctctttaaaccggttccgtctgccatcgctgcggtaatcgcaaccaccttcggctcccgctcccccattttgcgcatgacggtggaaaacacatccgtgtaatgcgctttttcctgatgatacagcggaacaccggtgtcaatgtcaaacggtcccgttccatggaagcgcgccggatgacgctcggcaggaagatatccctctcccttgatcgtgcgtacatgaaccagcaccggaccgcgcacacgctttgcttccgcaagcacttttcggatttcttttatgttggtgccatccaccgggcctaaataggtgatacccatattttcaaaaaacattcccgggacaaacagctgtttgatgccgcttttggcatttcggatccgtttgaccatccgctctcccaccaccggaatccggtttagggagttggtcacgccgtcttttaaatccagataggcatccgaggtgcggaaagaattcagatactggttcattcctcccacattttcggagatcgacatctggttatcatttaacacaataataaaattggttttcatgcgggaggcattgttcattgcttcgtatgccataccgccggtcagtgccccgtctccgatcacagagaccacataataattgtcaccggtcagttcccttgcctgtgccatgccaagtcctgcggaaatggaagtggagctgtgcccggtattgaatgcatccgccggatcttcctgtgtctttggaaagccgctcatcccgccatactgccgtaaagtggcaaacccggacttgcgcccggttaaaatcttgtgcgtgtaggactgatgtccgacatcccagatgatccggtctctcgtcaggtcaaaggacagatgaagcgccatcgtcaattcaatcacacccagattcgatgccagatgtcctccggtttttgcaatattttccaccagaaaatcacggatttcttcctgtagctcctccagttcttcctcgtttagttgtttgatatcatttactttttttatccgatctaaaaccatgttgccctcgaaaaattaatgatccctgttgatcaaatagaaaaacaggtcatgcagaaacgtatgttctccttcaaattcatccagtatctttattgcttccccggaaagccgctctacatccttttttgcctgctccagcccctcaaatgtcacataggttgctttctcattttccgcatcactgccgattggcttaccgagtttttcaaaagatcccgtgacatcgagaatatcatcctgaatctgaaaggcaagtcccagctttgctccggcttcctgcatacgcgcaaccgacacttcatccgcgcctgccaaaatggctccgatcataagcgatgcttcaatcagcgctccggtttttaaccggtagataaagtccagccggttacggtcgatggtctgtccggttttctcactctccacatccaccacctggccgccgatcattccgtatatacccgctttttgtgccagcacggaaaaagccctgacaattctccagtctccttcgtttctggtcagcgctgctgccacggtctcaaacgcataatttaaaagggcatcccccgcaaggattgccattgcttccccgtataccgcgtgggttgtctttttcccacgccggtattcgtcgttatccatcgccggaagatcatcatggatcagtgaataggtgtggatcatctcaatcgccgccataaaatcatcaattgccggattcgttccgtcaaacatctggtaagatgcttccatcagcatcggccgcaaacgctttccgcctacaaaaacactgtattccatggcatcgagcacggtctgctgaaaccccttttcctgtggcagaaacggtgcgatccgtgcttcaatgtctgccgccctgcgttttatttcctgtctgatctccatcagaattcctccaattttccatcctggttcagtacaagcattgccttttctatcgtatccaaagactggccggctgctttgatctgttccagtccctctttgtatagggcaaacgaacggtctaacgttacgttttcgtcttccatcgcatcaagtatggaatcgatctttgcaaaccgttcctccagtcccggttcttttttttctaattcatcactcattttttactccttcggctgcctgaatttctgtcactgctgccgtcagtgtgccatccagcaaatggatctgcacggtatctttttccctgatctggtggatgctccgcagtgcctgatggttcccatcctccacgaatgcataccctccactgagtttctttaccggggaatagctctccagcgtgcctgccagaagtgccaggcggtgtctgcgctcacgcagcagttcctccatgcgtccggtcagtttctcttcatactctgccactcttcgccggttttcattcatccgctgctgagggctgagatagtgcaggcgcatcctctggtgctccaggtggtttcttgccacggttactttcctttggagttctttgtccatctgctgccgcatgccaagcagttcctgcattgcctgccggtaatcaaacaccgccagctccgctgctgcagacggagtcggtgcccgcaggtctgcgacataatctgcaatcgtaaagtccgtctgatgaccgacagcggagatcaccggaatccggcagtcaaaaatggcccgtgccaccatttcttcgttaaatgcccacagatcctctatggatccaccgccccgtccgacaatgattacatccacgccgatctgttcaagtgcatgaattccatggacaattgatgctgccgcaccctctccctgcaccagggctgggcagagaatcagctgcacatacgggttcctgcgccctgcaatattgcggatatcctgaatcgctgccccggtctctgccgtaacaatccccacggtttttgcataggtgggaatgggctgtttgtattcctccgcaaacattcccatttcttcaagctcccgctttaacgcttcaaatttcagatacagatttccctctccgtcccgttcaatcgtccgtgcatagatctggtatctgccatctctttcatacacttccacggatccggtcacaaccacgcggtcgccctctttcatcgggaattttaatccttccctgcggcttcctgcaaacatgatcgcgtttatcgttccgtctgcatctttcattgtaaaataaatatgcccgctggagtgatacttacagttagatacctctcccttgatgctgatatggtgcagcataaagtcctgagcgaacatatttttaatgtatttatttacctgccctaccgaatatacatgtttcatcattctgcaaactttgcaagaattccattgacaaatgccggtgaatcattggttccgtattgttttgccagttccacagcctcattgaccgcaaccttaaacggaatctcatcatcgtaacggatctcatataccgccagacggatcagtgccagatctactttgcccatacgggttgtcttccagccttttgcgacttcgttgattgccccgtcgatttccggcagatgattgtaaatgtcgcgataacgctcagcgatatacttaaagtcctgatcggttacatgatccacttcttcgccaaacaattccagctgttctggcagttctcccgcatcaaaaaattctacgcggaaaagcatcttgaatacattttctcttaactctcttcttgtcatcttctctcctcgctcaaaaataaaggatgtctttcgttcagacatcctttattataccatattctgtttcgaatacaaagatttaattgtcagttcccatatcaacacttgcaatacggacattgacaacagcgactgtcaggcctgtcatattctcaatggcagcctttactttatcctgtaccttggcagagacttccggaatgctgtaaccatatgcaatgttgatggcaacatcaacctttacttcattgtccataatttcaatcatgattcccttagaaaggttcttcatgccgagcttgctgacaatttcgtttgtgatgtttcccgccatggaactgacaccatctacttctgttgctgcaagtcctgcaatgatcgcaacgacttcatctgcgatacggacatccccgacaggatctgattttatctgaactgtttttctgctatcagccataatacaattgcctcctcagtattttatctttgcttattataacagactctgtattatttggaaagcataaaattatacaacctgccccttggatacatatacctgatacgactcatttccggtcagtgacttgccctctgtgacacgtacattcttgtcggtaatcacgtattccacgcttgcattatcttccactacggtatcctgcatcagcacacagtttttcacttttgcgccttttccgacgtgaacgcctcgaaacaggacgctgttttcgacttctccctcgatcacacagccatcggcaaccataacattctttgctttggaaccgttgatataacgggtcgggttatcgtcacggatcttggtgtaaatctgatttggagaaaacagtgcatttaagttttcttcctgtaacagacgcatattttcttcaaaataactctgggtatcatggatattgaccacatagccatcgtagcagaacccgcggatatccagccggtcaatctgcttgtccaaaaggtcacgtacaaagtaagtatgcccatgtacatacgcatcatctatcatatggatcaaaaactcgcgttctaccacataaatattcatgctgaaattcatctccccctcttcggtcgggttgatgtaaatcttgctgacgcggtctccgttcatgccgagtgcatagtacagatccatgcggtccctgctctgacggataaatgccttcggaatttcctgcttgcggtacatcatggtcacatccgcaccactcttgatatgcgcatctaaaagttcattaaaatcaaaattgatggcaatatttgcatcggtcataatgacatatttctgtggctgctttaacagatatccgcgcagactctcaagtgcctcgatgcgtccctcgaatacctttacctgtttctgtgcgaacggaggaacaatattcaggcctccgtttttgcggaccagatcccactcacggccggcgccgagatgatccagcagggaatggtaattttttcttacgataatggaaatattgtcaattccgctgtgtaccatgctggaaagaataaaatcgcacatgcggtatctgctggcaaatggaatggatgccatgaggcgctccgaaaccagatccggcaccattgcatcatagctgttcgggaaaataattcccaatgcctctgtctttgaatttaacattgctcctcaccctccttcacatcttcataaatcatagcgctcggaccaatttttgctccttttccgatcgttacatccgctgcaattgtggcaacttctccaattccttccccttttggttttgctcccacaaccgcatcttcttcgatggtcgcattttctgcaatgatacagtgtctgacaaccgcacctgccttgatcgtggagtgtcccatgacaacggcatcttctacaatggcgccttcttccaccgtgacaccggaaaacaggatggaatgtctgacggtacccttgatgttacatccatcggtaatcagacagttatccagcacggcattctctccgatccggtgaccggtcataccactgtttctgctgtaaattttccagttttcatcaaacaggttgatgccgctatgttccggatcaagcacttccatgtttgcttcccacagagacggaatcgttcctacatccttccagtatccgttgaaatgataggcatacatctttcttccgtcacgcagaagatttggaatgatattgtttccaaaatcattctcggaagtcgggtcagcctcatcctcgatcagatatttctttaaaatatcccagttaaatatgtagattcccatggatgcaagattggacttcggttcctttggcttctcctggaactcggtaatcttgtcatcctcgtctgctaccatcagcccgaaacgggaagcatcctcccacggcacttccatgactgcgacagaaaattctgcccctttctgcttgtggaactcaaggaaatcactgtaatcctgtttgcagatctggtctccggaaagaataatcacatactgcggatcatagcgctcaataaaagcaatattctgataaatggcatttgccgtacccttgtaccagtcagaccccgatgctttctggtacggtggaagtacatgcacgcctccgtaaagacgatccagatcccacggctggccatttccaatatactcgtttaatacaaacggctgatactgggtcagaatccccaccgtatcaattcctgaatttacgcagttcgacagtggaaaatcaatgatacggtactttcccccaaacggaactgcaggctttgcaagcttctgtgtcagtgcatataatctggacccctggcctccggcaagcaacatcgcaactagttcttttgccatataagtatcccccttctgttcataataattgcacttattatggtaacataaaagggggataattcctagtacttttggctcttttcgtttattttagtgcaaagatttctgtgccgtatacagtttgtaatatctgcctttctttttcatcagttcttcatgcgttcccgcctctgcgattcctccgtcatcaatatacatgatcttgtcacagccacggatcgtggagagccggtgcgcaataatgaaggatgttctgcccttaagcatacggtttaatccggtctgcaatgctttttccgtctgcacatcaatgctggaagttgcctcatccaaaatcagaattgccgggtcacaaagcagtgttctcgcaaaagaaatcagctgtttctgtccctgggaaagcatggacccacgctcccgcacctgtgtttcatatcctttcggcatttcccggataaacggatcggcacagacaatttttcccgctttttcaatttcctcctgtgtggcatccaattttccgtaccggatattatctgcaattgttcccgaaaaaataaaactgtcctgcatcataatccccatctgcgcacggagagaatgaatggtcacatctgcgatatcctgatcatcgatcagtacctttccgtcattgacattgtagaaccgtgaaatcagattgacgatggtactctttccggccccggtcggtcctacaagtgcaacactctccccgggatttaccgtaaaggatacgtcttttaatatcgtttttgtctcatcatatgcaaaggtcacatggtcaaacgtaactttcccccggatctttggcatcttgatcgcatgctctgcatcttttacggtaaccggctcatcgatggtttcaaagatccgttccagataagcgatattattgataaaattgttgaatatatttccaaggttcatgatcggctgccagaaatacgaagcataactggaaatcgccacgatcgttcccagcgacttatttccctgcccgaaaatgacaaggccaaacaaaaagatggcagcacggacaaacaccgaaatggtatcaatgcccggccatacaaggtttgagtagcgcacagcggtattccaggtccgtctgcattctttggaaagtccgttaaagatttttgcattttcatcctcacgtgcaaaaatctgtgtaatccgggcacctacaatattttcctgcagatacgcatttaagtttgagttcttgttggatacggcctgccacgcctttctctgcttatttttgatccagaacataaagacggcaagcacgggaactccacacaacacaaccagtgccatctgcacatctaccataaacataaaaataataataaacagcagattaaatgcttccagcacgatattgatcagtccgtttgacaacatatccgataccgaattgacataattgaccacccggatcagaatctttccatgcggtctgtcgtcgtaatactgaaacggaagttcctgcagatgttcaaacaggtccttgcggatatcataaataatattctgactgacatccaccatgatgcggctgcggatcgtggtaaaaatcacgctgaccacatagatggcaatcagcgccgccactagggaaaataacagtctcatatttttatcaggcaccgcaatatcaagtgcccgctgaataatcatcggtgccacgtacccgaacgctcctccgattccgctgaggacgattgcaaggatcatacccctgcgatattttttgatataggatgacgcccggagcagatgccggatatcaaacggttcttccaggatttcatcctgcttatatgtattctttgccattgtctcaccccctataccaggtcttcgccggtctgcagctgtaccagttcgtaataatatcctttttttgccataagttcctcatgatttcccatctccgtgatccgtccatgctgcatcaccagaatcttatccgccatcatcgtagtggaaatccgctgtgcgataattaccttcgtacacgaaaaatccagatgccgcagtgcttcctgaatctgtttttccgtttccatatccaccgcagaggtcgtatcgtccagaatcagaatcgaaggccgcaccgccagtgcccttgccagggaaattcgctgtttctgtccgccggaaaggcctacgccacgctctccgaccaccgtatcatatccttccggcatctttgagataaaatcagatgccgcagaatattttgcaaatttttccacttcttcgagatcaatgctgctgtctccgtaggcaatgtttccctcgatcgtatcggaatacaacagcacatcctgtgtggcaagtccgatctgtttgcgcaggtcggacagtctgaaattctgcaccggtatatcatcgatccgcacttcccctttcgtcggctcataaaaccgcgggatcaggttgatcagggaagtctttccgcagccggtttctcccatgattgcaatggtctcccccggttttacggtaaaagagatatcatgcagcaccggaagttccccatcttcatattgaaaagatacctcccggaattcgatttttcctttaaagtgatccgtgtgcgcagctgcatccggagcatctttgatctttggctcggaataataaatctccatcacttttttggatgcggctgagaatcgctgaaattcattcatgatattccccatctggcgcatcgggttggcaattgcccagatcagtccggaaaatgccacataatctcccatcgtcagttcgccccggatcaaaaagacaccgcccacggccagcatcactaccggcataaggtttgcaatgctttccacatacgggaaaaatttcagccataccatgctggtctctttattcgtctgtgcataatctttgtttgcccggtcaaatttttcaatttcatatgcttccctggcaaacgcttttaccacacggtttccggaaatattttcctgcgcataggtgttcatctgtgccagtttttcacgcagtttcgcatgcatcggtgccaccttgtttttgaacagataaatgataaaaaacacaaacggcgaaataattaacaggctcagagccattttccagttcatataaaagaagtatattgccaccacaccaaacagggaaaatgattcgatcaccatgcggatcacccatgcaaccatgtggcgcaccgcatccagatcgcccgtaacacgcgtcatcagatcgccggtacgatatgtgctgtaaaaggtcatatcctgcctctggattttgtcatacaaaaaattgcgcacacggtacagtaccgtctgtgacacatgctcgtaaatcatgcagtctccatagacaatcacaccgcgaagtacggtaaatacaatcatcaggatgagcagatgatagaacaaaccactattcgttctcatatttttccacgcatctgccccacttaaaaacagatccacaattcttccggaataatacggaaccgtcagttgcaatatattatagacaacggttcccagcatgccgatcacatataatacacgtctgcctttcatattttcccacagccactgtatttttgtctttggaaacaatgtttcttttttcactttcatcacaagcccccactgtctttcttgtcaaatttctgttattgtatcaattatttttgaattatgatataatacaatcacataaaaatagaacaaatctattctatttttatgatttttgtcttagtaccagggggtcatatgaacgaaaatttatttgaatacagtgatatgctgcgctctcctattgaagctttttgctgtggcaccggatactgggaaggtcccgtttcctcccactggcactattttctggaacttgtctatgtgcaggaaggatctgtaacggtcagctgtaatgacaatacctgtctcctgaaaaaaggagcctttattgtatttcctccgcaggcaatgcactccatctatcataccgatgataagccctatgtttacatctgctgtaaattcaatctcaaccgcataaaactttccgagaattatcttccaaatttaaactttgcctttcaccagattttaaacagcacaaaccctccgctggtttttgattcggacaacctgcccgattttcctgctgaactgtttttcacggatatcttaaaagaggttcaggaaaaacgctacggatatgatgcctgtgtttatgcccagttcgcccggctgatcgtacagctgctgcgtttctggctggaacagggaatttcttttgatacggatcagatcccggaagtggaggaagaagcgatgcagaatgttttgatgtatatcgatgatcattcccaggaaaatatcaatattgaatctctggcgcgcacatatcatatgagttattcttactttgcccggcagttccgtaaatactatggacaaagctgcaagcagtatatcgaatttgtgcggctgagcaaagtggaaaatctccttttatttaccgggcatgatttaagttatattgcgggagaaacaggctttgccgattgcagccatctgatccgtacctttaaaaaacgctatcagatgacaccgaaacagttccgcttacaacatcagaatatacgaaactgacgtttccaatctatgggattttttcctttttcccaaaagtttcttcttttatgctatactataggaaacaattcataacggaataaggaggaaatcccatgaaacgattacacttcaccagatgcaggacttctttgcttgctgttttacttgccttttccgtagctttcgtacctgtaccacccatttctgatacaagttccgattctgctgcgcttatcacgactgcacaggctgcccaaaagaacacaaaagaccgtttttccatcaaagaagttccaaaatacaatggaaaatcttctgtggctgtacatggaaataaaccatatttcaccagccgggaaaagcaaaacaccaacacttttgaatcctaccataaactcgacaagctcggacgatgcggtgtggcctatgccaatgtgagcaaagacaccatgccgaccgaagcgcgcggggaaatcggtcagatccggccatccggctggcacacagtcaaatacaccggtgtcgtggacggcaactatctgtataaccgctgccacctcatcgcctactgccttactgcggaaaatgccaataaaaagaacctgatcaccggcacccgctacatgaacaatgaaggtatgcttccttttgaggaaaaaaccgcacgatatatagacaaaaccaataaccatgtcttataccgcgtgacaccggtttttgagggcagtaacctggtcgcttccggtgtcctgatggaagcttattctgtggaggatcagggaaagggcatttgtttttgtacctactgctacaatgtacagccaggtgttgccatagattatgccaccggtgacagtcatctgagtggaaaaaataaccagacttcccataaaagttctgcaaaggaacacgcatccgcggtctatattttaaataccaacaccaaaaaattccacaaaccggactgtcattcggtaaagcagatgagcagtaaaaaccgaaaaaaatacaaggggctccgcaagaaattgatcaaagacggatattccccttgtaaaaactgcaacccataacggctgccctatttcccaatgatttcatcggtattgataaactcatacggtgtctgctggtaaacgtaataattcagccagtttgcataaaggatatttccatgtgaccgccactgcagcatcggccgctgcgttggatcatcatccggataataattacacggaagcgtgatcgcaagtcccttctccctgtcacgcttatattcactgtctaatgtcatccggtcatattccgggtgtcccatcacaaaaatctggctgccatcctgattgattaccagaaaaacccccgcctcttttgattttgccagaatggtcagttcttcatgctttaaaatatcttcctcccggatctcggtatgccgggaatgtggagcataaaaataatcatcaaatccgcgtaccatcggaatcttgcgattcattacatggtgccggaataccccgaacattttctgctttagatcatatttttggattccgtaatgataataaagtgcagcctgcgccccccagcacaaatgcagggtggatgtcacatgctttttggaccactccataatctcacacacttcatcccagtaatcgacttcttcatatttcatctgttccaccggtgcaccggtaatgatcagcccgtcaaaatactggttcttaatttcctgaaacgtctgataaaacttgttcaggtggctctttgaagtatgggtggatgcatgggatgccggtgcaagcagcgatacgtctacctgtaacggggtgtttgacaatgaccggaaaatctgcaattccgtctcttctttcagtggcatcaggttcagaatcacgatattgatcggacgaatatcctgatgcatcgcacgggactcatccatcacgaaaatattttcctgttcgaggatctcctttgcaggcagatcactttgtgttctgattggcataactttttctacctcccaccaaattgttctataaatgtatcttcggaaataatcggaattcccagttcttttgccttacgattcttagatgatgcggattccacgtcattgttgacaagatatgccgtcttttttgagacgcttcctgtcacttttccgccctggctttctacataggccttaaattcatccctgtttttatagtgatgcacatctccggtgatcacaaagctcagtcccgcacagcttccggaagaagtatcctgcacttctacatgttctatcgaaagttcatgaagcagatcctcaaacccactgtggtttttttcattctgataccaggttacaattgatcgggaacgttccgctccgatcccctcaatatcctcaaacccgtccccctgatgcagacgttgcaaaaagccttcaaaaccaatggcggcaacaatttttttcccagcatccacaccgatcagcggtatgcacagggcaaatataaagttcaccggatgtacctgccggcttttttcaatggactgttccatatttgccacagatttttcaccaaagccctccatctggctgatctccccgaaatgctctttcaaacggaaaatatccgcaaattcatggataaatcccgcattcataaaacggagcatcgtctgaatggaaagtccgtcgatatccatcccccacttgctgacaaaacgggtaaatttcttgacatttttggctgtacagtccggattggtacaatgcagggtctttgtgccactgttttcactcacatgaacttttgtcggtgcatggcacaccggacactgggatggaatctccggagcacctacagcatcttttaccgcaatacatttcggaatgatcttattggctttgatcacggaaagtgtacactcttttccgattcccagacgctcgatctcgctgatattgcatagagatgctctcgataccgttgttccctcaatctgcaccggttcaaacacggcaaccggggaaatcgtagacaccgcacacgaccattcgatatattttagttttgtatccacggcctcatcctgccatttgaacgcaaaaccggcgcgtgtcgcatgatgcccggtcacgcttcccgatgccgcataatccgtatcatcataacagatcaccagaccatctaccggaatatccatttttccgctctctacaagtttcgtccatcggtcaatggcttccggaagtttttgggcggttgtcgcttccctgtctaccacatcaaatcccagttcttccagaaagtgcatccgctctccccacgataccatcggctcatccagatgcaccagtgtaaatgcatgaaacctgacatggcgtgccttcacttctgccggatcttccagattcagcgttccggatgccagatttcgcggatttgcatatttttcatcgtcatcctcaatcatgtcgttgatctgtgcaaaatctgtataggatatggcagcttctcctcgcacaaccagatgcccctgatacgaaatcttttgcgggaatcctccgatcgcaccctttaaaaatgtaatgttggtacccaggttcccatttcctctggtaagaatttttacaagatttccgttatcatacgtcagaaccagcgtaagtccgtccagtttccatgacagccagatcggataagctcccgcccattgctgcagttcttccacctgtttggtcttcgccagagaaagtgccggatactcatgcggttctttttgtccgcttccggattcttcatatccggcattctgcgtcggactgtcctttataatatatccggttttttcttccagcgtggtaagctcatcaaacaaagcatcccactcataatttggcatgatttcatcctgtccgttataatacgcagctgatgctgcattcaactgttttaccagttcttcaatccgttgcttttctgtttccatttttgttctctctatctatatgatgatttaccaccgtatacgtgccatgtatggcagaattgcgtggttttcgttttgatttttgtggtttttccattggtcgcacgggctgattgctcgaatgtgcgatcaactgttttaactttttaaattcctccggtgtaacatcccggtactttcctgattcgagatcccccagttcaatattcatgatccgtacacgtaccagtttctgtacacggtacccaaaatattcacacatgcgtcggatctgtcggtttaatccctgtgtcagaatgatccggaactgtttttttcctgtccgttctaccctgcatttgcgcgttgtcgtgccaagttccacaagcggaacaccgtttgccataccatgcagaaatgcatccgtcaccggacggttcacggtaacaagatattctttttcatgcatatttcccgaccgcataattttgttgacaatctcaccgttattcgtcaacagcaacagtccttccgactctttatccagacgcccgaccggatagatccgtttcggataatgcaggaaatcaatcacattatttttttcccttttttccgccgtgcagacaatacccgccggcttgttaagcgcgatcagtatcatttctttttctttttgtaccggtcttccacagaaacagacctcctgtccatccgatacatgatcccccatccgcgcggtttttccgccgatggttacatttcctgcttcaatctggcgatctgcttctcttctggagcatacccctgcttcacttaaaaatttattaattctgacttccacgtttcttccctgtctgacaaaaatcgcggagacctcacagcctccgcttctttatgatgtctttattattttaccgtttttattaaatcgctcttgatgtatccggtttttccctggaacttcaccttcgtccattctcccttggtgccaagtttctttaattttacgcccgcatctacttttccaagaagttctccatctgtactggcggttttacgcacattgcagatatccttcgtttttacggttcccttgccggaacctgacttggaagacacttcctttacaaattcgctctttacatatccggtttctccctggaattttaccttggtccagtcaccttccgttccaagtttcttcagttccacaccaatatccacttttccgaggagctcaccatccgtactcgggctctttctgacattacagatatcttttgtcttgaccgtaccagtagatttcttggaatcgctctttggggtatcttccttcttttccgtagactccgttgtctgggtttcctcggtcttttgagtttcttcctgtttctttgtctctgtggtctgggtttcctgcgtctggctttccgtctctgtcgtctgggtttcggtattgcttacaatcgtttctctccattttgccatggcatttcgaagtgttccacccaccatattggcaagtttttcatcactctttacagcttcattatagcttgtctgcacctctttctgcagagcaaccacttcatcactcttctcatatgccagaatcagggaatacagatttgcatccagatcctgatccaggaaattgaaattgtatgcagagtatatgttattgatgatcagatttccctttccgtctctctccacatagaagaaatccattcccggtgccggagtatccacacctttgaatttcagatcatagcatacagataccagataagaatcatcggttgccccctttgtggaataacaggtgatgttctgataatcctcataatactcagaaaacgtcgtgatataactcttttcattgtcactgagcggctgtgcaatcatctccagcgaatccgtatctccaccagcatatgccgcataataattttccatcagtgtcacaagttccgcatctgcatctttttgtagcttaccgatttcctgatattctgtagtctgtgtcactccctgtgtaccgttttgtgtctctttctgatctttctgaggaccggtacactttaccagaatcacaacaagaatcacaaataaaacagctgcgcaaaaatatcgtctatatttcacaaaaaagtctgtaaacttttttaatttttcattctgcatatgaaccctccataaaaatgcatctttccatttatgataccacacctcatactattcgtccagtaaaaaagcggtgcatgacgcaccgcttttcctgtcgtaccatgggtaagttgtttccttgccacatagcataaactgcacccggcgggaatcgaacccgcatctcaggagtcggagtcctgcgttctatccattatactacggctgcatagcactcttatttcacaagtgcctttttactatatcacacttcaaatttagagtcaatccacactttgatgtaaaatatgaagtatttcttccagctgctttaccggaagctgccccggtgcgctcgcctgcccgcctgcgccaaatgtcacacacgatccgaaaaactctccggccacgcgggaaatccccccttttgcacccatggacatggtaatcagcggatgatccggatggttttcatgaaagcggttggtctcctccagcaaatgcaatacatcccacatattctgcggcataactgccagtttcacgacatctgcgccactctcacggatctgttctaacagcatgcggatcacctccgggtccggcgtctgttcaaaatcatgatgggaagcaatcacatatactcccatctcctgcaacattgctatttctttctgcggattttttgcttcaaaatattccacatcaataaaatccacgacatctgattctgccgccacctgatgaatatcataaatatccgccgcggaaagtgctttgcaccctccctgatttttagaacggaaggtatacaccagaatactttcctttatgatatgtttcatttcgtttaatatttcgcggatcgcattcggactttccacgttttcaaacgcatccacacgccactcaatcatttccgtgtgtgcttcttccagccttctggtttctcttaaaatttcttctttcgaagactccatgaccggcacacacacgagcggtttcccttttcctataatctttccttttatacaaagcagattttccatctctgcacctcctgctgtgttgtaattctctgttattatattctaaaagcccgaaagaaacaaccggttcctgttatttgacatttttcccgttttccattaagatagtcacggtatgtgatatccgaacttaagagataggagaaaaaaatgagttttgaatttttaaaccaattaccgactccggcagacattaagcgcgattatccgctttccccggagcttcgtgaattaaaaaaacacagagacctcatgatctctgatgtaattacaggtaaagattcacgtgtcctcgtaatcatcggaccgtgttctgcagataacgaagattctgtatgtgattatgtgagccgtctgaccaaaatccaggaagatgtcaaggatcaggtcatcttagttccgcgtatttacaccaacaaaccacgtacaaccggcgaaggctacaaagggattgcttcccagccagatccggaaaaagctccggatatgatcgagggtctgatcgccatgcgtaaaatgcacatccgtgcaatcgaagaaagcggtcttacctgtgccgatgaaatgctttacccggaaaactggggatatgtcgaggatcttctctcctacgttgccatcggagcacgttcggtagaagatcagcagcatcgtctgacggtcagtggttttgatgtcgcttccggaatgaaaaatcctaccagtggtgatttttctgttatgctcaattctgtatacgcggcacagcatccgcatcatttcgtttatcgcggatacgaggtggagacaaccggaaatcctctgactcacgtggttcttcgcggtgcagtcagcaagcacggcaataccacccagaattatcactatgaagatctgatccgtcttcatgagatgtacgaaaaaatggatatcatccatccggcagccatcattgataccaaccattccaactccggaaagaagtttaaggaacagatccgtatcgcaaaagaagtgatgcataaccgccagctttcttccgatatccgttctctggtaaagggtctgatgattgaaagttacatcgaagagggaaatcagtctatcggagatcatatttacggaaaatccattaccgatccttgtctcggatgggaagattccaaacagctgatctatgacattgcggagatgaacgcaaagtaaacagtttttgtctgaaaacaaaaatggagtgtaaaaagtgttccttttgcactccatttttttataatttttctacaacaaaacgtaacagccggattccaacagacgcctccaatacacatccaagaagtaccagtaccgcaactcccatcccccatgccagccgcagcagccatggatttttccggttataaaacctgtgcggttctaccagcagtaaaagcgcaagcgctgcaagatacaaaattccatgcggcagccacgataccaaaaaaaaacaattccaagaatccccatattcatcacacaggcagcaaaaaataccccgccggtaaaataaatcaggcagcgcaataataatggcagaattgcttttaaagcagtaagggaaaggattgtaataatcacaaacacttttcccctttcccataaaatatttgccaaaagcggcaaatacccggtatccgatgccgcaaatgctttcatatgatacgcatttaaaaatccataagtcgtaaaatattcatatccaaacagacaggtacataaaattcccgccaggccaaaacagattccaatcgccagttcctttttcataaaaattcctaaaactcttttcttttcagcctatgccctgtccgttttctttattccatttttataaatccagatgttttcccattccgcctttttttgctgccgcatatgccataattgcagcaatggtttttccatcctgaatttttccttcatagatcatatcgcacaactcttccagtgtgtaaatttccacatcaatggattccgcttcatccagatgccgggttcccacttccagatcggtagctacaaaaatatcaaccgcctcatcacaaaatgccaccgtcgtacgcagggataataaatgtttcacattcgtgctgcggtatcccgtttcctcttccatctcccgtgccgcacaatacgccgtatcttccgtcttactgtcccgacagccggccggaatttcaagtgtttctctctccagcgcattgcggtactgacgcaccatcacaattcttccatccttcataaccggaagaatggcggctgcgcccatacgatgggatacaaaatcccactctgctttgtttccatccggaagttccatcgtatctttgtagatatccagaattgctcccttgtataccagttctctcttcaatcgttttacatgctctaccatatttcaaatctctctttcctgtccggacatcatccccggatatttttcatcgttcacagtttcttcaaatttgtaacatatccatttcacacttttccggtatagtgaaatcatcaaaaggaaccaaaacctttcgatcatttttttcataatctggccagtgcagccgtgctgtactggtccctccttttttattctatacgtcccgtgaaatcccaatgtatttattttacaacacattatgatataaaaaaggcttaatcccgcttcccgcggtcttaagcctttttaagttcattttcacaattacttagcgtagtcaacaacacgcgattccctgatcacatttaccttgatctgacccggatattccaactcagtctcaatctgttttgaaatatctctggctaaaagaaccatatccgcatcgctgatctgctcaggaacaactaagatacgaacctctctacctgcctgaactgcaaaagatttttctacacccttatagctatttgtaatatcctcaagctgctgtaagcggtttgagtatgtttccaaagtttcttttctcgcacccggacgtgcagcactgatggtatcggctgcctgtaccagacatgcaatcagactctccggctccacatcaccgtgatgtgcttccactgcattgatgacaagaggtgattccttgtactttctacacagttccacacccagctggatatgggaaccttccatatcatgatctacagccttaccaatatcatgtaataatcccgcacgttttgccatacggacatcctcaccgatttctgcggcaagcaaacctgtcagctgtgcgacctcaatcgaatgtttcaatgcattctgtccataactggtacgatacttcattttgcctaaaagccggacaagctccggatgaatgccgtggatgccgacttctagtacagcagcctcgccttcttcacgaatcattgtctctacttctttttgcgctttttcaaccatttcctcgatacgagccggatgaatccgtccatccacgatcaacttttcaagtgcaattcttgcaacttctcttcgaatcggatcaaagctggaaaggataactgcttccggcgtatcatcaatgatcagatctactcctgtcatcgtttcaagtgtacgaatatttcgtccttccctaccgatgatacgacctttcatctcatcattcggaagctgtacaacagagattgtggtttcagcaacgtgatccgcagcacatttctgaattgcagtaactacatagtcctttgccttcttgttgacttcttccttcgcctgcgcttccatttccttgatcatcttcgcagtgtcaatcttcacatcttcttccacggtctttaagaggtattcttttgcctgttcagaggttaatcctgaaattctttccagttcctgtacgcgctgttcgttgagctttgctatctcaactttctgcttctttaaatcttcttctttggcacggaaacttgcctcacgcttttcaatcgcttcgagtttcttgtccagattttcttccttctgcacaatacgacgctcgttacgctgaatttcatttctacgctctttgatctccttgtcgatctcattcttggaacgaatggtttcttctttgatctcaagcatagcttcgcgcttcttgtcttcggcatttttcacggcctcgtcgatgatgcctctggcctgctcttctgcatttccaatcttggtatttgctaccttcttgtgatattcagtcgagataaaccatacagcaaccgcagtaattataagtgtgataacaacagcaataattacttgtggcacaggagcacctcctttattaagttttcattgtacatataacaaaaagaaatattagtcttccatgtcatacttctacaacattataattttatcctttttgcttaaatatgtcaagcaatacgtgctttcattgtttacttttcatagcacgcagcacatcattgctccgaaagcccctgcgcatcagatactggtaaacacgtgtaaattcttttgggtcggaattttgtgcgtcaaagtttttcttttccagcagccggataatctgctcctgttcgtccccctcataacattcctcaagggcacgatcaatcacttctccaggaactccctttccatacagttttactttcagctgatagcggctcatacgatcctgacgataattgatataggtacatgcatagcggtaatcatcgacataatgaaaagatttcacatattcaagtgcaagatcaatacacgcctgcggatatccgccctgtttcagtttctcccgcagctgctgctctgtacggtccatctgttccagcagatgcatggttcttctttttgcacgctttcccaccacttcataaatcagctgatgctcctcttcatccgaaagtgtgcttccttcccgcattcgaaactgttttgcctctccccggtaaagaacaagctccgttccattatccagatggaaacgaagcctgccctttcccagagtcgtacactctgtcactgtaaccatatcttattcattcttgctttccgcatctgcagataccggagtctcttcttcgccttccggggtctcatcctcctgtgcaaaataatgttcacgcaccatttcctcgatcatcttacagaattccggattttcacgcagatacgtttttgcattttcacgtccctgtccgatcttgtctccttcataagcataccatgcaccggatttgctgataattccgacatttgctgccagatccagaatatctccctctttggaaatgccctttccaaacatgatatcaaactctgcttcacggaatggcggtgctactttattttttacgactttgacacgggtatggttaccaatgacttctcctgcctgcttcagctgttctacacggcgcacgtccagacggacagaagaataaaacttaagtgcacggccaccggtcgtcgtctccggatttccaaacataacaccaactttttcacggagctggttgataaagattacaatacagtttgacttgctgatcacaccggtcagcttacgaagcgcctgactcatcagacgtgcctgcaggcccacatgggaatctcccatatctccgtcaatttccgcctttggcacaagagctgctaccgaatcgacaattacaatatcgactgctccggaacgcaccatggtctcggtgatctcaagtgcctgctctccgcagtccggctgggaaatatagagattgtcaatatcaacaccgatattctttgcatagacaggatcaagcgcatgctctgcgtcaatgaatccggcaattccgccctgcttctgcacctctgccacacagtgcagtgcaacggtagtcttaccactggactccggtccgtaaatctcaatgatacgtcctttcggaagtcctccgagtcccaatgcaatatccagactgagggatcctgtaggaaccgtttccacgttcatatttgcggaattgtcccccagcttcatcacagatcctttgccatactgtctctcgatctgtgcgattgccgcatccagtgcttttaatttatcgtcctttgccataatattctccttcttatcgaacttatgttcgtatctatgttctaatagtagtatattttgtttgtattgtcaatgcaaaattttaaatggggaaataaaaaaagacagtcgccctgcaactgccttttattatacgttgtatcctgctacgcgtcaagaagtgttttcaggtaatcctcaatcgcatcctgcgtctgtaaccctaccatcttcttttgaaacattccatctttcatgaataccagcgtaggaatactcacaatctggtaatttaatgcaagctgtggctgctcgtccacatttactttgcatactttcacctgatctcccatcgattctgcaactgcatccacaaccggtgactgcatctgacaagggccacaccaggatgcccagaaatcaatcacgaccggcacctttgcaccgactacttctgcttcaaagttttcttttgtaattgttacaactcccatgatctttcctcctttgattaattcttactgaactcggataatacgagtccttcgtttcggtcaagtgtcatgccgacactccatgcattgacaaataaaagaagcggatttcccttcatatcaataactttcttcatatctgaagtaccagtcagcgcgtccacatccacttcatccttgttctcgatccagcggatatgttcatatggaagattctccagacggatctccacattatactcgttttccagacggaaccggagtacatcaaactgcagcacaccaactactcctactatgatttcctccataccgcctttgtattcctggaaaatctggatggcaccttcctgtgcaatctgtgttactccttttacaaactgcttgcgcttcatggagtcgatcagacgtacacgtgcaaaatgttccggcgcaaatgtcgggattccctcaaactgaaacttgtcctttgccgtcgtgagggtgtccccgatagagaaaatgccgggatcaaaaataccaataatatctcccgcatatgcttcttctaccattttacgctcgtctgccatcatctgctgcggctgggaaagcttgatctgtttgtttccctgcacatggaatacttccatgcccgccgtaaacttaccggaacagatacgcataaacgcaatacggtcccggtgatttttattcatatttgcctgaatcttaaagacaaacgcagaaaaatcttcctgaaacggatcaatcattccgatgtctgatttccgggccattggcgcataagtcatcttcaggaaatgctgcagaaaagtttccacaccaaaattggtcagggcagaaccgaaaaataccggggaaagttctccctttgtcacaagttccatatcaaattccgcactggcaccgtcaagaagttcgatttcgtcatccaaaattgattttttctcctcaccaatctcgtcgatcagtgccggatcatcgatatcaataatcttttcggaaccttcttttgttccctttaatgtatcggcaaatgtcataacttttctggtatgacggtcatatacacctttgaattcttttccggaaccgatcggccagttgaccggatacgttgcgattcccagttcattttcaatatcatcaagaagctcaaacgtatcatttgcatcacggtccatcttattgataaatgtaaaaatcggaatatggcgcattacgcataccttaaacagcttacgtgtctgcgcctctactcctttgcttgcatcaatcaccatgactgcggaatccgccgccataagtgtacggtaagtatcctccgagaaatcctgatgtcccggggtatccagaatattgatacagtatccgtcatagttaaactgcagcaccgacgaggtgaccgaaatacccctctgcttctcgatctccatccagtcagacaccgcatgtcttgctgttgcctttccttttacggaaccggcaagattgatggctcctccgtaaagcaggaacttctccgtcagagtcgtcttacctgcatccggatgggaaatgatagcgaatgtacgccgtttttctatttcttttcttaagtcactcacagtatatcctccaaaccaattgcacactgtacctcattttatactaaaaactatgtatttgcaagtgctactggatgggagtgatcacgatcttatctgcggatactccggtcttacgctttacaatatcttcgacctgcgcccgcttggcatcggttgcctcccccatattaagaaccacatcacagccgtcatcattcatactgacaaccacatccgtaaacccttttgcctccagcatcatttctgcattggactctttctccgcaatatccgtcagtgtaatcatttcattgaccgcatctttctttttggactcatccaaagaatcattgtcaatgattgcctgcagggtttctttatttttggaacgcacctgttcccggttaagtttcacttttgccgcatagtcggaatccccgcttgtcacagaggtaagtaccgtctctcccggattttccacatcttccgtcgatgcatccgccagatcttccttgctgcttgtgatatccagatcctccccggtttcataatctttatccgcctggtcacttacggcaccctgattcatattagctaccgtctcggcatctttgatatcagcgccctttttgtcataagtaacataaccggccaccgcaatcagcaccgccagcgttgtaataacaatctgatttttatgcactctttttttcacgtctattcctcctgtaccgacattttaactactactaccttatgcgcttccaccggaaataatgacattaccgcgttggaaatttctgtaacggtctttgcatttcctccaccctgtgccacaaccacaaccccttcaattttcggcatctgcctgcagatcacatagggctgtctggtatcaccggtatcgtacaccaccgttgtctcttcctttttgtttccatcttttgtcacatttttatccagctggtcggttccctcatcggaaaatgtcagcattacacgggtttttcccaccccgtccatgtgttcaagcagctccttcagctgctgctgcagctgctctttataggaatcttccgtctgcagctgctgccccttttgttcctgcgtctgtgtttctttctggctttgttttgcccccgtcggcatcgcaacgatcattaccatcaccccaagcagaatcagtacaacgaaatccgatttattcctctttttgatccactttcccaagatactgttcaaaaatattctctcccttctcctgatattctatgctttccatctgctcgacaatctcatgcagctgctgccttgcctcttcttttttcattcctcccacatagaccaaaagcggctgtgccagcacggtgatcacgagcacgctgacaaaaaaatgaaaatatttctgataggtttcctttggtgtcagatatgacaacagataaaaaatcagcatcagcacgaaataatttttcacaaatgtaagtacaacttccatgttctcctccctcctcaatagatgaaactggtggaaacactgattatggatgtggtaataaaaaataaaagcagcgcatccagctgtatggtacaaaaaagcgcgcatcccctggcagcggcctgcacacactgcgcaatccggctgtctgcgaccggtgccaaaaatgcagcggtcaggcggtacatcacagaaaaacagaaagatttcagcagcggtgtcatcccgattacaagaagaaggataagggcagccgcgccaatgctgttttttatgaggattccgcttccgagcaggatctctgctgcggaaccgaaggtatttcctactccgggaaccgcggatatactgttaaaaatactgtttgtggaaagcctgtctcttgcaggtacaatcagagactgtacaacaccgattcccataacggcagtcagcccgccttttaagaccagtcgtattccgtcttcgaacagctgcgccatcttcccaagttttgtttcctcaaacaggttatccatcagaagaagcagcacaaacacatgaacccccggcagaaaaataaatttcattcccagttccagcagatacatcagtccgaatgccagctgataaaaggaacccgcagatgccgcattgccggagcaaaacagcgttgccgcatacaaaggcacaaatgcggtcataaatgccaccagacggtcaatcccctgatctaccacctctgagatcagggcaaatgattgcagcaacaacagaaccaccccaagataaacaataaaaaagctcatctgcgaaacatacccctgtcgcgtcatcatcacttttccgtacagcgcaaataaaagtcctatggcaaacatctgcaaaaacattggctttgcagccgtgatttcataaaaaaataaatctgcaatatattcacagatcattcccgcatccagtccgcctgttccttccgtcaccagtttattcaccattttttcaaaatccatcttttccggcagatcctgcgtctgtgcattgatatccgtaaaatcaagttcttttatgatctcatccgcctcggccgccatcacattttgcggctgtaaaaaaatcatccatacgaacaaaacagaccagaacaaaattttagctatttttttcatttctaccccccggtcatctgttcgatcagccgcaacaaaacccacaattccggaatggacaaagcaacgatcgataattttgcaaacagttcaatctgtcctgcgacagatccatatcccgcttcccggcagaccgatgcggaaaaatcggcaacatatgtaattccaagcatctttaacagtgctttcaaaagtgccggatctaccggaagcgtgtccatcagttcccgtaaaaaatccaggataaacgaaattcttgacagtgtgtatccgaaaatcaaaaccgatgctgcaattcccacaagcaacgccagctctcccttttcttttttcagcaaaagagccagaaaaaccgcagcaattccgatcattcctatctttatcatagacatcacatacgaaacagggtttccatcgttgtaaacagttcactgatacaaggcacgatccagaacaacactattatcagacctgccaggctcagcagaaatgcctgttcctcccttccactatgcttgagaatctggctgagtactgccacaacaattccaagcgctgcaattttaaaaataattgttacactcatacactcaaggttcccttcctacgcctttacaccagaagaatgatcataaccacgccggtcagcattccaacaggcagatacacccgctgttttttaaaaaattccaatcgtgactctgccagaaatttttccatccgttttctgcagatttcattgcatcgcagattctctgcactgctttcgccataaaatgctcctgcggcagacgtaaggatttcccagccctcctgcccgatctgcagttctcttttgtgcttctgcagacaatcctgccagattttgtgtccgcttggattctgatggttgcgcatacatacacagacctcatccagaaatgcctgcatggatgcatctgccgtttcataaaaagacaaaaaatcgcacaaccgcacatgttcctgttccagtgcatatccccagcgcacaaacaggcgtatccattcccccgccatccgctgtctggctttttccccctctgcccatttgtacagaaatccagcacaccctgccagtatcaggacggttccgaaaatccttgccacaatggatttcctcctccctcatatacggtgagaatccggcgcccgtccggttctctctgcagaccgatgagccgcatctgtgagcggatcagatccagtccgcccatctgcaggcggtgcaaaacctctaagacactgccggcatgtatagttccaaggatcgataccccgcaccgggcacagtctgccaccgcagcaaagtcctccggaagtcccagttcgtccactgcaatgatctgcggggacatggaacgaagcagcatatggattccatgttccttcggacaattgtccagcacatccgtgcggggacccagatcgttttgcggaattccccggtaacacgcggcaatttccgaccgttcatcgactaccccgacctttttcccggcacgcaggtgatttcctttcgaaagcagccggatacaatcccttaaataggttgtttttccgacccccggcggtgcaaagaaaaacgtatgatatacattctctccgcaatacagccatggaatcagtaccgatgcacacccctttttttcgtgagccagacggatatttaaaccgctgatacagcttaacagcttcatacagcttgaggttccgtgtttctcatagcttgcccgcccggaaaccccgatcctgtgcccgccttccagcgtaaaatacccctgtcgcagttcttcttccagtgcatacacggaatatccactcagataattcagtacctcccgcatatgtgcttccgtgagcagcccaatctctttttctttctcatccgcatataaaatttccagcggttgtccgacccgaagccggatttcttctgccccgcacaacgtttctgcttccatctgcgttcgaaaatctaccggaagatattctgtaatctccattctgtcacttcctccatgtttctttccataaaaaatgagccataaggacaaatccctatgactcatttatatgttttatatgtgattttagaacatccgatttacatacggtccggtgcggaaaaaccaagcacatcgatacaggtctcaagaatatttttggtcagtaccaaaagaccgatataagaagcctgtaccttaagatcttcctcggaaagaatctttgtctcatgataaaatccgttgaatgcattggccagttcataaatatatgcacagatcttgtgcggtgctttctcctcatatgcattttccatcatggcattgaaacgtgacaatacaagcatcaggttcttctcacttgcagaatgtgccccaagaatcggtgcatccggcagcgaattttttgcagtgtatttctttaaaatggatttaatacgcacaatcgtatataaaatatacggtcctgtattcccttcaaaagaagtaaaacgctcaatatcaaaacagtagtccttgcttgcctgattggacagatctccgtatttgactgctgccagagcaaccgtttttgcagtctgctttgcctcttcctcggaaatatcgaggttttccttttctttctggttctctgtaatctttttgagcatctcctcattgatctcatcaagcagatattccagacgcataacgccgccatctcttgtcttaaacggtttgccgtcttttccgttcatggtaccgaatccgatatgggtcagttccacatccggtccgacgagtccggtctttcttgcacagcggaatacctgtacgaaatgcatgctctgacgctgatccgtcaggtaaataatggcatccgggttgtaatcctgcatacgcatcacaatcgtagcaagatctgtcgtactgtataaggaagctccgtctgactttaagatgatacatggcggaatctcttttgtatccgtatcctctttgacatccacaaccagagccccttcgctcatgtaggcaaagcccttgtccttcatcatctgtaccatatccggaatatacggctgtgcatccgactctcccttccagagctcaaaggagacattcagattatcatagttcttctttaaatctgtcacggaaacatccagaatgtgtgcaagaagtgcacggtatccccgtctgccggcctgcagctggctggttgcctccatggcagcctcacggaacgcttcgtcttccttactctttttgctggcagtcggatagatatcctccagttcggaaatggtaaacggcgcctctttcggatattctccggtatagctttcatcatagtataccagatccggcttacgctcttttaattctacaatgatcagtcccatctgcagaccccagtctcccagatgcacatcaccgatcatgtgatgtcccataaatttgccgatccgcttgatactctctccaatgacagcagagcgcagatgtccgacatgcaatggcttggcaacattggccccgccgtaatctacaataatggtcttcggatgtgccgctttgtcacagccaaatcttccctcatctgctttcatatcgctgacatatttcgccagataggcaggacttactttcatattgataaatcccggttttacagactctacgctctcaaacagttctttttctgccagcgcctgcgcaatcttatccgaaattatgaatggtgcacacttgtactcctttgctgcagccattgctccgttacactggtattcacacaggtccggacgattggaaagtgtaactttcccgtattttgcatcatatccctgaccggtaaatgcatttgtcacctgctcggtgatcagatctattaatgtcttcatcctagggttctcctctttttttactacagattattgtatacatcatagaagaaaaagtcaaacgcttcttcgtatctgacatttttcttcatacaaaaacggctgccacattacgcggcagccgtctccacttttatcagttctatccgttattgtctaattgttctttccggaaaggtactcatcaataccctttgcagctgccttacctgctcccattgcaaggataacggtagcggcacctgttacggcatctccacctgcataaacaccgtctttgcttgttgcaccggtatcttcggttgcaacgatacacttgcggcggtttgtctcaagccccttggttgtggaagaaatgagtgggtttggagaggtaccgagtgacatgatcacggtatcacaatccatctcatactcagaaccaggaatctccaccggacttcttcttccggacgcatccggctcaccgagttccatcttgatgatgcgcacaccctttacccagccattctcatcgacaagaatttccgtcggattctgcagcagatcaaagatgattccctcttcttttgcgtgatgtacttcttccttacgtgccggaagttcttcctcaccacgacggtatacaatatgtacctctgcgccgagacggagtgcggttcttgcagcatccatggctacattaccaccaccgacaacgacaactttctttccatgggaaatcggggtttcatatccttcctcaaatgctttcatgaggttgtttcttgtcaggaattcgtttgcagagaatactccgtttgcctgctcgccagggattcccatgaaacgtggaagtcctgctccggaaccgataaatacagcctcaaagccttccttttccatcagctcatcgatctttacggatttaccgatgacaacgttggtctcgatatccacaccgagtgcttttacgttttctacctcggctgctacaaccttgtcctttggaagacggaactccggaataccgtagcttaacacaccaccggcacgatgcagtgcttcaaaaatggtcacatcgtagccaagctttgccagatctccggcacaggtcagacctgcagggccggaaccgatcactgctactttgtgtccgtttaacttctctgctttctttggcttgataccgtgctcgcgtgcccagtctgcaacgaaacgctctaatttaccgatggcaaccggatcacccttgaaaccgcggatacatttaccttcacactggctctcctgtgggcagacacgtccacagacagccggaagtgcggaagactcggagataatatgataagcctcctcaaaattgcgctccttgacctgtgcgataaatgccggaatattgatagaaaccggacatcccttcatacactgtgcgtttttacaatttaagcaacgggaagcctctgcaactgcctcttcctcgttgtatccataacatacttcctcaaaattcgtagcacgaacctttggttcctgctcacgaaccggtactctgactaatccttccattacttgtcacctccgcaatggccgcatccaccgtgatgggtagcgccctcttcatatgcgagctttgctctgccttcttctgtcttatactgctgctgacgcttcattgcctgatcaaagtcaacgagatgtccgtcgaactccggtccgtcaacacatgcgaattttacttctccgccaaccatcagacgacatgctccacacataccggttccgtctaccatgatcgggttcatggatacaacggtaggaatctcaagcttcttggtaaggatggtaacgaatttcatcatgatcatcggtccgattgcgacacatacatcataatgttttccctcatcgatcaatgcctgtaactgctgacagccatttccgtgaaatccataagtaccgtcatccgtacatacatatacatttcccgctactgccttcatctcatccatataaaaaagcagatccttggtacgggaacccatgatcacgtctgcatcaattccgtgctcatgcaaccattttacctgtgggtataccggtgcggttcccagacctcctgcgataaatacaattttctttttcctggtctcctcaaggttctcctcctcacagagttcggacggacatcccaaaggtccaacgaaatcttcgagagcatcgccctcatttaaggccatcatacgctcggttcctgcgccaatcgtctgtaccacgatggtgacagtctccttctctctgtcatagtcacagatcgtaagcggaatacgctctcctacttcatctgtctttgcaatgataaactgtcccggcagacactcattggccacacgcggtgccttgatgtccatcaggataatgttatctgccaatgtttcttttcgaacaatcgggtacataaactgcctcctgtatgtaataaatttaatctaatccctgttctctttttctgctgaatacaaaaagaggtgcatagcacacctctttattgtatatgacttcttcacttttcgcaacgacttttttacgaaaaatatacaagctcatcttccggtttctgggctttttcgatggaaatcgggtaaagaaccggtccttttcccttatattcccgtgcaaattcgacacgaatctctgccgtaattgtaatccatgacttgtgcggaagttcctcttcccggtcatatttacatttgaaaccgataaatgtcacatcctcaatgcagcaggtcatcgcaaaccgtcccggaacaaacacgcctttcttaagtttatccggattatataccagagccaggaattttactttcttgcgatcgtatttcttgtaattttccatggcatccatgtaccagatagcataatccgcatcggtcagctcaatcacatcctgattgatatcaaacggtaattcctccggacgctcatcaatcgttccgtccttgcgctcatagacaatctgtgctttccggttgatgttcttaatggtacggcgcagatgtccgcgatcggtatcatcatctgtacggttaaaaataaccacatcactggaaaaaacctgttcctgcatcattgcacgcatattattcatatacagatcatacgtcgtagaatctacggttgccagtgactgtacaatcacccagccctccggcatttttgcctcaagcagcttgtccatcccccaggtgccgttgtactcgataaaaatttgttccggctgataggtgtcctggatttcctgcagttttgcaggcgtaaaatcctcttcctcttcgaccgttaccagcttgaagttgatggttgccagttttgcttcgtcatattctttctcaccgtcttcgcacatgatgataattcctttcgaaccatcaccgaagttattctcaaacagcgtttcttctacgagagttgtttttccgctgtccataaatcctgtaaataaatataccggaatatcctgtgccataattgctctccttacatttttattggggtttacagcattttaaagaccaaatgtcttcagtaattcatcctcatgaatctccgttccgattaccacgatacgtccggtgtaatccggctcaccctcacggatctcatactcgcccggaaccatatcaaagtacagccaggtaccatcggtactctccaccatacctttggagcggaggatattgtcagaatcgacaaacttcttaagtacttcctcaagttttgcacgctcgaatttgtgcggtgtctccttgccccagctggtaaatacatcatctgcatgatgatggtgatggtgctcatggtcatggcagccacaggtacagttttcatcatgctcatggtgatgctcatgctcctcatgatcatggcagccacaggtacagttttcatcatgctcatggtcatggtcatggtcttcgtggtcatgatgatgatgctcatggtcttcatggtcatgatgatggtgctcatgctcatgttctgcctcttcctttgcatgatgtgcctcagcaagagccttcatctccaggttatcctgtccttccattaccttaaggatctgttctccggataattttgcccagtctgttgtaataatggcagcctttggattcaattcctgaattttattgacacaaaactccagctgttccggtgttgcattctggctgcggcttaaaatgacagttgtcgcatactcgatctggttgttgaaaaactcaccgaacgccttcatctgcttgctcgccttaagcgcgtttacaaccgttaccagtgcgtttaattttacatcctgctctttttcaatatcaatcacggacttcataacatcggaaagcttaccgactccggatggctcaatcaaaatacgatccggatgatacttggtgatgacttcatttaagttctttccgaaatcaccaactaaagaacagcagatgcatccggaattcatctctgtaatctggattccagcatcctttaaaaaaccaccgtcaatgccgacctcgccaaattcattctcgataaggacaatcttttccccggtaaatgcctcatcaatcatctttttgataaaagttgtttttccggctcctaagaatccggagataatatctattttggtcatgataatccactcctttttgttttttcaaaatctattctattttactcgtttttttataataatgcaagttgtgacacagccagtctaataatgcatatgataaagtttttcatacacaccgccccgtgccagcagttcttcatgggaaccggattccgcaatcccatcttctgtcagaaccagaattttttgtgcattctggatcgttgtcagacggtgggcgatcacaaatgtcgtacggttctttgccagtttctccaatgattcctgtacgaccctctcgctctcgttatccagtgcggaagttgcctcatcaaaaatcagaaccggtggatttttcaaaaaaacacgggctatggaaagccgctgcttctgccctccggagagcttgattccacgctgtccgatatctgtatcatatccatcgggaaatgccatgataaattcgtgggcattggcattttttgcagcagcaatcacttcttcccttgtcgcatccggctttccataccgtatattttcaaaaatcgttcccgcaaacaggtatacatcctgctgcaccattccgatatggtcacgcaggctctttaacgtcaccttacggacatctttcccatccacgcggatacatcctccggtcacatcatagaatctcggaatcagggaacaaagcgttgtctttccggcaccggaggatcccaccagtgccatatatgcccctgcaggcacatgcagattgatccggttaagcaccttctcctgattgtctttatactgaaaagaaacattttcaaaatcaatggttcctttcacatcggtcagtgctacagcatcgtttgcatcctggatttccggttcaatattcataatttcctgaaaccgttcaaatcccgtatagccattctgaaactgctcggtaaagtccaccagtgtccggattggatccgtaaataccccaatatacagcaaaaacgtaaccagatcattgaccgtgaccattccctttgcaatgagaacccctccggcaaggatgacatttacctgaatcagtgttgtaaaaacgccaaccccggcctgaaaactgcccatgtaatgataactgttcttctttgccgcaagaaatccgtcatttccatgacgaaatttttcgttttcaatcgcctcattggcaaacgatttcaccacacggatgcctgacagattatcctcgatctgttcattaatctcggcaattttaatacggttctgctgaaaagcccggcgcatccgcttatttaacacaaatgcaaatacaaacataaccggaagcactgcaaacgcggcaagcgcaagccatccattaatgttgagcaggatcacaaacgctcccactatctttaataccgacaggataatattctccgggccatggtgcagcagttctgtaatatcaaataaatctgccgtcacacggctcatcagctgtccgacttttgcatcatcataaaaggaaaaagacagcttctgcagatgcccaaacaattcggcccgcatgtcatattccatttttgcccccatcacatgtccataatttccgataaaaaaccggctgtaacagtccaatgccagaagcacaaacaatccgatgccaatcaaaaaaaagtttccgcaacatcatctgaggctgctgataaatcagagtcgatgtcacataccgcacaaccagtggaatagtcagtgccactgccgcagaaagtgtcgcaaataacatgtctgccgcaaaaactgcccggtagggtttgtaatagcttatcatttttttcagattttgattcatggttcacctcatcctgatcatttctgcaaaaaagcaccccgcgagttgtcccgcggggttaaatacattagttgtattttctttttctagcagcttcagatttcttcttacgctttacgcttggcttctcgtaatgctctctcttacgaatctcctgctggataccagccttcgcacagtttctcttgaaacggcgtaatgcgctatctaaagtctcattctcttttacgattacactagacattctttcctaacctccctccagttgcgatattgtgcatcaactgtaaggtaatcttaattgcactatcgattattttaacaaaatatcctgatttgtcaatagtttttccgaaatttgcatagtttttttcttccacatgcttaaagctttgtaaacacggaagtttctttcttcaatccctctgcaatcgcaaagttctcatccatcttcttggaaattttatccatatcggatacaagaacctgtgtgctgtccgctgctgaaacgactccactgacaccttcctcgatcgcatgggaaatcgtatttacggaatttgcaatctcatccatggaattctgtaaagaatccgtctttgcctcgaaatctgccatgacaccttcgataaatgttgccttgtcatgatatgcgccaccggattccacaaatttctggaattccggcaggattttttcattcatgtactctaccagtccatttgcattgtctgcaagattatgtactgcagttatgacaatggcattgatgctctggatattgttagccgcttcctgactggcggctgccagctggctgatttcggaggcaaccactgcaaatccttttcctgcatccccggcacgggcagcctcaatggatgcgtttaatgccagcaggtttgtctggcttgcaatatttaagatgtcgtttgtcagattgtctacctgattgacactgttgctgtcctcaattgcctgactcagcacggaaacaatgtcatttactttcgcacccgttgtatccatattttcacgcgcagcatgttccattgcctctgcatgctctttcatttctttggtatactgattgatttcaatcgttttctctgcaattgacttgacttcaccggcaaccgattcggtattttcattaatccgtgaagcattgtcggaaatatcctgcatcgttgcagaaagttcttccgtcagtgcggacagatcggatacacttccgttggaagtctgcacactctcacgcacttcatttacaacaccctcaagatccctggaattgctgctgatcatccggaaaatttcctgcagctttgccataaaagcattgatgcctccaccgacagatgccacttctttgttgttggtaatggtaaccctgcgggtcaggtcaccctgccggttatcaatttcggaaataatctcattcatttccctgttcgtatttgcaagcggataaattacccaccgaagcactgccaccattgctgaaaaaagtgccgcaatactaatcagaatcgtcactatgcttgttcctattgaactatggtatgcagatgtcagtttctgtctctgtgcatttgcatcctgatttacaattttcttgatactttcgatatccgactcaatggcatctgcacacttgctgatctttccattggcaagttcataggcatcttcacttttccctgctgcggaaaatgccataacattggcacattcatactttaattcttcgtaattttttttgatatcattgtattcttttttggtatccggtgtcacgtatatcttgtaactttccagatctttctccaatgcatcttcctgactgcggattttttccaccagctggatcatggaatccagatccaccgctatgatatgggacagacccagattatggatgtcctgcgtctgtttctggatttctgccagacccgaaacattctttaaagatacttccgaaatctgtacggcactccggttaacgttcctgatattggaaacagacatcacgttcgagatgatactgaatattccaagtataaataccggaattaaaatgataagtttggtacttaatttctttttctgattcatatgctcccacctcttagcctgctactgattttgtaataccattgaccagattatccatcagttcctgtaactttacgtggtttggatttcctgctgccatcgtattcccgaattccttgcttgcatcccagtaactgtttccgacacgctgcagttttccgaattccgactgtgcaatcactgcctgaatggatggagaagccttaaccgcatccgaatccgctgcctttgtattggaaggtccctgtccgttcatctcaaaccggacagtctggttctgctcattggtcaaccagtctgccagttttgctgcccactgtggatttgccgaataagcactgactcccatcagcttatagccggtaaaggaagccatctgtacctgttttcctgccacggtataggtcggaagcttggctgcgccaatatcatttccccagatctttttcagttcggtctcactccatacaccgcttacccctgcaattacactgcctttttttgcacctttaataaaatcttcattcaccgcattttcaaatccactactggaactgatatcaagcatcgcctgcgcaatatccacgcctttgatatccccttcggtggaattccattcacagtggtttgtcacattgtcatcattgataccgaaatccagtcctgtatttccgaaaaacgaatacagataccagccggaagaccagtccatcataaacttcttatgatttttttctgctacttttaaaatgccgtcaagggttttgacatccgaatcactcaggtactttttgttataatacaaaaaatacccattgtctgcagtcatgggatatgcataaagcgtatcatcgactgtggcagcgtctattgcgccctccacatttgcttttttcacttcgtctgcattcggaaccggatacaatgcaccaccggccaccatagaagccacctggtcatctgcaagaataaacacatcagctgcattatgcacatctccaagcacattgtcacgcgtatcggaatccgcattctgttccagggtgatatcaaaagttgcctgacccttatactcttccttgaaactgtcgatcatcttattcaacgcatcaaacgttgattcctccgcccacactctcagctttaccgttccgctcgtcctgtccgtctcctgtgcactgccctgcgtggtctccgttgcaccctgaggtaccgccgaagcgcagccgcccagcatggacacggcaaagattcctgccagcacggctgacaataacctctttctcttcataaagtctctccctttcttcatgtcgtttccaccttttgttgtatatacacaaatttcacagtggatttactgttattatactataaatatttgcaaaaaacaggtaaaatcgcatttttattgcgcattttcacctgttttttgcgtttttattatattcttttatacgttatcagtgatagattatttcaacatgttttccagtgccgtcttcgcctgtgcaattgcatccggaataccagccggattctttccaccggcctgtgccatattcggacgtccgccaccgccaccgccgacgtttccggcgatcgccttgatcagattaccggcatgtgccccctgcttcatcgctgcatcggttgccatggcaatcaggtttacctttccgtcacaatcggatgcgatcactacgacgccctcaccgatcttgtccttcagctggtcaccgagatcacgcagaccattcatatccacaccggatacgctggttgccagaagcttcacacctttgacatcctcgatctgattcatcacatccccaagtgcatccttggctgccctgctctttaacgcctcgttctcgctctgcagatctttcatctctgcggtcagatgctccagacgttccttaaggtttgcaggtgtggattttacaaccttcgctgcttcccggaactcttcttccatctttttgtaatatgcaatcacattgtcaccggtcagtgcttcgatacggcgcacaccagctgcaacaccgctctcagaaagaatcttaaatgtcttgatctctgcagtattctttacatgtgtaccgccacagaactccctggagaactctcccatggaaacgacacggactttttccccatacttttcgccaaacagagccattgccccggtcttctttgcctcatcaacggtcatgatatcggtacggacttccatgccctcgttgatcttttcattgaccatgtcttccactttctgcaactcttccggagtcatggctgcaaagtgggtgaaatcgaatctggtacgttcactgtcctgataagaccccgcctgctcgacatgtgtacccagcacttcacggagtgctttctgcagtaaatgggttgccgaatggtttgcacaggtctttgcgcgaagttttgcgtctacaaccagttccacttcctcgccggtatggatcatgccggacaccatatgcccgatatgtccgtatttaccgcccagaagcttaaccgtatcctctacctgaaatacgccgtctgcggtacggatctgtcccttatcgccctgctggccgcccatcgtggcataaaacggagtcttctctacgataatggttcctgcatccccatcggaaagtgcttccacgatctcggtctcggtcgtcataaccgtaactttagaagcatatgtcagattctcgtatccgacaaattctgttgtgatggaaggatcaatctgctcgtaaaccgttgcatccgcacccatgtagtttgtcactttacgggcacttctggctttctgcctctgttcttccatacaggccttaaactcgtcctcattataggaaaagcccttttcttcaaggatttcttcggtcagatctaccgggaatccgtaagtatcgtaaagtttgaatgtatcggcaccggaaagttcctttttgccgtttttcttcatctcctccatcaggtcagacaaaatggcaagtccctgatcgatggtcttattgaatttctcttcttcctgtgtcagaaccttaaagataaattctttcttctcttccagttccggatatccatccttgctctcattgatgacagtttctgataattttgcaagaaacagtccgtcaattccaagcatctttccgtgacgtgccgcacgacggatcagacggcgcagaacgtagcctcttccttcattgcttggcataacaccatcggatacaagaaatgtggaagaacggatatgatccgtaatcagacggatggatacgtcatccatggcatctacttcatacttctttccggacatctcacaaatcttgtcgcggatcgctttcatggtatcaatatcaaatacggaatccacatcctgcataacaactgccagacgctcaagtcccataccggtatcaatatttttctgggaaagctcggtataaccgcccttgccgtccccttcaaactgtgtaaacacgttgttccatacttccatgaaacggtcacaatcacagcctactttacaatccggacttccgcatccgtatttttcgcctctatcatagtaaatttcagaacacggaccacatggaccggcaccatgctcccagaagttgtcgcattctccggtctcaggatcacggtaaaaacgtgtgatcttctctcccggaacccctacttccctggtccagatctcatacgcttcctcatcttctccataaatggacggatacagacgatcctcctcaagcccaagtacctttgtcaggaattcccatgaccaggcaatcgcttcatgcttaaaataatccccaaaagagaagtttccaagcatctcaaagaatgtaaggtgacgcgcagtctttcctacattttcaatatctccggtacgcacacacttctgacatgtagtcacacgtctgcgtggcggaatctcctgtcctgtaaaatacggcttgagcggtgccattcccgcattgatgagtaataagctgttgtcattgtgtggtactaatgaaaagctcttcatgacaagatgtcccttgctctcgaagaagtcaagatacatccggcgcagctcatttacgccataactctttttcattaccagttcctccaaaatcattctttcgtcgtgtcagccttcgcatccttgtgcctgcggagtctgataccaataaatgcccctaatccgccgatcaaagccaaagcagccatctcgaccacatatctgccaatacataaaagaaaatctgtcatatagttttctcctctctgttgttaccccattaacttaattattatatatgaatttttctgtaaattcaagagttagagttccccgaacggaaatacctgattctccctttcaatttcaattacgcggtctgccattccaagatttgtaatgtgttttttgtattccctgattgcagaataatcctgccacatatgcatcgggaaaacaaattctgcatcggtgtttttcagcacaaaatcaattccgagtgtctgatacggtcccagccgcggatccatcgggacaaacgcaaaattgaccggcttgtccgcaagcttacggatctcgtgccggaatgcacgctcctgttttccgtttataagctctcctacgtgttccatcttccagtcgtttaaatctcctgcatggaagatgctcaccccacgcacattcacataaaatgccactcctgcatcggtagacaacagggtctggatctttagatcatccacttcataatggttgtttgcggagacaaacgtcacttttttccgcacccccgggtcaattccatgcttttgcagaaaatgcggactgatgcggatatccttggataaaatataatgtatattggtatatttttcactccagcgcagaatatccatgtcaaaatgatcctgatgtttgtggctggcaaacatatagatttttgtatccggtgcgtaatccggaatctttcccgtaaagtggaaaccattcacccgatccccgccaaaataatcaaaaatcaataccagatcatccacttccaccagaaaacagctgtgatgtataaaaattacctgcatgttgttccaatctcctttatcatctgtgttacaagcttttgaaataccggagccaccgcatcggctgcttcctgcacctccttatgtgacaatggctgtggcgaaatgccgcatgccagattcgagatacaggaaattcccacaatccgcatccccatatgattcgccgccacagcctcacatgccgtactcattcctacggcatccgctccgagtgtacgcgccattgccacctcctgtggagattcataggccggcccggtaaactgcagatacgttccctcttttaaatccgccccggtctctgccgcacatttttttgcgattttctgtaaatcataatcataaatccggctcatatccggaaaccgcggtcccagttcctctatattttctccaatgagcggcgacggaacaaaacttgcaatctgcccggtaagaagcatcagatcccccgccttcatgcccagctggattccgcccgctgcatttgtcaaaaacagaacttctgcccccagaagtttcatcagccggatcggccgtaccacttccgtcatggaatatccttcataataatgcacacgtccctgcatgcacacaaccggcacatccccgacataaccaaacacaaagcgcccggtatggcccggcaccgtagataccggaaatccctcgatctcatgataatccaccgcggcctccacgcgaagctgcgacgcataatcacccagaccggaccccagtaccagtgccactttcggcacaaaatctgttttcgtcctcacgctgcgcacacagcgcatgagagtttcatattcgttgctcatttgttctccttatttttttgcaattacatacagaatttcattaactaatagtataacagaatcaaaaataaaataaaacaagagcaactgaaattcatactttttttctcttaaataatgatgcagatcattcccccattgctgtcattgacaattttctgcatggtatcctgcagtttcagctggcactcatcatccatctgcaggatcttgctgcggatgccgtcttccatcagttccccgaccgattttccgaaaatatttgtggtccagattccttccttgctctcctccccctcgcggatatatgcaatcagatcatttgcctgttcctcactgccgacaatcggtgctatttcggtctcaatgtctgccttgatcatatgaatggacggggaaattgcccgcattttcacgccatattttccggcatgctggatcagcaccggatcttccatccggatatccgaaagccccggcatgaccactccataccccttctgttccacagctgccatggcatcttccacacgctcgtattcttttttcatccgggagagggaacgcagcatggaaatcatctgatattccccttcgatctgcattcccgtcatctcactgatgtaggagaaatagcactgttccgttgtctccatacggatcgtcacggttccgttggaaagatctgccgtctgcagctggatgtcacgaaagacttcctctgccatctgctcatttgcactttttacccattcctgcccggcaagcacagccgctgcatcccgcacgcggccgattccatccatcagtcttgatgccgtctgaatcatggctgcctttaatttatgttccattggaagcatttccgtccacttcggaattgcaaagtccacacgggtaaccggaaattcaaacagaatcgccttcataactgtgaccagatcctcccggtgcatctgctgacagttgaccggaaccactaccgcctgatattcctgctctaaactttctttcagtgcaagtgtctcactgctgtatgggcgcacggaatttaaaacaatcacatacggttttccaatctctttaagcttttccaccgcggtttgttctgcctccacataattttcccgcggaagttccccgatactgccatccgttgtcaccacaataccaatggttgcatggtctttgattactttttctgttccaattctcgctgcatccgaaaaaggaatttcctcctcgaaccacggcgtatgtaccatgcggtatccgtccccctccagatgaccatttgctccctctaccataaacccgacacagtcaatcagacgcacactgacactgctctcatctgcaagtgtgatctctgctgcctcctgcggaataaatttcggttctgtcgtcatgatcgttttcccggcggctgactgaggcagttcatcgagcgtccgttttttttcttcctcatcttcgatgtacggaagtacaaacagatccataaaccgcttaatgaacgttgactttccggtgcggaccggtcctacgacaccaatgtagatttcgccgttcgttcttttctggatatctttatataaatcaaactccataaaaaaatctcccttctttgcatattcgattaatctatctaatctatatgcaaaggggagaattcttattcacagaaatactctgttgtatatttatttctcagatgacttctttttgtcggaagtcttcttctttgcagcttctttctctgctgcttccttctctgctgctttctttgcctgctcagcaagcactttttcattgatgcgtccatacatctgcatgtatttatagagtttctttgccagatccttggtaatctgtccctccagggcacgccacttccagttttctccaagtgtggacggaatgttgatgcgggcttcggagccaagtccgatcagatcctgcatcggaacaatcgccatatctgcaacggaagaccatgcggcacgcatcataccccagttataaccttcctcctccgtcaggttcaggtattcgattgcaaacttgacagatgctttcggtgcggtcttcatccatcccatcacggtatcattatcatgtgttcctgtatacacaacacagtgactggtataggtgtgtggcagataatcacttccctcacggctgtcaaacgcaaactggatgactttcatgcctgggaatccggaatcctttaaaagtttgcggacggaatctgtcaaaaatccaagatcttccacaatgatcggaagcttgccaagtttcttctccagctggttaaacagatccattcccggaccctgtttccattttccgttctttgcagtcttatcttttgccgggattgcataataagaatcaaatccgcggaaatgatcgatgcggataatatcatacagctcgctcatcgctttgattcgtttggtccaccatgcatagttatcttttttcatttcatcccagcggaacagcggattgccccagagctgtccatctgccgaaaatccatctggcggacatcctgccacttcaatcggatttaaatcttcatccagataaaactgtttcggatttgcccatacatccgcactgtctccggccacatagatcggcacatccccgataatctcgattccgttttcattggcatatgcctttaactctctccactgtttaaagaacagatactgaagcatcttataaaactcaatatcttctgcgtacttttttcttgcctcatccagtgccgctgcgtcacgcacacgaagtttctcatcccactcggcccatgcttttccgtcatttgcatcttttaatgccataaacagtgtataatcttccagccagtccttttccgtctcacaaaatgccgaaaaatcttccggcatattttttacaaaacgggcatatgctttatgcagcaatgcatagcgtgatacatacatggttccataatcaatgtattcctcgcttgtgccccagtcaaatgattcacattcctttttctttaataaattttccttgcagagaatgtccagatcaataaaataaggatttcccgcaaaactggaaaaagactgatacggcgaatccccgtaactggtcggacagatcggcagaatctgccagtaagtctgacctccttttaccagaaaatctacaaattttctggctgattttcccatagttccaatgccataaggtgatggcaatgaagatatcggcataagtacgccacttgttctcataagtgattcctcctaagatccaatctatattttatatcataccacctttttgtccccttgtaaaaaacatttttcaatgctagtatgaagaaaagggattatgaggtgaagaattatgaacgatgtcataaaacataaaatcaaacacaatgcacaccgtacactggtgtcgatcaaatgggtaatttttgcaattattgtcggcggtatcgtcggactgtgcggcaccgcattttatttttgtctgacatttgtcaccgtgctgcgcgggcaggatccctggcttttatatctgctccctgtcgggggactgatcattgtcggtgcttatcacctgctgcacgatgaaaaagataccggaaccaatctggtcatctctgccatccactcggatgacgagctgcccctgcgcatggctccgttgatctttatttccacactgatcacgcacctgttcggcggatctgccggccgtgaaggtgctgccctgcagatgggcggaagtatcggaaacgcaatcggaaaattcttccgttttgacgataaagataaacatgtcatgatcatgtgcggcatgagtgctgcgttttccgctctctttggtaccccgatggccgctgccatccttccaatggaaattgtaagtgtcggcgtcatgtactataccgcccttgttccatgtgtgatcagttctcttgtcgcacacggagttgcttacctgtttggtgtttccaaccaatggttttccatcgagcacatcccggactttggcattcttcctgccgtgcagatttccatccttgccgtgctctgcgcactggtaagtattgttttttgtattcttctgcacaaaagtgaagaaatttaccgcaaactgttccagaatccctacatccgcatctttgccggtggatgtattgttgtcattctgacgatgcttgtcggcaaccagaattacaacggtaccggtatcggcatcatccagatgtgcattgatggaacggtccgtccggaagccttcctgttaaagatgatctttaccgcactgactcttggtgccggttacaaaggcggagaaattgttccttcctttttcaccggcgcggcctttggctgcctgtttggaacgctgaccggcatatccccgacactttgtacggctgtcggcatgactgccgtattctgtggtgtcacaaactgtccgatcacttcactgttaatcagttttgaattgttcggttatgacggcatgccgtattttcttctggctgtcgctttcagctatatgctctccggatactttggtctgtaccggagccagaagattgtgtactccaaatacaaaaccagttacatcaacaagacaactcattaatcccaagaaccacacagccagtcgccggcaattccatgttcgaatgaaccgaaccgattggccgggttcctgcatgcaggtcatcaatatataacgtccatgtcctgtcatccggcagcaggagtgtttcttttctgccggatgcattgtatgccaccagaagtgtctcttccggctggcggattgtaaacgcgatggtctgttcggatgtcatttccataaacagaatattctggcggatctcctctgcgtctgtcatacgcaatcctttatgtgctttccggaaagcaatcagtcccctgtaatactgctgcaatcctttttgtccatcgctccagtcatagcgcagtacatttgtttcatacggcagattataactgttctcggatatctcaccattttttccggccggtttggttcgtgcaaactcttctccccccaagaaaaacggaactccctgtgcggtaaataccatcgcggccgccagacggttcattgcaaggcgttcgcctgcatcacaatccggtctggaaatctgcagtttatcccacaaggtcagattgtcgtgacaggaaacataattgatcactttctccggtgtatccgtccatgtgccgccggctgcataggtataagctgcataatctacctgtggatgccacacacctcctgttgcacagtaacgcaccgcaactttcattttttcctttccgctgacatagccgcagtctttgttataaaacacatgtccgcgcaccatgtcccggatatcatccgaaaacattccgatgccgtccagcatacgcgcgtttctcttcatggcacgcctaaattccggcatggttgaagtaccgcctgtccagccctctccatacagaatgatatatggattgatttcttttaacctgcggctgatctcattcatggtatcaatatcaagaacacccatcagatcaaaccggaacccatccacatgatattcccttgcccagtaacagacagattctacgatgtatttgcgcatcatcggctgctccgaagcaatttcattgccacaggcagatgcattggaatatctggttccgttcatccggtaataataatccggctcacatttctgcagacagctgtccagatcataggtgtgattgtacaccacatccatgatcactccgatgccctccctgtgaaaagccgcaatcatttctttcatttcccggatacgcacctccccatggaacggatctgttgaaaaagatccctccggtacgttataattcagcggatcgtatccccagttatactcccgcttctttggtgccgcctcatcaatacttgcaaaatcatacattggcatgatctgcacatgcgtaataccgagcgatttcagataatccagcccggtagcttctccctctttgtttttggttcccttttctgccagtcccagatactttcccggatattttaccccggaagagccatccgcggtactgtccaggacagaaatctcacagatcaccagatccgtacggtttgaaaaaaccggtccatgatcctccttaaaattctccggatcggtttcttttaggtccagcaccatactccgctgcccgttcacaccgacagctaccgaatatggatcctgtgactccacggtcttgccgcttctctccagacggtatgtataataaacatgccgcaaatctccgtctacccgaatcgtccaggttccctgtacatcccgtttcatcggaagtgtatccgacaggcagtccccgtctccttcccgatacagacacagtgttactgcatccgcagtcggagcccagagccggaacactgtatatttctttgtgtacacagcacccagatcatttccatcatatggaatcctttgctgcattccctctctcctccctgaaatatattattttcgcattttttcgtaattcattatattttaattttatgtatctgtaaattggaaaaatcactaagtttttttcaatattttgtgaaataagacgaagaaaagaggcattccatgttttatgccatgaaatgcctcttttttgttttccgtatcaggcaaacccttatgcgtttgttgcctgtaccattgcctcaagggttctgactgctgctcccgaatcgatcgtctttgctgcaagtgcaatgccatctgcaatactgtctgcctttttcccaatatacaaagcggctcctgcattcaaaagcacaatctccctctttggtccctgttcctttccggaaagaatatctctggtgatctgtgcgtttacggctccatccccaccctgcagttttgcgatttcacaccgctttaatccaaactgttccggtgtaattgtataggtggttacttttccgtccttaatttcagataccgtggtctcaccggtcagtgtgatctcatccatgttatcctctccgctgacaaccattccccgttctaccccgaggttcatcatggttcccgcaatcacttccgtaagtgccggggaatacacccctacaagcattaccctggcacgggatggattagaaagcggtcctaaaatattaaacaccgtgcggatgcccagctgttttctgaccggtcccacatacttcatggcaggattaaaatgcggtgcaaacataaatccgatcccgaccgtctccacacacttttctaccacagccggatctgcggaaatatttacgccaagtgcttctaacacatctccggcaccacttttagaagaaatggaacgattgccatgttttgccaccggaagccctgctgctgccacaacgaacgctgatgttgtggaaatattaaacgaataggtacagtctccgccggtaccgacaaaatctacataatcttctaccttcggactgatcgtatttgccttgttgcgcaatacggctgccagtcccgtaatctcatccagcgtttcccctttcatgcggagtgctgtcagaaaacatgcaatctgcgcctctgttgcctgtccggtcagaatcagctcctgtgctttcatcgcttcctcttttgtcagatcttttccctctaccagtttggccagaatctctttcatctatgatatcctcctgttttattcgcttttccgttacatttcatttaactcttttttgaatgtgctgcaatagtctgctgcagcctgcggatcaaaaccgtgttcccgcatcagtgtgataaaatgagagcctacaatggctccgtcaataatctctttcatcggacgtacatcctctgccgtgcggataccaaatcccatcataaccggaatttttgcctctttctttaccgctgtcagatattctaaaatctgacggtggaaggttgcttcctgtccggtaactcccatggaagacacacagtagacaaatccccgtgcatttttaaggatttttggcacacggtctttggataccggggaaaccagctggatcagaatggttccatcctctttctgtaactgtgtctggagttcttcctgctcttccagcggcagatccggaatgatcagtccatccaccccgcaggcattgcactcttttacaaatttttccacgccataatgcagtaccgtgttgtaatacatcataaatacaatcgggatctgcacaccatcgtcccgcatctctttcatacaggtaaatgtcttctccagatttgccccgccaagaattgcctcataggaagccgcctgaataaccggaccgtccgccaccggatcggaaaacggaattccaagttcaataatgtccgttcccgccgcttcctgtgctttgatgatcgcctttgtcttatcataatccggcagacctgctgtgatataagtaataaatgccttttctttcttttcctgtaacgcctgaagcgctgtctcaattcgattcatccctgttatgccctccttaattcagatatccttttccgtcaagataatccgcaatggtgtttacatctttatctccgcgaccggacagacagataatcatgctctggtccatggtcatttcttttgcctttttaaatgcataggcaacggcatgtgcactctcaattgccggaataattccctctaacttacacagttccatcagcgcatccattgcctccacatccgtaattgccacatattttgcacgtccggtatcccgcagatatgcatgctccggtccgactcccggataatccagtccggcggaaatggagtgtgccagctggatatttccatcggtatcctgcaacagatacgaacgcatgccatgcaatactccaggctctcccaaagccatggcgctggcatgttttccggtctcaattccaaggcccgctgcttccacaccgatcagttccacctccggctcatcaataaaatcggcaaacattccgatggaattggaaccgccgcccacacatgccataaccacatctggattctttccttctgcttccatgtgctgacgctttgcctcccggctgatcacactctgaaactctttcaccatcttcggatacggatacggtcctaccgcagatccgataatataaaacgtatcctccgctgttttggcccaggtacggatggcttcgtttgtcgcgtcttttaaggtattgcttccggattccacggataccacttttgcaccaagcatctccatacgcatcacattcagtttctgtctctggatatcttcttttcccatgtacaccgtacattccatatcaaacagtgctgctcccgttgcagtagctacaccatgctgtcctgcaccggtctccgcgattacctttgtctttcccatacgctttgccagaaggatctgaccgatcacattgttgatcttgtgggcaccggtatggtttaaatcttcacgctttaaataaatttttgtaccgtattttgcagacagacgctctgcatagtaaagaggtgtctctctgccgacatactgtttcagataataatgatactgcttcataaactccggatcatgaatggcctcctcatatgcctgatccagttcctgtaatgtattcatcagcgactctgccacatactgtccgccaaactgtccataatatgctttcttattcatctttctttcctttcttctgcttcctctttgacacatgttacaaattgttttatcaatgcttcttctttttgatctttttcttccactccggaacttacatccacgatatccgggtcaaacaaccggattccttcggcaacatttccggcatgtaaccctcctgccaggacaaattttcttccggcgaaaatccccgcctgccggtccatatgaagctgcttctgccagtcaaaactctgtccgccgccatagcctgcaccatccacgacaatcgctgtaattttctgttgcagttcttccggcagttcaaaaaagctctttgtttttgcctcaaactcttccggatctgagaggtttatggcataccagacaggaagttctgctgccgttatggcatcctctgacagctttccgtgcatctggatgatgtcaaatttcatctgctgcagcatctttatctgtgccgcatccggggaaacggttacggcaaccttttttatccgtggactgatttttttcatgatttcttctgcctgttgccggcttaaattccgcctgcttttctcataaaaaacaaatcctgcgtaatcggcccctgcatcatttacatactgcgcatccgcaggctttttcagtccacagatctttacttctggtctcatgcctgatacagctccttccatttttgtgcaagtgctttcggattttccgattccataaacgcacgcccgatcaaaaaggcatccaccccactgtctcgcaggaaccgcacgtcctcatctcccgtaatcccactttctgccacaaatactttatcttccggcacataagggcgaagccgtctggtatgttccaaagagatcgtaaaatccttaagattacggttattgaccccgatgattctcgggttgatcttcatcgcccgttccacctctgcctcatcatgtgtctcaaccagcacatcgagttcaagttctcttgccagctgataaaaatcatgcatctgtgcatcatccaaaattgccgtaatcaaaagtaccgcatccgctccgatcacttttgcctcataaaactgatactcacagatcataaaatctttccgtaaaatcggaagctgtgattttgcccggatttcctttaaatattctacatttccgtgaaaatgatcttcttctgtcagacacgaaatggcatccacagatgcattgtattccgcgatccgctccatcagatcaatcttgcttgtaattgttccaagacttggggatgctttcttaaattctccgataatagaaagtcccggtttctttaaatgattgtaaaagcaattggcttccctcgtctttgtctcctctgccatacgacgcatctgactttctgaaatgcgggccatatgttctggaagccgtctttttttgtctgctacaatttcttctaaaatcatatcgtatctcctaacacttttcgggaacatcggtccatataaagtttgccttcggcaaaggaccgacgctacatgttagatttccaaggaaatctaacacatatcatttacgaagttttctatgatgcgtttgccgtgttcggtataaatggattccggatggaactgtaatccgacaaccggatattccttatgacgcatagccatgatctcgccatcgtctgtccgtgccagcacccgcagacaatctggcagatctttttcctgtaccgcaagcgaatgataccttgccacacggatcggagaattgatcccggtaaatacactgcttccatcatgttcaatcaacgactgctttccatggaacaatgccttggcataggaaacggttcctcccagtgcctcaccgatgcactgatgccccagacagatgccaaggatcggtttttttcctgtaaattctttgacaacatccatgcagatgcctgcttccttcggattctttggtcccggtgaaagcacgatccgctctgggtccatcgccttaatttcttcaatggtaatcttgtcgtttcggacaactttgatatcggagttaaaaattccgatatactgatacaggttataagtaaaagaatcatagttatcaatcagcaaaatcataaattttcctcctctataagcgtcttggccagtgccattactttattgcagcactcctgatactcattttccggaacggaatctgcaactattcccgctccagcctgcaaatatacacggtttttctttttgatcattgtccggatcgtaatacagaaatccatatcaccggagaaatcaatgtatccggttgcgcctccgtagagtcctctgcgcacactctcaagttcatcgataatctccatcgcgcggatcttcggtgctccagaaagcgttcctgccggaaggaacgaagaaaccagatccagcggatgaaattctccttttttctttccttccaccatagatacgatgtgcattacatgggaataattctgtacttccataaactgtgtcaccttgacggttccaaattctgagatccgtcccatgtcatttctcgcaagatccaccagcatgacatgttcggcgcgttccttttcatcccggagcaattcatcccgaagcaatgcatcctcctcggcatccacacccctgcgccgggttccggcgatcggacaggtatacaccctgcttccctgctgctttacaatcatttccggggaacttccgatcacttcaaactctccataattgaaataatacagatacggggatggattcagttcccggagctctttatacagctcaaatccggtctgttttgtctcaatcgtccatctctgggaaagcacggtctggaaaatatgtccttcccggatatactgcttgatcttttcgactttttcgcaatactgttctaaggtatcggactggttgacaatcacaccgtcatgtgtaaaatttctgtccggtatctgtccggcattttttcttgcctcctcaatcagttctgctgcttctgctaatgctttcttttttccgtcttccgaatcttctccaagaatcactgcggtcagcgtctctgccacatgatccaccaggataaattttgtcatgagcatcatctggatggtctcgattccaatctcgtctggattgttatccggcagtacttccgcatagcggacaaaatcatatcccagatttccgaccagtcctccggaaaaagacagctcttcgttttcttttacgatatcaaactcgctgtaatattctttcagacgttcgagcggatttccctgccggatttcttccgtcccgttgttccgccggatcacgagtgcatccccgcgggaagtaatgatctcttccggttcttttccaaaaaacgtatatctgtcataatttttatcataactttccagaagaaatccttttttgtttcctaccagactctcatacatgccgatcgctgtttcatttacaatgctgactgtctttttgtatacccgtaatctccgcttcatattactgctccttttttccaaataaaaaacgtccctggtccgactgctgccggatcagggacgattatcctcgtggtgccacccttcttcgctccgtaactgaaaactaacaaaggcagccatccccgaaccggaaataactgccaccaattacgcaacctcttgtgatacagaaaacaaaatctctttgtctcgatatccatgcccctgtaacgtggggaaacggctcaactactcgccttacgctttcaccttgcatctaacgaatccattccatgacaaactatcctgccggctcacacctgccgccggctctctgaaaggaatcatctgctgtacttaccttcgctcaatgattttatttctctttaatttattaacagtttaatacactacagtgtgtctgtcaaccaaaattttaactttcaggaaaatttcattttaggatacaatcaccttgcggaattttatattttctttttcgctcttttcgtgtaaaatacattttacggcaatgtttattgcataacaacttaagaaaggacttatagctatgaaacaaaaaataggactgtttctttgtcttgccctgctccttaccggatgcagctaccagacaaagaccatccgtttcggtgcagccgacatcggtgggatgtattataccgttgcaaatgcttatgccggtctggcatccaaagaatcctccgacctaaaatttgaagttaaaaacaccgccggatctgcggcaaatctacggcttttgtccggaaattacattgatcttgggatcgcacaggcggatctggtccgggcagcccatgaaggaaccggcagtttttctgataacagacaacagggataccgtgccattgcaggactttataccgaagcctgccagatcgtcgtccgggcagattctgatatccggacattaaatgatctgcagggaaaaaccgtcagcatcggtgccagcgaatccggaaccgaacaaaacgctaccgaaattttaaaactgagtggtctgactgcgaaactggtgcacatggtgaatctggattatgcagatgccgccggaaaacttgcctccggtgaaattgatgccttattctgcaccgccggcatccgcaccgcagtcattgaagaactggcaaaggaatgtgatctgcggcttctttccatcgacgatacctgtctggaaaaactgcttgcaaccacaaaggaatacagcaaatatgtcattcctgcaaacacttacagtggacaggacgaagacgtgacaaccattggagtcaaagccgtactgcttgcctccgatgccctttccgaaaaaaccgtggaaaagcttacagaaattctgttttcccacgcacaggatctggcctatgccacatctttagacgctgcttttgacgagacagatgcatcctccggtgtaaccattcccttccatccgggtgctgctgcttattatgccgggcagggaatcagcgtcaatacaaaataacatatgaaagaaggacaactatggaaatacatttgaatatgtaccagacgctggcagtcgctgtactggtactcttgtttggcaactttttaagacaccgcattgggtttctggaaaaattctgtattccggcacctgtcattggcggtcttttgtttgcaattttgacctgtctttgttatgttaccggaattgcggaattttcttttgacgacacactccgggaagtatgcatggtatttttctttacctcggtcggttttcaggccaacttaaaagtgttaaaaagcggaggcacagccatggcagttttcctcggtcttgtcgttgcactgattatatgtcagaaccttcttgccgtgggattgtcccatgtcctgcacttaaatccgctgattggtatgtgtaccggctccatcccaatggtcggcggtcatggtacagccggagcattcggtcctgtcttagaagactttaatattcagggagccaccacgatctgtactgcagctgccacctttggtctgattgtcggcagtctggtcggcggtccgctcggcagacgcctgattgaaaaacagaacctgctgtccacggcagtcacggaagatgacagtctgctggttgaggacgaaaagaaacatgagcgccatacaaacatgtatccctctgccgtatttcagttaatccttgcaatcggtctgggaacaattttttcctattttctgaccaaaaccgggcttacctttccggtttacatcggtgccatgctggcagccgcattgatccgcaacattgccgaatactctggcaaagcaacgatccacatgggtgagatcaacgacctcggtggtatttgtctttccctctttttgggtatggcaatgatcaccttaaaactctgggaacttgctgccctggcacttccgcttgtgatcctgctgaccgcacaggtcttactgatctgtgtatttacttacttcatcgagtttaacattatgggacgggattacgatgctgccgtactggttgccggaacctgtggttttggtatgggtgccacaccaaacgccatggcaaacatgcaggccatctgtgaccgctatgtaccttccgtaaaagcgtatctcctgattcccctgatcggaagtttatttgcggattttatcaacagccttgtaattaccttttttatcaatattttgtaattgggaggacaacgaaaatgttttggaaaaaattaaagaaaaaggcaactgaaaagcataattacgatctgacctacgacaatgtagcgattccggaagtgcacacccacaaaccggaagatcacaaagaaactccgggtgaagatgccccggtgcactatgacaatgtagcgattccggaggtacatatccgcaggaaaaaataaaaggctccgcagaatcaaatccctgagggttccggttctgcggagtttttcttttcctgtcatttattttaaatgcagacgttcttcttttccctgaatctgcagcgtcaccgggcgttccacatgtacgcattctccctgttctaacgttcctatcacgttgtcttctttcagcagtaaaatcttctccggagaatcactgatcatccggtatgtctgtttcgaagggtcataggaaatctgacaatgtttccactcgaatgttttgtttcctgctgtattcttcttttttatggaagaatcctctttccggctgcgtttctttttcgactttctccgccggtgggattttttgcgcctccagccgtgtccggaccgcttcggattcttttccctttttatctgctcatttccctgtttttcgggtggacggtaccctcctgtaatccatcctgtcagtatgagtatccatgcgactccgtgcagcagggtaaagaaatatatccctgacaacagaaacggatacagtgccggaaacacagccaaaacaatcagcagttctgccagcaccagactggtaaacagcgttggcaacagcatcgtcttttttccttctgccagaaacaacattcccacagacaaaaaacaaagcagtaccgggagcagtgctgcaatggcacaaactgccagaagccgcatctgtcccactccctgtacataagaaagactgctttttaccgtaccaaccgtgaccggagcttttaaaacgaaagtatctgccactctgccttctgtcagatacgtataacctgcccttcctcctgctttcaccacatccagaccggacagcgtcatctcctgcccgcctgccgaaaacttacaaaacggcaatagcatggaaagtaatgccagaagaagtgctattactgctatatttttcaataaacgtccatacgttctcatgctcatttcctcccatcattcattttacattctgacaggctcattatagcacggaatcttttgtcttcttattaaatttcttttaaatttttgtgattcacaattgccacccagattcctggggctttcaacggcaccgaaaggatataggccagcacaacacgcagccccagagagatcaccgtaagtaccactgacatctgtgctttgttgattgcccggtaatatccgtacagcagaaacagacacccgattccacagtaaaacgagccctcgatacgcagatactgcacaccacacgcgatgaccgccgtctcctgtgccttcacaaaaatctccatcagagatgctgcaaacgtgcacaccagaatggaaataatgatactgaatacaatactgatcgcaaaggcttccttcgttcctttttggatccgtccgtaatctttcaccccataattctgtgcgacaaacgtagaatacgcattgccgaaatcctgtaccggaagatatgcaaatgtgtcaattttgaccgctgccgcaaatgccgccatcgttgttgccccgaaactgtttacaagcccctgcaccatcagaattccaaaattcatgaccgactgctgcatctcctccatgacttcctgtggcacacgtagaaaccacagaataggatgcatacacacatacaccagcacgttaacgaagaccatcactgccatgatgagcacaaaagcatgcgccacagctacccgcgcgcatgcttatcgtttttccctttataaatggaaaataagactcctgcccccatggaaagtcccagaaaaatcgaggtcaaaaagggcataagtgtataggcggaccccaccgccgcgagtgcattctttccaaccacgcgcccgacaatcagtgtatccgcaatattgtaaaactgttgcatcagattgcccgccatcatcggcagtgcaaataagataagattttttgatatttttccttttgttaaatcatagtacattcttttattccgtgatgatttccccaacactgctttccatttcgtccttttccagaagcatctgctgcgcccgcttatcctccgcgattgctgtcatgatacggttgatatcctccggacagaacatcgtaattgcctgtgacaggtcactgagattatcccggttgaccatcaggcatccgccaccttttaagctgatgttcagacacttgctacggtcggtgacatccccgagtgtaatccgatttctgtccgtatcacatacaaacgtaacccctttgtacgtgattgtaccgttttgtgccagatgctgatacggcgctttcttttcggttccgtctatatgctcccgaaaactgcttccgcgcgtttgtccgttttgtgtacccagtcctgctatttttccgtataatgtagtgtatcctgtctgtaatgctccaattgccatattctttttatcctccgtaagttacatcctgtttttcatgcttttcacctctggaaaataattcccgggtttgcatgtatttatacattttcccagcttttatttttgtaatgtatttatccagttccataccacaggcatatatatttttcgcccgagatatagcacaaaaaacaccagtatcaccgtaagtattctccgaagcggccagtaccaaggctgttttccaataaagcctttcagaatccagattcccattttcgcttcttttttctgattgcaccgcatacaggcagtacataagtttttcatatcattcgaaccgtgaattccaaacaatgcggctcttctacgcactgccggatactcctccatgcaatgaaccggaaaaatatggtcaatcgttattttatcttttgacttctttttcccacagtatgcacaccggtattttccggtaggtgatggatactttgcaaaaaaaaggctacggtaattgctgcttcgcgtatactgcgttggcactgcttcaaatgtaagattccttcttctgcaataacgctgcatatgatttttttcccatctggaacattcctttttttcataatatactctgctattttcccgcctgatacaggtatatttcttccaccatagccatattcggtatcgttttacatgcctcgttccatttttaattcttagtgtatatgtctgtaccaatgctgcagtttcctatccctttatctgattttcaggcctcttaaatacgcttttgtttcctgtggaattcttctgctttcgatcgccttctgaatggacttattatgtgtccatggctctaacaccctattttgtatgtagggaagcgtcgcatcatattgtttcaccaatgccatgctaaaataccaagccactgccatatttacataatattcctccgatcttacatttgcaaccagttgcagcatttctggctcaaatgcatcatccagataaaatcccagaagcgttacaatgccaaaccgaatggtatacaccgcatcactttgcagccacttttgtactctttcataaacataaggcaaatgcttcttaaaaatcttcggcgaaagcatatcacaagttgcccagttatctacatacggcaaaaaacgttctagctgttccataaaagctattatatcttttggataaagtaaggacaacaaagcaccatgcaaattattttcctcataatagatatgtggaaggctttctaaaaatatatttgcttccggcagctttgccacttcttttgcatacttccgtaataccggagtccggacgccaatgatgttatcgatcggaatatcgggaatcagtttggcatgaaatctacgatagttttcatcctttaatgcaaataaaccatctttaattgttttttcactcatatctcaatgcctccagtcatgttccctgtttcttttatacacgatttcacagatgatgtctatatccatgcagccaatcgatcacatgtatgtgttatgcccctgttccaaaacgtgctcccttccatcctttctaccctaatatagttcatatactttctttttgaaaataaacaatacagcgacaaacgtttcgcttgcaacaaaacggatctgcagaaatgtatcctgaccacttgcatccctgctgatcataacctgtcgaaatacaatggcaatgagagaagtaacgactgttgcaggaaccgatttccagatcataccaacgatgaacggccatagggataataccatgcatccaatcacagcagttattagcaaacatatctgcaaagtcattcgcattgatgtcccaatgatcctgaaaccatttcaccgcttcccatttatatttttccccctgccatctttcatcaaaaatcttcttatattccacaagcgcattttgcaatttctccagaaaaagactttttttgcagaaaataaataaaatttcaaattaaagagcttgcaatagtttttattcagaagttttcctttttaaagttggtgccaataaaacactttgtagttcaaaatttggcgttacatcatatgaaacatctgaaattatcccattataactgttgttttctaaaatagcgcttacgctcttctcttttgaacttccaacgctctctttttcaacatccggctctaaagtagcaacaacatctccattttcatcaaaaattaacgtacacttttttactggaggattcaaggtttgcattgtcgtttgaaattcagaactggaataatcagccagcatagcatacactttattttttaatgcactatctgtattcattctatataatacatctccaggaataaaacactcaaatctactatttgaaactcctacatttatcccaaatttattataaatttcttttactatattattaacttccgttgttcctaattgatcactaaacttagcattctctttaacttgtttttctgtaccattaacataattcatagatacattagataatgccaataaagtttctcctatcacaatactcataattcacctccatttttgtattatctctctttatccttctaaaataaaattcacaatatcatcaacttttttgaattgatatttatttataacatcagatgaaatttctttatgatattgattactaacctcatccaataaatataccaagtacatcctcctgaaagacattttccttaaattcaagccattctatatcgtatgagcataactattttatgattcttactgatctatccatttttcatcaacctttcagatttattgcccacccatattataacacaggtgggtaataaatttatctttattttgcactaattccactgtccgcatcctttcattttaaatgtactgtttttgatcaatttatttactaattcattccctaaaactggtcagatgaccactttctaggaacaaaaaatggacgaagcaaacttttttacatttacctcgtccgttaatgggttacaatattaacttttcttaccttagccctttaccagcacattatttccatcctgcatattatctgatgcataatgtactttgttctccgtaatcaattcttcgatgcactttctaaaagtctttgaagcattacctgaatatcccagtcttttatataactcatttgcagaaatgctttcttgttccagttcatttaatataagagtttttatctggtctttcgttcttcgctttggaacagcaacaatatctttcggttcggttttgctactgacagcttcctttttcaaaaatgcctcatgaatcggaataatcactgaaaagaaagaacgttcttcatccgtgagaagtaatggcagtggtgatccgttttcctttattgatttaattgctgttggaataccggtatttctaccttccacaagatgcagttcctttaagaaatcacctattcgtctattccgataccttcttgttctcatctgatatttactaatatcctcatcagaaatcgacctgtctggtcccggagaacttgttatttcaattttatcagcctctatgcgtactgtgacaggctcatgtatctggtacgatttgtgataaattgcattagaaagaaactcttcgattgcttcatagctataattttttactcttacagcctctgcttgtccgctaatcttaaataccttttcagcaatcacattgttttttatataattcagagcgtttcgtaactgatcgtctatcggtcctgtaaagatacgttcctccattccttgccctgttggatccggaatattaaccacctctatctgactatacgggaaaaacgactctggatgatcattgaaaaataaaattcccacattcagcggcttgtaatactccgacggtccgtctgctatccttaaatttcttgccaactgctctgtatccatagtgtcaatatcattcaacaagctactatccacattttgcagataattctttataattggatattttaagtccttcatctctgctttaggatttatcctatcatcaaacggaatattgtgagatagtgacattaactcttttacatctgtatcagtcgcctctattgtactggataacttccggatatagtatatcttttcgctgttctttgtatctggttccttaggacatgcgtacggtctttcgtatccaccaggacaccataccaaaagaagtaatttcccatcaaaataaacaggctcactctgaggaatgtacacaggtttaagatatttacagtatctaagcagatctttttgaatcctatctactgcatctggagcaatacctgttactggacgaacaagttttccatccttttctttcgctcctataacaatgtatccaccgccccagttatcaatatcattagcaaatgcactgattgtctttaaagtagtatctgggttccagccttccttaaactctattctcgcccattccacgacattttccgttaaaagtttttcaatagtaattggaattgccatattttttctccaatgcttcttacgatttgcttacgactaagcttacgacttaattataaagtcgtaagcaagtcgcgtcaattatattgttccacttttttagaaaacatcatcctcactcgcaaaattgtttatcttgcttctgttttctgtctttcaataaccttcttaacaaaccattgtaccgcaatcctggctgcgtccgctccatccctgataccaacacttgctctcgcataccctaagatttctcctgacctgctatagccgcgtcctctaagcttagcttcgtgccagatctgtcttattccgttttcgtcaagtgcttttaaatctgccggaaatggtgcagatttcaacaattccaaactgaatgcaccatctaccttaccaagcgcatccttatattctgggaaataaatcttcatttccctgtgcatacggttaattgcccggattctgtcctcattcagctgatctctgaacatagataacctgcgaagctccgcataaagcttctccggaaggtacggcatcatggataatcttctccatctgtgttgctaacgtgacaggaagatcatccgtttctgcccaccctaatgatgttgttaaattcccctgtggatcagcgtccaccagaagaacccttttcccttgatttgcaagtcctatccctaaattgaccgtagtggtagtcttgcctgttcctcctttctgattggcaatagcaatcactttacattttgacatctcggtctacctcctctcttgaaaaatttatagccactcctttgtgtggaatggctatgtactaaaaatgggcatgaaaaaagccgaatgattctcttctttttctcaaactcgtatgtttctttttaattcacttatatccccgtaattatcaataattaccagtccatttctttagctattctacttctctcatcttccaccattggaactaattcttccaatgcatcatgtaattccctgtgattatctttcgaatcatatgtgattatttctaaatttcgattttcctttactattcttttatactcagtattaattccatctttagaagtaataaaataatggcagggactacccggaaatacaaatgaataattttctaagactaattgtatatccggatcagaaaaaccgcaacctataaatataaacgtatgcgtaagagaaagagcctccaacagtctataaaaagctgcattttgatatctagcatttgtatactgacttctcgtaaaaatcatttttgaactttcatcaagagttccatgaatttttaaaataatccgttcttctgattttatcttattaaccaaatctgaatcataatatttcttcactaaaattgttcctgctgtttctgcctgcgcatatacttcatatattttatctacattcggtgtaatcacaatttttgaatctaatttcagaatattttcatgtattctatgacttttgtatttaggtgtcagaaattcttctcttgcaatgcgttcgaacctttcatttcctatttgatttactagtacttcacatgctgttaaataatctttttcatttaacaactttcttacatattcaacgatattttcatctgtgacttcacttatgcccttattcaaaaactgttcccacgtaggagggcgtttatcgcctttttcgcttatagcatttgctgatacccccgcacctaaaaataaaactactttccgcttcgcaatcttctctataatatctactggccatttcattacattttctccaaattaatcatcatctgatttgtaatcttatccattactactttaaaatctttcacttttgcaaaatgagcacctacaataccatctgtactagttaattcgaacgctggtctatgcgctgactgagacagtgggataatactattaaaattcggtatagttcctaattcataattgatctcattacctttatttttttcattaactatatctataagttctctttttatggtcgtaggaacttctgataaaattctttcataagcctgtacaggtcttctaattccgtccactgttttactggtatattgctgtgtaacataacccaaaaattgtatatatgaaattggttcaaaaatattttttagttctgtatcagtacacctattaaatccttctttaaacgtatctctccaattttttattgtttttcctatattttcaatagccaaaatactaaaaatatcagaagacataggggtcacaaaataatcacacgataataagatagatctatttattgcccctaatgatggtcccatatcaaaaaacacataatcatagtcatcaaattgttttattaaattattaaatgtcaatgttgttctaattccacgttctccccctgataacgctgcgctccaatcagatgccaaagtatcttcaaaaagtgcaagtttcggatctcctgccaaaaaatcaaaaccgaacttctctaaattatatacttcaacgtttttaacataccctattccttgatttaccggttttatcacgtcataaattgtaaatccctttttgtcataatacacttttgagaacaaatcatccgtaaaacaataaatagtagaattgcattgtggatcagcatcaattaacatcactttttttcctgttctagcaatatatgcactcaaattacaagttaacgtggttttccctactcctcctttattattaaacattgctatcgctttcattttttctcctttcattaaccattcatttttaatctttattagtctatatttcatatcttctctatagaatctattaaactgctcattttttcttcacctcaccctattgctaattcttatcgttcaaaaaacaaatctcttactgcccaccttgtattggctaatcatattctcttattttgtccgtaacactctccattttgctttcttactattttatcacatttcatccgtataacacaacagcgccctgtcttttacgacagctagggatacgatctatctcccttctatgcagaaaataccgccctgtatttgcaagacggtatttccaaaaacaaaaaaggcacatggatttttatttccatgcaccttacgctattataaaatatttaattaaagcagtcttagtaactgcaccagctcatgtggctcctggtcttttgaagtggtttgtctggtatcaaactgtgaaaatctgttatcattatagtatttcaacagtttatcgtcattatttgcctcaaggaataccaccattcctccacccatatactgcatttcttcgataaccgaccatgccagttccagcatctctgctccggtaattctattgtttcgaccatcagcaaagtttttgccaagctgtgcaattaaatacgctgacattgtatatgtctgtgatttttcatccagctcacttattcgcagtaattttctttttactgtattgcttactgtttcacctctcacggtcaacggcttcaatgctatactaaaatagcctatcagttctccctcattattggaaaagaccagatatgtaacggactgattctttttggtaaactctattgcatttttcttcaaaaaatattcaacatccgggttctttggacatgaaaaatcggagagcaatctgacaagtgcaggctctccgacctcttcatcagttcctaaagctaaatactcacgaatgttaatcatcgtataattatttctgaccgacatccgctttcttccttttttccatgaattttctcaactctgcttctccttttatctgtctcgcagatactggagtgcgcaccgggcgattattggcagaattctctatcgcatcgacaaacatctctacctgcttctgaccggatatgataaaattcttcgtgatactagaagttgccatataaacacctcctttattagtatggctgttcttctgcctattactcaatgtaatttgcattcttttctatctttattctattatggaaatgtccgctttgcaacataaaacttatgaaatttatattactttcgtattacaaagctttcattaccttttattagcataataatcccaaataccattaagcattttccgatcaccatctgatacattcagatttagccttaaatctttccaatcacccgaatactgctgcgataatttctggttatccgactggatggcggataaaaatgcctgatatgccgaattttggataacccccttttctttagattttgcagtattctcctggttctcacctatgttctgttcatttgctgtctgtccacttcctttatggtaaactaccgatggggtaaaatcctgtaattctgaccagatttctgttgaagttgccataaaattactgtgattttcatatgcctgattcagcatatccagttctttttctttggttaattcctcaattttgcccgattctgtcacataatactccggctcataatcttgttccgcatatttttcttcaatgctgtttttcattttgttatatgcttctgccattctgtttacatgatgttcaaaggaatcagtttttacactctctgtatcttctttgacaaatatatccgtcacttccttctcaaaacggttctgataatccatagaactgacagaagataaatgtcgaaagctctcctgccctgttttggaaatggaaagtgtatctgtatactgtgtcattttcttttctaaatctgccggaacattttgctttgtatttttcctgctgttatgttcgattgcagaatatgtaatatttgtattattgtaaatcttcatagctgtttccttcccagataaataccattagactctaatatcaatcggcacataccttttaattgtgtctgtttgtaccatttctgctgcctctaaactatctgtagcaagctgctcctgcaaaacctcgtctggaagttcttccatattctccacagttttttccgtcatctgctctgtcatttcttcggttgtctccgaaagttcgtccatgatttcagacatcatgcccttgttttcctctgttccaagagcttcatccaccatttcttcctttcgttcttcttctgttttaggcttattcctctcagcagcttccgcaatcttttcgccatgttcttctgcctcgtccatgacatgaaacatctgtgaattattatactcctgatttgctgccgcaatttcatcctcataattatgaaacatttccaacttttcagagatttcttccaaactgtcagcctttcggtttttcaaattttctttttgtgcttcaaaaaaagccaccttattatcccgttcctgctgtcgctgcaatttttcctgtgtacttttcaacatattagaactattaaatctatttatcagtaaacctccaccggataaattgactgtaaaactcatctggttcctccttcccgacaaattaatacaaaagatttttcttcttgtcatttaggcttaacatactatacttccttatctatcttacttgacgttagagaagaattcgttttagaatatgtaccattgtttgtataagttgcgcttgcccggttcgcagcatttgatataccagttgctttctgggctgttttgcctgcaaaggaattgtaacctgtaaaaaccgttttcagtgaactgatatctgctttcttcaattcatcttcatccagctccaacttattcccctttcctatggtaatacctattttagaaagtaaatgactggttttgtctgtcatgcctgtcatccatgaagcatttctaaggacatcttttgtattggattctcctgcctccttaacaacgtcattataatcatcaataaaagatttcacttttttggtaattgcatcccagtcataatcctctacctctgtttcttccccggtcttttcatccttcttttttattttctttttttcccagagtgacgcatcgtttagtgcatctgctgattttttcagggaatccgcatttgttttcatcagtgtaagcttctgtgaagtatcgcctttacccgataatttttctgcatcctgctttgcataatatgctttcataagttttccatagcttccgtttttaatcgcagcataatcagaaagcatattggtgtttcctacggatgaactgtcggaagttcctccaaataatgcggaataatctacattgctgttatatttacttgtgtaatcactaaaactcttaatctctgacataataccattctcctttaccaactataaacgaatatcaatcggtgtatatgtcacctgtgtttcccctttgatatccgtattctttacgctgtctgtctcctctgccgcagcccccgcagattcctgtgttttctcggatttatcagtattgttctttgttgtagtgtcttctgtattgctgttctccgcttttgcagcttcttctactgatttatttgcatctgcaagtgtagacatctgtgctgctgtcgccgactgtgcctttgcctgcagctctgccagttcttcttccttcttctcagtatttccttttccggcatcctgtttgatttcagattcaagcacactggcacgtccctgtatctgtgttgccatacttccctgcacctttgcctgtttcatggaagaatctgcacagatcatcgcctgcatacttgcctgtgacaatccggtgtctttctttttagaagtgttacttgttccagccaccatatcatccatagatgacgaatttttactctgctgcttatttctctgctcgatctggtgctgtcttaactgctgattgagattgttaatctcctgctgtatctcctgacgctttttcatcttatcctctaatgacatttcttcattcgatgataaatcctgtagcttctgctgtgcatttgcaatctgattctgaatatttttacttacagaatcattcccctgtgtcattcccattgttcctgtctgcgtatttgtcccactaaatccattgattctcatcgtattgtcctccttgagcttaaattctgaaatccgtttcctaaaaaatctgtacaacatgatttctctttactgattttttcggcatatctttcttcacaataaacagcgatgttgtgaaccgccctttttttgttgtgaagcaaataaaaagcaccttgaaggtgctttttgtccttattctacctgtaacataatacttagaaccacttcctgattctcctgctctaaagatatatctcccatatacatccttgcaaccctccggatattatgcagtccaattccatgctccttcccagatttcgttgtttccggcagatcactgtccttataatttaactctccctcatatctgttctttatggttatcataaaaatactgtttttccgaaaagaagagatacagatataaggattttctccacttacattttccatgcaattatccagtgcattgtttaagatcacgcttaaatcaaatgcatttaatttcgtatcccccggataatgaaaatctgatataaaacgaatctgcttttcctttgcttctcttaacttttccatcagaatcacatcaatgacaggactccccgtttttatctcaggagatatttcattccactcctttttcaaatgctccatatattctgctgcatcatccatatgattctctgccacaagatgttccagcatctgtatatgattccccatgtcatgacgcaggctgcggatatcctgatacagcttttccacttccccgatatgctttttcatgtcactgacctgatttaataccagctcctgccctgtctgttcttcctgtgccaccttccagttttgaaacatcgttgtcataacaagaattgctatgatagagataaaataatgcacaaagcttaaagctccataaaatccataggtatctgtcaggctctttcctgtatctttttcataaatattcagataatattgcagaatgccatatcctgtaactcccacaagagaaggtatgataagcattaccagctctttgacgctcatttcatcatttttgtatacatatgctttattgatcagaccgattgcaactgcaaggaaaacgatacaaagcacaatatccagaattctcgttccagcataaagtacatattgcagccattgtcttcctgcaatcgtatttccaaaaaccagagcttttgtgataaaatcatccattctgcctgccattgcaaccgcaagccaacggatagaaaaaaatgtcactgcaagaaatattttctgataaatgtttcttctgtcctgtacatacatcacaagaaatgcagccacaactcccagcatatatgcagaaaaattgccaatctgctgcggtatcagatacagcacagacataattccaatataaacaatactgaccagagcagcttcccttttctttttcatatatggatatacaaaaacaccaaaacagattcctgtaataatcaaaattgcaataacagaaaacttcgatgtgatcatccagcatctttccactaaactcatctgacttcatttcctttcctctggttatacttcagatattgcttcacaaactccggataattcttttttgcaatcaatgcagttccatttttcatagttacacaagttgcatcatatttttctacatatttaaaatgtacaagataggctctgtgtgttcggaaaaaatctgttcctgccatatcacttaattcctgtaatttaccatagtattcaatatccgtacttcgtgtatggataataactttccggttatacacctcggcatacacaatatcacgcaggaaaatttttatatggcttccggcggtctgtaccatgatatacttttcgtccttttcaagtttgaaactcctttttatgttatggactgcctttgtcacaacctctttcaatttctcatcggaaaatggcttaaccagataatgaaatgctccgacatcaaatgcctgaaaaacatactcctctgctgctgtcacaaaaatgagtatcatatcctcattgtcatgacgaagcatctttgccgtttccatcccatccattcccggcatctgaatatccagaaaaagaatatccggcttactgccacttgcaatcagttcatcgcccgatagatatttctctataaccgcatctggcaatagcttttttattttttcctccagtatctgaaccatagatacttcatcatcgcagatagcaattcgcatattgtcacttccttgcttacatatatttatagctattatatcggataagttcatgcaatatctatctggaatgttgtgaaatgacctttttttgttgtgaaaagggcagcaaaccattattggttcactgccctgtcttttagtcatgtctgcaatattaaagatatgaaacaaactcattcattggtatacgctgggattcatgtctatttgcatctgctttatcttttaacttatcggaatactacttttatctagagttgtagtagtaatttatgaactcaatgctgctaccagcgacgaatatctttccgttttttatctactatttgctaaaacgcaatcaacaatctaaatttgcaaatcaatagtattgccttcattattattcttttcctttgatctctctgcggatatatctacctttattttgctataagaaacatttcctttcgctttttcgccatactcttccttcaaacgagctaactcatcattataaattgatgtaaacactcttgctcttgcaaattcttcatctgtacttatagctttccagtttcttgactctggattataagaaagcgttttattaccttttgaatcccaaaacatacatgcagcattcattttgccaccagtttttttcatgcttgattcatatatagcctttctatcaggagatactgtttctccatgctgcatacacaattttcgataagcatcatcatccctttttccagtagcaaactcttttcttgcaagttcttttattgcttcgtcaaattcttcctctgacatcgctggtttatctcgttttgtcatgatagtatcccagtttggtttggtaaaattaatgtccacaggcttaaatcttaatgagaaattaccataatcacattgtgctaacggatcatttgaacttgcttttttcccgaacatctgctgaaccatttgagcatattgcgaataattatctcttgttatctgcataatatattcctccatattggcatatatttcatctgttccaaattcactagattgaaaaatcaaaccttccaccgattttattctcctccggtttgatagaatcccagtcaatgtttttgatcttatccaaaagttcttcttttgaatttgcctgaaccgtagtttttcttacttcggtttgttttgactgttcctttttctttgcctctttcttctcagcagctttcttttcctgaa

SEQ ID NO: 1029 - DNA, 2107 bp, Unknown
  gut microbiota DNA sequence
aagattagataataccgttactccctgatactgaatttcagcaccataaccaccagtagttagaattggacaattcaatgttcctcctcccgccagtgcaaacttcttttcagcaaaattactgctttttccttctgtcttctccaaaaaatccaataatgatatttctccacatcctttgcatttcggattgccagtttgtttttttatagtatttttagcctgttcatataattgctttctatcaggtgcaacatctgatagatattctgcccgtaaaccaagaacctgtctggaaatatattcgtactctgtcttatttgctgtcgtagctgctcgtcgtgccagttctttaatttcactaacaaattccgcatgcgtttttgaacttttcccttttgttggaatataagaccaattcggttctccgttactgcatgaggaaattaattgctcttttccaacagttcctataactgacaatgatatacccattaactcaactccttgccgtcttatttttagatctttttggttaataaagcttacgccattgcaggctctttcttcttaataatcgcttcaacttcatcaacacctatttcagctacatctgcgatctgatccaatgtataaccctttttatacatattcagaataaacttttcgcttgttttttcagtagcctttttagttgctctttcagtagctctttcttcaattcctgtactcagattacacataattctcacatcctctctgaattcttgactgattggaatattatattcatgttctataatatccaatttttcctgttctttcaattcgcttgaaagtaatgctccaatcaaccggtgcatttcatatttttcatcatgttccggaatctcatttgtgattcctattctgactaatccttcattaatttcagcattttccgtattaaaacctacgatacgctgtcctgtagcatctgtttttccatatttgctaatcccggctcaaccggaacaacgctaatactcggttcgccttcgatatattttacaacatcttccggcttcattcctttaaattcatcgactgttttcaccagaatatgtgctaaaatacgctttttgacattctatattcttagtaatccaacacaactttccggcacgcttcacagattgccgctttaatatgcgttctgtgactcggctttaactctgtaatcttcacaaatccatccgcattttttgcattctcaaacactcccggaacttcatttgcgaaactgaacgcaccatctttgctgcaaaatagataaccatctctcatttcttttccacaatttggacacttcataatgctctccttttccgactgcacatagcgcaactccattattcaacgccggcaacctgttgactcaaccgcaatgtttctctcattttttcttcaaattcttctgcttttactaacgcaatcccttccgcctcatcaccgagtacaatcaaccgatccccactattcaggttaaaaatatctctggcagccttcggaatcacgatctgccctttgcttccgattgtcaccgtcccccacagatgctttcctggtggtgccggagccagtctggtatttcctactgtattttcctgatgaagcaatgcatcaatggtaatatcataaaattttgccagtcgatcacatttttcaatatccggaaccgtctctccctgttcccattttgcgtaggactgtctggaaataccgatcacttccgcaatctgttcctgcgacattcctttcatatttcgcaacagtatcagattttcagcaagcatgtctttcatctcctctgtgtgattctattatatttctcatttcgcacaatttctaccatacaaacttgtcatattattcttttttatgttaagtttagttgcattatcaaacgaaactcgcaatccactaagtttccaatttgtcgcatccgtctgcaaatcaaccaattttcgatacaacccgtttttcttcataagggtatcgtgcttacctgattctgccacaacacctttatccagcgtaagcgcatagttttagggcgtaccctata

SEQ ID NO: 1030 - DNA, 298 bp, Unknown
  gut microbiota DNA sequence
gtcaagaagtattttggtaagcgcatagttttagggcgtaccttataaatgaaatctgacaccccgcgctaggatgccagacatgcgagtatttcactacattttatttacaagtttcctgagccaatttactccacggggcaaattgttccaattcctcgtctgacatttcagcaccgggacgatgctccagaaggaagctcagatatttaagtggatcaagttcattggcttttgccgtttctatcatagaatagattttcatactggcatctgccccggctggtgtatcacagaa

SEQ ID NO: 1031 - DNA, 848 bp, Unknown
  gut microbiota DNA sequence
cctcctcatatcgcttgagtgctttctgataaatggaacttggcacaacgtatttatttccaacctcccgaattcttccatctctcagacagcacttcgttccattaataataaattcccggcttgtatccactcccatctcatgcagcatctccaaaaccatcggtgtacattcttcactgatcaaactagaaaaacattgctgatccgcaaaacgcataagtgcgttcatgccataccgcaactgttccattttttcatcatcttcctttgatcttccatacccttctccgtccatacaatcattttttaccgtaatacgatatccatttccaagatcaaacacatctcctaccgcaatattgatactgttatcggttggatcatatgctttcgatgtatgcgtccggtatggctgatgcaaatctgaaaacattttgatttctttatctgtataggtcaccggtctgtatgctgtaaaaacctttgtaccgttgatataaaaatttgaagtcacggtatcttcaatttctgcagtgatttcatactttcctgagtcatccttttgcacatttttcccaatatatccatcacgaaacaaccaaaaaagttcctgcagttcatacttattatttttatcaaatccatttaaatcttcaagcgtttcttctgaagaatcaccattaaaataatctacaaaattattttttgttccatcttttgttgacagctttcccgttgttgcatcatataaatatgtactgctggttccaattccacttacacccattcacctagcccctttcttgaattttatttaaaatgagagttcatttccaggatatggt

SEQ ID NO: 1032 - DNA, 11768 bp, Unknown
  gut microbiota DNA sequence
cgtatttcctcctcattccgttatattgtaacatctttatacatagaagataagacgggaaccttaaataaacttaaaacattcgtaagttttgccgttttacaggacaacatattttttacattgaatttacattagtctggttatgtattttacacagacccgataagatagcaactgtaatgaggaacaacatgaaagaaagaggagaaaatcatgaaaaacaaacttgtaaaaatgatggctttactgacagcaacaacaatggtcgctgcaggtgtgatgggatgtagttctgacagcagtgatgcaaacgctgatgcaaatacagatacaacggcatctgatacaactgcaaatgcagatacaacagatggatcggatctgagcggaaccgttacactggcaggaagtacttccatggagaaacttgcaaatgccatgaacgaagcattcatggagaaatatccgaatgtttccgcaaccgcagagtttacagggtccagtgcaggaatcgagtctcttacagccggcagcgttgatatcggagatgcttcccgtgccctttctgacgatgagaaaagccagggtatcgtagagaacattgtggcaattgatggtatcgcagttattacagatacagcaaacacaatcacagatattaagtctgaagatcttgcaaaagtatataccggagagattacaaactggaaagatctcggcggaccggatgagcagattgtagtcatcggccgtgaggcaggatctggtacaagagatgcatttgaggaactgatggatgtaaaggattcctgcaaatatgcacaggaacttgattctacaggtgctgttttagcaaaggttgcagcaactccgggagcagttggatatgtatctttagatgtgctggatgacaccgtaaatggattaaagatcaactctgtagagccgacagaagacaatattcttgcaggagactatgtattacagagaccgttcgtaatggctaccaagggtgagatttctgagcagagcaagcaggtacaggcatatttcgactttatcaactctgcagacggacagaatgttatcaagtctgtaggactgatcatcccaaacagcaaataatgtaaattaagaaacacgtaaacaggcaaacgaggataaagatatgacaggcggcaaagcaacaaagcacatcgtggaaacgattgcaaaagtaatatttcttatatgcgcagccgttgccatcgtagcagttctttccataacggtttatatgtttgcaaagggcaccccggcactggcaaaggtcggggtgatagacctgttatttggaactgtatggcagccgacagcagcaacaccatcctatggtattttatatattattctgacttctattgcaggtacagcagtggcaattctgatcggtgtaccgattggaattctgacagcagtatttatcacagaggtttccaataaaaagctggcagcgattgtacagccggcggtagagctgctggcagcaattccgtctgtaatatatggactgcttggacttatggttttaaatccactgatgtaccgtctggaaaagagggtgtttgcaggaagtacaacccatcagtttaccggtggttccaatctgctttctgcgattattgtactggcaatcatgattttgcctacggtaatcaatatcagtgtttcatccatccgtgcggtaccgggacatttaaaatccgcttcgcttgccctcggagcaacacatatccagacgatatttaaagttatgattccggcagcaagatccggtattatgacaggtgtggttcttggtatcggccgtgcgctcggagaagccatggcaatcaatatggttgccggaggttcggtaaatctgccgcttccgttcaactcggtacgtttcctgaccacacagattgtcagtgagatgagttatgcggaaggacttcaccgggaagtgctctttacggtaggattggtactgtttatctttataatgattatcaatctggtgcttgcgcaggtcgagaagaaaggagccgttgaaaaatgacaggaagtaatacaagtattcgcacgaaaaccaggcatccggcggatttctttacttatgttgccatctatgtgtgtgcaattctttccgttgcgctgcttctcggaatcattgtgtatgtatttgtcaaaggtatccggagcgttaactgggaattccttaccagtgtcacttcggtgttaaaaggaacaaccggtattgcgggaaatattgtaaatacgctttatatcataattgtaaccatgctgattgctaccccaatcggtgtcggggcagcggtttatctgaatgagtacgcaaaaccgggaaaactggtcagcatgattgagttcgcaaccgagacgctggcaggtattccgtccattatttttggtctgtttggtatgatgtttttcggacagacacttcatctgaaatattccatcctgacaggttcctttactctgacgctgatggtgcttccactgattacacgtaatacacaggaagcattaaaaacagttccggacagttaccgcagcggtgccatcggtctgggagccggaaagtggcatatgataaggactattttactgccgtcagcgatgccgggaatcatcaccggtgttattcttgccatcggacgaattgtcggtgagtcagcagcactgttgtttacagcgggaagctcgggcctcctcccgaagagctttgccgatctgtttgcaaaggcgaaaatgccggccggaactcttaccattcagctttacctgagcgcaacgaagggtgaattcggggtagcatttggtattgcagtagttcttttgctgattgttcttggaatcaacttacttaccaaagcattggcaaagaagtttgacgtcaatcgcagataacgatcatcttttcaaaatgtttttaaaaagcaggcgaatgttttcggctgcttttttgttgatataaaaaacggggcaaaatatgcatataatagatgaaaaaacggggcaaaatataaaaaataagttgtaaaaacggggcaaatgatgcacaatgttattggaggcgtgaatttatgtatagaaaagatgctattgttgttggagaatggataagaaattcaaataaagcactattagtaacaggggcaaggcagacaggaaaaacctggcttataagggatgagatagaaaagagcggatatacaaagtttgaattgaattttattgatcagccggatatggtttcttatctgaatgcggaaatgagtgcggaagaatttttaattaaattaaaaatgatcatgccagaagactgcaaagtacatgaaacggtcgtcttttttgacgaaattcaaaaatgtccggaaatagtaacaaaaataaaatttcttgtcgatgagggaagctttaaatatgtaatgagcggatcgttattgggagtggaactcaaaggaatcgcttcggctccggttgggtatctgaccgttttaaggatgtatcctatggatttcgaagaatttatggtcgcgaataacgtttcgacaactacattggatatgctggaggataaatttaaaacagtaagtcctatagaagaattcatacatcagaagcttctggcaatgttttttgtttatcttattgttggcggaatgccagatgcagtaaaaacatatatcgaaacaaaagatatccgggaggttgacagagtacaacgtgatatcacgactctttataaagaggatttttctcaatatgagcttgaggacagaaagcttaagctgaaatcgatatatgatattattccggcagagttagacaagcagaataaaaagtttgtatttacgatgctcaataaagaactaaaatttgagcgatatgaaaatagctttttatggctaaaagatgcaggcgtagctttgccggtttataatgttgatgcaccggtaattccccttttagcaagcaagagcagtaatgtgtttagacttttttcaagcgatattggcttacttacaagtgcctatccggcagaaacaaaaattgaattaataaataaaaacggggaagtgaacaatggtgcacattttgaaaatgcggttgcgcagcaattgacggcaaatggtttcgaaccgtttttctgtaaaaaaaagaatattggtgagatggattttgcaatagaaatgaatggaaaagttgttccgattgaagttaagtctggaaaaacatataaatcgcacaaagcattggataattttatgaaggtgccggattatcatcttgagaaagcatatgttttttctgttggaaatatcgaaacagaagggaatatcatatatcttccaatctacatgtgttatctgttgagagagcagaagctgggacaaatgattgtagagttagatacagaaggtttgtaaaagaacttttttatgggtttgctttttatggaaaaaagtttgaattgatggagaataaaaaaatggtgctggtacaatagaagtttgcgttgtatcagcactatttttatcattcaaatgatgtcaaagaatgatttgaaaagattatgaaacggtaccatttttactacatgaaatagtaacgctttgcgtaaaatcttttgatgaacttggagaagtatgtgttgctgttgcatatgcagtagcagagtttccgcttttggaagatgacacagatttaattgaccaagttgtagcaggagcagaggcatttggagaacagctaatgcagcgagaggttgtaccatcataggtaaaagtggcagtaatggaaacactctataatacggtcccggaagaatcacgcatatatgttgtttttgttttggtaatattatgggatgtccggcttaatgttggagctaaattaatagatggagatgcatcggttatgacagtttgtatagtgtatggtgttttgtggcaagtatcaaagatggtatcggctttcgttgaagttggaattgagcataataaaaatagaggagaaattaagcatagtgtaatttttcttttcatagaaatctttttctccttatttaatatctgtatttgtaaaatagacggtttcctgcttaaaaacttgaaaacttcgataatttgtaatggcaaaaacaaaagttatacatgcaaacataataattagtgttacaatgaaatatcgtaagtacttactcttgcgaattcgttttattaatgtctctgtaggaagtgttgaaatgtaagaatttacagtatctacaggtgtgccaaattcttgatataagtcatcaattgtctgaggtgaggtgtcatcacagaaatcttccagattacttgtcagagaagctaaataatttttttctgattttccaatagctggaagtaagagtttcacttcagaaatgtattgtttacataagctattcatgcgtgtctcctttctcaagagaatcaaaaattgcagacataccagaaatcatattttcatagtcgtgttgcaattcctttaaatatgcttctccatcagactctatatgataatagatacgggtacgttttttcccaacaagaacagaatattcactgatcatttgctcattttccaatttgtacatgaccgtatatatcgtatttggggaaatggagagcagttcgtttgactcgcttgtaatgtatttacttatctcataagcatagcaatcacctttgctttttaaaattgctaatactaaaaaatcggtaattcctgtaattagagtgtttttatatgccatgcaataagtcctccctgaataattaataccatatcataaaatatgcaaagtgtaaatattacgaagtacaaaataatgattgacaaaagaaaatgactatgatacgctacaaatacaatgatacatgtagaattgaaagataaaaattaggagagagaaaacatggaattcacagagatattcctataaaagaagcgtataatgctgttgtagtagaaatggaagatatttgatatattaaagagataagcatgtatcagaatcaatatcaaagtgttgtgatggcactgttctgatattgtcaaatttaagatacagtaacttttttatgttgaatatatgaggagagcgactatgaaaaagatatttctgacaactttattgatgattgtgtttctgctgaatggctgcgcgtcggacagtacagaaacacagatagaaagttatgacacacaggaaacattacaggtaaataaaaaagaattttcaaatcgtgccgggagtgattgtacgataaaagaatttaaattaccgttaccagaaaatgcagacattagttgtttctgttatagttcaccatatatttattatggaatatcatatacattttataaggaatcgatgttgacagtaggaaaagaatttgtgtattcggacgattatgcaacacaaataagaaggtacgatgtgcagacaaaaaaagatatacttctgtatcaatatgataattgtgttgaaatttcagatatacaatctgatggggatgctgttatatgggaagattatttaggtgaagatggaacatggagagttgtaaaacagtccaaaaacaaaaatgacatacaattattgttttctgcaaaagatacacaaagcacaatggatgcagtcactctgaaagaaaaagatggcagtgtatattggtatgacaggagtgaaaataatggaaagtatggtttatatcaatatgcagataaaaacatatctattctgaatgatgatatttctttggcatcgccatttcagcatgtcacattagatggtaacaaagccgtaaaaatatatactgatgcagatgagaagatacaaatacgagtaggcggaaaagacatcgatacaggaatacgcagcgtttctgatgtgcagataaatgatcagtatgtagtgtggcatgaggaaaatataataaacaaaatctatgtgtatgatcggaaggcaaagcaaatctacatgatagaaacagatgactttttttcttatggcatgctggaacatacattgattgtaaatggatctgctggagtattggcctatgatttggatcaggaaaccgatacagtgataaagccagccagtcaaaatacaaatatgtatttatacatttttcagggtcaggattgtttgtatacgcagagagtcgacgatcagagcgttattggtgttttagaatataatggagggacagatcgtaatagtacattgtctgatgggtggaatgtatccggcaatgcaattgtgtatgggggaaaaacaatctgtcagatttcggatgttgatgatgatgcagataccatagatttatctgcgcttgacagcaaaaaggcatttgtttcttatttttccaatgatggaaagatttctgtgatgagctgtacggcagatggacagcaaacgaagcttgcctcgctggaatataaatcgtatggtggaccgaatgctgtgtatcttaattttacaaatgataagcagggatatcttctatattgttccgatccgggagccggaatgatgaacaaagtattatggtcgacagacgatggtggaaatacttactcggttgtgaaagatttatctgctgccatacagaattatcctacggatatggcttttaaagacgcatcgacaggaatgattctggtaagcaatcatggagcagatgcatatgcgtatatgacagaagatgcaggaaagacatggaaaccgtatgagattgacacatttaagaaatgtaattatgtgaatggaatatccattgaaaaaaatgcagacagtacctggaatcttttactgcaaatcgctacagacgatggtctggattccgtgacctatacatcggatgatgagtggaaaacctggaaccgtaaggaaaaataatgagaataattcgaaaagcgagtgaacgattttactcgcttttttccttatgtgacagaaaaagcgaaagggtatccgcattttatcggttgagaacataaaaggattatagtacaatgaaggaaaatggcaggaacgtaaaggggggacgcagcatggcaagaaccgtagcgatcgggaaacaggattttgcatcgattatggaaaaccactatttttttgtggataaaacagagtttatcctggaatggtgggaatccggagatgatgtgacattaatcaccagaccgcgccgctttggaaaaactttaaacatgagcatggtaaactgttttttttcgaaccgctatgcgaaccggggagatctgtttgaaaatttatcaatctggcagtatgaaaactatcaaaagttacagggaacatatcctgttatttttttgagctttgcgtccattaaagcagacaatattgaggaaacgaagcgccagataaaagcacagattgcagcgttatatgaacaaaaccgttatctggtgaaaggtggagttttaagcaaaaacgagctgacgcagtatgaaaaaatgacgatggatatggatgatgcagaatgctccatttccataaatctgctttgcagctatctggaacggtactatggaaaaaaagtgattgttcttctggatgaatacgatacaccgatgcaggaagcgtacattcatggatactgggagcgttttacaggatttatcagaagttttctgaatgcgacatttaagacgaatgcctgcatggaacgtggaattatgactggaatcacaagagtttccaaggaatctatattttcagatctgaataatttgaatgtggtgacaacaacttctgatgattatcggttaagttttggttttacggaggaggaagtctttgcgtctttggcagagtatggtctggaagaaacaaaagatgaagtgaaaaaatggtatgatggatttgcattcggaggaagcaaagatatatataatccatggtccatcacgaattatctggataaaaaaagatttcaggcatattgggcggcaacaagtggaaatacactggtgaaccggttgattcggacggcatctgctgatatcaaagagaaaatggaagatctcttaaatcataaggaaatcgttgtttctttcgatgagcaaatcgtttttgatcagcttgattattcgccatcagcaatctggagtcttttggttgcaagtggatatctgaaggtggagaaggtagaatatcggggaatgcttcaaaaaatatggtatcatctgaccattaccaatctggaaacatttggcatgttttccgatatgtttgcagggtggtttgataactataatgccaactataatgcgtttatagaggcattcttacatggaaatctaaaagagatgaatgcatatatgaatgatgtggcacttgcaactttcagcagttttgacacaggcagtcatccttcggaagcggcgcagccggagcgtttttatcatggttttgtactgggcctgctggtagaacttcgggatcgttatcagcttaaatcaaaccgtgaaagtggttatggacgatatgatgttatgctgataccgaatcaaaagacggatattgcaatgatccttgaatttaaggtacatgattccagcgaagaaaaaacacttgaggatactgtagaagcagcattacgtcagattgaagaaaaaaagtacgatgcagagctgttcgcattgggaatagaagaaaaacaaattcgtcattatgggtttgcatttgaaggaaaaaaagtgcgcatagggagcaaagggaaatgaaatagttgcattttatataaatctttcttataatatacacagtttgtatatctgagagggagtgaaattatgaaactggaaagttccagtataaaaaaagcggatattcagatgtcggaagcgtttgtcacaagcgtttttctggcattgtccggaggttttcaggatgcatacacttattttacgaggcaggaagtattctcaaatgcacagactggaaacatcgtactgatgagcacgcacctgatgatgggagaatggcttgacgtgttgcgctatctgtttccacttctggcatttgccggaggagtgttttttgcggagcggattcatatgctgtttaagtatgcaaagcgcctgcactggcggcagggtgtgcttttaatggagatcgtgattttgtttgcggtcggattcatgccaaagcacttggatcttctggcaaccgtactcgtctcctttgcctgtgcgatgcaggtacagacgttccggaaagtcagcggatattcctatgccagcacaatgtgcatcggaaatcttcgtagcggaacagaagcatttaccggttatctgcagacccatgacacagaaaaattaaaaaaggcactgtattattttggcattattttatttttcggactcggggctggtattggaggaaatctctctatccggtttggatatcatatgatctgggtatcgagcggactgcttctgatcagttttctgctcatgtttgtggaaaagatggaccggtaaattcatcggaaagatatcggcgtggtctctatgccgataaaattcatgtaaaagataccattgtggtacctatataccgaaaatttaatatttagataccggaaagtctctatagatcaaaaattgctttttcaggtaccacttttataaaaaaagcggtatccggagaagcaatttttaccatataggtgacatgtccagatttctagcattaaaattttgagaaaacgtcaccttaggctttaatttttcatctatagataccgggccttatcatcaattaatttatcgggatgtctttcaattatattttcttcaaccaacaggaagaaatgtcccccttcttacgtcacttagagaaatcttatatttaaaacatcaacctgcaaatttagcgtgtcaagaaaacttacatccattacattgattttgcaaaaattttacattcccagtccagtgcattttacaatctctctttataatattcataaatcctaagaaatggataattgcagtgtgagaaaaccattgcagatgaggagagaaacatggaaaaacgaacaaaaattactgtccgtgatctgaacctgtattacggtgaaaaccatgcactcaaggatgtaaacatgaatattcgtgagaattgtgtgaccgcttttatcggaccgtccggatgtggaaaatcaacattcttaaaaaccatcaaccggatgaatgatctggtagatggtgtgagaatcacaggagaagtgaaactggatgatgaggatatctatgcagagggtgtagatacaaccgttcttcggaaaagaattggcatggtgtttcagcagccgaacccgtttccgatgagtatttatgacaacattgcatatggtccgcgtgtacatggaatgaaagataagtcaaaactggatgccatcgttgaagaaagtctgcgcggagcagctatttttgatgaggtcaaggatcgtttaaagaaatccgctctggggctttccggtggacagcagcagcgtatctgtattgcccgtgcacttgccgtacagcctgaggttctgttgatggatgagccgacatctgcactggacccgatttccacatcaaagattgaagaactgatggaggatctgaaaaagaaatacacggtagttgttgttacccat

SEQ ID NO: 1033 - DNA, 1888 bp, Unknown
  gut microbiota DNA sequence
tttggaggtttacacaaactttgggatgttcccgccagcttctttcgtttctcacctttaactttaaaatcaatctctgaaatcattgcacataccacctttctttttggtatgtacatatatcactccaaatgaataataaagcaagtcaattctgaaatacttttacacaaaacaccatattattcgcgcacaaatatctccccatatcctttaaaatcaagtctctccgacaaatacccgacaaaaaacaataccccctttgcaatttcgcgaaaatacgcgtgagaggggcatcggtcttccctaaaaaagagtgtagggatttgaattgcccctatttcctcattgattcttcaagccactgaaaagctgtgaattcatctatttcgattgccatttcaaccgccttctttgcacactctaaaagacgtttagatttattcattaattcaaacgaacacaaaataatctcatttaattctatttgagtgtcatatttaatatatggaataatcagttcacgcaatgtttcctgattcattctttgctgaacagatcctctcgacattctatttgtaagttcatttattattgaagagttaaaatatagtgcgtacacgtttggtatgtagtcatttggcaaatgaaaacaaagaacattatctgagcacacagaattatcaagttcttttgaaataactccaaaattacctatagttcctactctacctgtaactatatcaccttcacaaacaaatttactgtgcttttgtggatcaacactatgaaataaatctatttcaactattccgtcatatatatctgttcctcgcacataatggcataaccctttatcaaataacatatatttgtcagcatactcaccagtaaacaaatatattgccacatcatcgagcgtcttcgctttaggatcatattttaatatagtcgatataagtttatcatatttaggttggaaatattctgcatccatacgctctgcagataatatatctgtatatcttcttacagaaaatacttctgtttcaaatttacaaatatcaacccctaattccgaaagcaactttgtttctgctttcttatatttttcttctgcaagcttcttattttcaactgaagcaatatataaattttctacttctaattgaaatttttccgataaagaaggcacatgcatattagttattattggaagtgttatatgaggctgccctgtttgactagctgatctccacataagattctgtccatacttcgaatgtaaaaaagaccataaataatacttatttatcccattcaaatcatttgttcttaaaataataacatctctacaagtagcatagactggatattcattcgtaaccaatccaacttttgctaatgtatttccaccttttgcaataactaaatcccctgggtatgccttagaaatagttgtttgattatcatttagtaccttttctggcaaaaaaactgtatcatctgtaagaacaaccaagccattttgtatttcattaacccttataaaaggtattaatgatttatcgtcactataaaatcctgtaatcgatggataaaaagcactacaatctactttcccattatacgattctatagcccctccgttagtgctttttattaagtcttcaagcattagattactttttgaataatactctggatcaaatctgaacggttcatcaatcaccctactcagcataacattcgtacattccagcctctccaacaaattgttgaacacatcatcactggagaggcttgctaaaaagggagttcattctccggatgcattatttgattcagttcttcctctgttggtgcaaaactaagtttattatcatat

SEQ ID NO: 1034 - DNA, 18329 bp, Unknown
  gut microbiota DNA sequence
tccacaaaaagcagcaatgagagaaatgatgcgtgattatctgaagaataatgatatcagcatcaaagatggcaccgatgtaaacagtatcatgcgtgacatgatgtctgttcttctggaaggtgctttggatgaggaactggatgaagaattaggatattccaagtatgattatcgtaacaaagaaacagacaacagcagaaacggtcattccagcaaaactatgcacacaagctatggagatatggatgtagctattccaagagatcgtaacggtgagtatgagcctcagctaatcaaaaaatatcagaatactgtgactcaggacatggaagaaaaaatcctttccatgtatgcaaagggaatgactaccggagatatcgaatctcacatgcgggaactgtatgatattgatatttctgacagtaccatcagccggattacggataaaatccttccaattgtaaaagaatggcaggaacgtccgttggaagaagtgtacgctgtcgtatttatggatgctatccactatcatgtccgaagtgaaggacgtattgtaaaacgtgcagtctatattgctcttggcatcgatatgaacggaaaaaaggacgttcttggtatgtatgttggagaaaacgaaagcgccaagttctggctctccatcatgaatggactaaagaaccgcggagttgaagatatcctgatagcatgtgtggatggactaaatggatttccacaggcaattgaagctgtttatccaaaaacagaaatccagcagtgtattattcatcagatccgtaattcaacgaagtttgtttcatacaaagacatcaaaaaactaatggctgatctgaagcttgtatatgcagctccaacagaagaaacagctttaaatgagttagaattgtttaaagataaatgggattccaagtacccgaaaatctataaatcctggcatgataactgggcaaccctgtccacttatttcaaatatccggaggcagtaagacgcctgatttacaccacaaatgccattgaaggattcaatcgtcagctccggaaagtgactaaaagcaaaacggttttcccgtcggatgacagccttttgaaaatgctgtatctggcaactatggatatcacgaaaaaatggactggccatcggcaggactggggacagattcattcccagctggaaatctattttgaagagcgtctgatcggacgcaatctgtaaaaccagcttgttttgggcaggtcttattgacatgcccaaaaactcctgtataatgcagatatgggcagaacctagaaaatcagctctgcccatttgtaactattcacaaatcttatatcagtttttaacgtttacacaaaacttgaaacggtctcaagctggcttataaaatcataacatatcttccaacataaatccgacactcagctgcagacgcgtattcaactgggacagatccatatccagaatctcagagatacgcgtcaatttgtagttgatggtgttccggtgcacatacagttcatccgcagtttcttttacgcttccgttgtggttgagataagcccgcagtacgactgcaagatccgaatcgtttttttcatcgtagtcgagaagcggacgtatactcttatcataatattcctgaataatttcacggtcctcgattcccatgagcagtttgtaaattcccatgtcagaataaaagataagagagtggtcaattttcccgttttcctgcagtttttgaatggattttgcctgtcggtaacttttccacaggcagcggatacttttcgtgagctttccacaacccatggaaacggattccccgcttgcaaggagctgggaagcgcgggagcggagatcctgaataaaagtatgcagttcatgctcggaatagtttcctgccacgatgagaatttcgctgtcgtgagaaaaaattgcaaaattatcgtatttatgccgggcataagtatccagactgttgacgagctgttccagacggactggaagatccgtagcggtgtgcgaaaggttcatcatgcatacggcatatttccagttaacacggaatccctgttgggacaggggaacgacataaagttcttcctgttttggaaagaaaattgcgtttttgaacccggcagcagtttctagaatccgttgttcatctttcgtaattgcaaaacagaagatacgcatgacttctgccagatggattttccacggaatgacaaacagtggaaaatcatgttcgttgcagaaagtgatggcatcctctggaacttcctcaataaaaggtccagtattgacgatgacaccggcgactttcttttcatacattaatcggatcagatccagcagattggttcggtttccaagaccaagtcctgtagtaaaagcgacttcgccaccttcgagaaaatcggaagcttctgtggtttctaccatatgtacccaggtaacaaggttgtgaataccgccttttccagcaatcaggtttacatccatatgtgagactttttccatcagacgctgtaattccacggccatatttgcatccctcctgaataaaaagaaaaaggcaacgatccctctttggggcaccgttgccttttacatttactataatgtttaatattatagcacagatcaggaaaaagaaaaccttttttatttttcaggaaaaatgatttgtgctgtggcacaagttaatttgtgttgtggctcattgttttgcattttgtcatgcttataatggggagtatcaaaacgaaccaaaaagggaatgcacagaaaggcaggtagatgatatgacaccacaggaaataaaagaaaatgcaaagaagtatgtactccagtcatggagcaagcaggcagccttaaatccgatcccggttgagaaggccgaagggatttatttttatgattatgatggaaaccgttatacggatatgtcctcgcagcttgtaaatttaaatgtcggatttggaaataaagacatcggggatgccattaaggagcaggtagataagtattgctttgtcggaccggcatatgctgcagagtcccgcgtaaaactggcaaaaatgattgtagatctgctgccggatacgtttggaaaagtatttttcacaaatgccggagccgatgccaacgagaacgccatcaagattgcgcggatgtataccggaagaaaaaaggtgttcagccgctacagaagttatcatggatcttcgtttggcgcaggaaacttaaccggtgagccaagacgttatccgctggagccggggattcctggttttgtaaaattctttgatccatacatttatcgtgagccgatcaattttgcatcggaagaagaagccacaaagtattatctggcaaagctgcgtgagcagattatttatgaaggaccagatcaggtggcagcgattgtgatggagacaatcacaggatctaatggaattattattccgccgaagggttatctgcctggtgtgcgtaagatttgtgatgaatttggaattgtcatgatctgtgatgaagttatggcaggatggggacgtaccggaaagatgttcgcatttgaaaattttgacgtaaaaccagacctcgttacatttgccaagggagttacctgcggttatgtacagcttggtggggtagccgtcagcagcaagatcgcatcttactttgatgatcattttctttcctgtggacttacttacagtggacacccgctggcatgtgcagccggtgttgcatgcgtgaactactaccagaaggcaaatattcttgacaatgtaaacaaggttggaaaggttctggccgagaagctggatgcatacaaagaggcacatgcatgtgtcggagatgtacgtcatattggtcttttctcctgtgtagaacttgtaaaggataaggaaaccaaagagccaatggtatcctatggatgcgatccacagggaattatgggtaagattattggaatgctcaaggagcgtaaattcatgacctattcccatgaaaatatgatttttgtctgtccgccacttattattacggaggagcagttactcgaagaactggaaaaactggatgaagtattaggcattgttgataaggaatacatttaatcgttggagacagaagggaagtgacaatatggcacactttgcaattccatcccatattttggtgggaaaggacgcactgccatctgcagtgccgtatttaaagacctatggaaaccgggcatttattgtaaccggtaaacatgtgggaaagtctccaatgatggagcagttgaaaaaaactctcgaaaaggcagagattgcttattatgtgtttgatggaattacgggagaaccgaccgacaaaatgatagaggaaggtctggagcagtacaaaaagacgggatgtcagtttgtcattggtatcggcggaggaagtccgctggattcagcaaaagcaattgccgcgatggcggtcaatgaaggcaggattgcggattacaacggaaaagaaattacaggaagtgtgccgggaattgtagcgattccaactacttcgggaactggatctgaggcaaccaaatttacggtcattacggatcaggaaaaagacatcaagatgttgttgaaaggagactgtctcgttccggatcttgcaattgtagatcctgattttaccatggatatgccaaagagcgtgacggcagcaaccggactagatgcgctgacacatgccgtagaggcgtacacgtccaagaaagcattctctcttacagatgtgagtgcggtttcggcggtaaagaggatcatgaaataccttccgattgcatatcagaatgggtacgatgcgaaagcacgggaggaaatgtcgttagcggcattggaggcaggattttgtatcaataattccagtgtgacgctggtacatggcatgagccgtccgattggtgcattgttccacgtaccacatggcatgagcaatgcaatgctgttaaaagattgcctgagctttgcattagatggcgcgtatgaccggtttgcgacacttggcagagctattggggctgcgacggaggcagacagcgatcagatggccgcagaaaagcttctggatgcaattgagaacgtgtgcagaatttgtgagattccgacactgcgggagtatggaatcaaggaagaagagttttttcctgtgattgaaaaaatgtcagaagatgcgattgcatccggcagtccgggaaataccaggaagacagtaacaaaagaagactgcatggcaatttataagaaagtatttgcgtaatatttaaaaaattatatatgtgccacagcacaaaagattttgtgctgtggtgtattgaaaacaaacgttgcaaaacatatacttgcaacatgaacaaaaacaagaataaagaacacggcaaaggcgccagacaataagcgcttttgccgtgttttttattttacttttacaaaaagacgggaggaaacgagatgagtgaattacaggaaagagaagtggaaatacaggtgaaggacctggatgtaacctttaaagacaattcaggaaacgacgtaaaagcacttaccggagtgaatcttgatatttacaagggagagttcatttcattgctcggcccttccggttgtggaaagaccacactgcttcggagcatcgcagatctgcaggagccgacagacggcaccataagaatcagcggacagaccccgaaggaactgcggcagcagcagaaattcggatttgtatttcagcagccggtactgtttgactggcggacggtaaagaaaaacgtggaacttccattggaaatcatgtaccagtccaaggcagaccgcgcaaagcgtgcagatgaaatgcttgagatggtaggactgaaagattttgccaaccactttccaaaacagttatccggtggtatgcagcagcgcgtcaatatcgccagggcatttggtatccgcccggagatcctgctgatggatgagccgttttctgcactggatgagtttacaaaagaaaagttatacgaagatctgctccggatctggagacagacaaacaagaccatcatttttgtcacccataacattcaggaagcggtattcctttccgaccggatctgtgtgttatccccgcatccgggacggttatccgcgatcgtggatgtggatctgccaagaccacggacgctggatatgaaagagagtgcacactttaatgaactggtattaaaagtacgcaacagttttgaagggggcagcgtttaatgaagaaaataagcagactttttgataaaaaatgggcatccacggttctgtggattctgatcattatagcggcatgggagatcggagcatcgatcgtgtccgtgacaaaacgaacaccggagaacattcttccgcatctgtatcaggtgattgcggcggcattctccacccgacaggtatctgccggaatgagcgccacgatggtggttctgacaagcgcaagggccacaatattacgtgcattgcttggatttttattaggaaccggtgccggattcgtactggcacttctgatgaagctttccggacttgtggaaaagatgcttttcccatatctgatgttaatccagctgatcccggtactcggtcttgcaccgattatcctctccatcaccggggacatcaacaagagccgcatcatcattgccgccatcttaagtttctatccggtggcaaccaacacactggcaggtttcaaatccgtgccgcaggaaaaatacgatctgatgtatacctacgcggcaaagaagccgacgatttatgcgaaagtactgattccgacagcaatcccgtatttcttcacgggaactaagatcgccgctccgatggcgatcaccgcatccattctggtagataccttacagggtgacggaggacttggatgcatgctttcccagtcgttaaaacatgcgatgtccatctatgtattctggctcattgtattcttcagtgcatttataggaatcttcagtggatgtctgatgggttggatagaaaatctggtttctccggaaaagagaggtttaagaaaagcaaaaagggatgcaaagaaaggagtgaactaatatggcacagaagagaaagagaccgaaaagcctgtaccgccggatgaaggacagcgcacaggtgcaggcagcatttaccgtaattcttccggtgcttcttggaatcgtgatcattgcactgtggcagacacaggtgctgcatcactggtttaaaacagatacattcacccttccactcattacccggattggaaagatctttttagaaaacttcggaaagattaaaggaaatatagcagcgaccatgattgtcgcagccgtcggactggcactgggaagtgtgcttggatatgcagtggcaatccttgcggcaatgtttccaagagtcgggaaaggcggactgagtgtggtcggggcatttgcatccattccggttgttgcgctggcaccggttatgaataactggacgaaggatgtttcgacagaggcaagcacccggagcatggtggcaaagattctggttgtcatgctgatcgcagcggcaaatatgagcttaaatgcctatcgtggactgacagagctgaaaccgtatgcgaaagacctgatggcaacctatgcggcaaaacgccacaccacactgataaagctgcaattgccgaattcggtaccgtatattttcgtggcactgaaggtgtccgtaccggcaagtatcatgacagcaatcgtaagcgaatatttcgcagaatatatcacaggagtcggaagacagatccgggagaacatcgtgctggcacagtatccgacggcatgggcatacatcgcaacggcctgcatgcttggaatagtatcctatgtgatcctgatgatcgtacagagtatacttctccggaaataccattagaaagaggtaacggagttgatataaaacccacaaaaccccaaaaaaggaggaaagaattatgaagaaaagaatggcaaagattatgagcgcagtacttgtatcggcaatggcagtatccatgatggccggatgcggatctgacaaaaaagaaaccacaggttccggttccagtacgcaaagtacaggcgcagtagatacctctgatgtaatgagcaatgaagaaatcattaagaaggcggctggcgaaggaaaagtcagcaactggggcattggtaatcagtatgagattcaggcattacttgcaaagtacggacttccaacggaatatctgagtgaagattttacgatggatgcatttgatgacgattccagtacgctggcatctgcgatgacttataacgaactgggacttgtaaagaatgattatgatggtgcctatggttatggtgacacggttggatacattgatatgaacgatgaaggcgtggcaatgctggaggatatgatcttttgtaccagggattttgcagagaagaatccggagactgtaaaagcatttttgtatgcatccatcaaaggctgggaatatgcagtagaaaatccggaagaagccgcacagattgtctatgacgcaggatcttcggtatctcaggatcatcagaagtatatggcaagtgaagtcgcaaaactggtaaaggcagatatgaatggcaatgaagtgtcggatatcggcaagattgatgacgatgcgatgcagcagacactcgacattgcaaagaaatatgtgacattagatgattcttcggcgcaggataagtttgcaaaactgaccttagatgatatccgtgatacaagctactatgaagccgcagaatcttctgacggaaagttcagtccggaaaaatcagaagtatctattcagttgaagtggttaccacaggcacagttcatgggctactatgtcgcagatgccaagggttattacgatgaagttggtctgaaagtaaatatcgtatccggtggtggtgatatttccgagactacagcggtaaacaacggaaccgtagattttggtgttacctggccgaccaacatggcagttgcaaatgccggcggtatgaatctcgtagaagtagcacagatttatcagagatctggtatgacacttgtttataagtatgacaattttaagaactaagagatagaaggagatgtgcgatatggaattactgattaaaggtggaaccgtcgttactgcaacggaaagttttccggcagatgtagcggtcgatggaggaaaaatcgtagcgattggcagagatcttgcggtaaacgcagagaaagtcgtggatgcaacaggcaagcttgtgctgcctggtgcactcgatgcacatacccatatggcaatgccgtttggaggaaccgtttccgcagacagttatctggcaggtaccagagctgctgtctgcggaggtgttactacaatttttgattatccggtacagcataagggggaaacgattttaggactgatcggatctaagaaagaggtgctggaaaaagaagcgtgctgtgattatgcattccactgttgtattaccgatctgaatggcggagaaattttagatgaaatagaacaggcagttgaggaaggaattaccagtttcaaatgtttccttgtttataagaaagaaggaatgatggtagatgatggaatgcttgccagactgcttcttcgggcaaaggagcttggcgcaatgatcaatgttcatgcggaaaacccggatctgattgatctgcgtactgagcagtacttgaaggaaggtaagacctctgcctggtatcattacatgagccgtccggaatttgtagaggcagaagcagataaacgagttgttcactgggcttcccacttagataccccggtctatatcgtacatatggcagataaagaaggactcgaagcctgcatcaaggcaaaatccgagggacatgatattttagtagaaacctgtccacagtatctggaatttacctgtgatgtatacaagagagaagacggtcgtaactttgtatgttccccgccaatgaaaggacaggaaagtcaggatgcattatggacagcaattaaatcaggaatgattgatacggttgcaaccgatcattgtccattccagagctatgaaaaggattggggcaaagatgattttaccaagattccaaacggatgtgccggagtagaaaacctttatccgtatatgctggatgcggcaaattccggaaagatcacgtttgagagagccgttgaactttgttctaccaatgttgcaaagattttcggatgcgataacaagggagccattgcagtcggcaaagatgcagatattgttatttatgacaaggacaaagatttcacaatcagtgtcagcaatatgcattcggactatgatcataccatctgggaaggaaagaaacttcacggatatccggttcagacatatctgagaggaaaactggtatatgacaacggtgattttgttggaacaccggggatgggtgattatgtaaagcgttctcacagataggaggagatggcacatggcatatgaagcaataagaagaaaaagcgaagcgggcagatgtctgttgtgtcaggatgctccctgcagcggtgcctgcccgaaggggctggcagtcgatgaaattgtccgctccgtccggtttgaaaatgaaaccggagccgcaaggaaattagatcatatcacttgtgagggatgcagtgcaccgtgtgttggtgcctgcaccagggcaagaattgaccggggtgtggatattccaacgattttatccagtattacagcagaaattccgagaacctcaaaggcagatttatccattgatttttgtggagtgcattgtgaaaacccattttttctttcctcttcggtagtaggtagtgattacgaaatggtcgcaaaggcatttgagatgggatgggcaggcgttgcatttaaaaccatcggtctgtttacaccggatgaagtttctccgagatttgcagcattggaaaaagaggataatccgtttgtgggatttaaaaatattgaacagatcagcgaccacacgctggaagaaaatatggattatcttcgtcggttaaaaaaagattacccgacaaaagtaatcatagcatccatcatgggacagaacgaagaggaatggacaaaacttgcttctttcatggaagaagcaggggcagatattatagagtgtaatttttcctgtccgcagatggtaggggaaggacttggcagtgatgtaggtaccgatccacagcttgttgcaaagtatacagcggcaacaaaaaaaggtacaacccttccggtactggcgaaaatgacaccaaatatcacaaaaatggaagttccggcagaagccgctgtgagagcaggtgcggacgggcttgcagcaatcaatacgatcaaaagtgtgatgaacatcaatctgcagacgttttcttcggctcctgatgtggatggaaaatcaccggaaggcggttattccggaaaagcggtaaaaccgattgcactgcgttttatcaatgacatggcaaaagatgaaaacttaaaaggagttccgatcagcggaatgggaggcatcgaaacatggagggatgcggctgaatttctggcattgggctgtgagacggtccaggttaccacaagtgttatgcagtatgggtaccggattatcgaggatatgatagggggaatgcaggattatctggcacagaatggaatgacatccgtgcggcagatgatcgggaaagcgcttccgaatattgttccagcagaaagtgtgaaccgtcgtacaatcgagtatccgaaatttaatcgcaggatctgtgttggttgtggaagatgttatatttcctgtttcgatggtggacatcaggcacttcgtatggatgaaaaacgacaaccgcttatggatgccaaaaagtgtgtgggatgtcagttatgtaaactggtttgtccgacaggctcgatcacagcaggaacccgggtagaaaagagaaagtaatagaaatacattcagataataattttgagaaaggcaggtacagtagtatgtatacatgtagtttggaaagaatgacagataaaattaaaactttttcacagtttggagatgcaggacatggtggaattacccgttattccctttcgccggaagcaattatggcaagaaatgaatttcgtaagcgtatggaagccatcggtgcaaccattgagattgatgatgtggcaaatatgtatgcaacacttccgggaacagatccggatgcaaagcggatcgtcatggcttctcattgtgattccgtaaaaaatggtggtaactatgatggtattcttggtgttatgtccgccatggaagtgcttgaaacggttgcagagttaaacattccacataaacatcctctgacagccatgatctggaccaatgaggaaggatctttatatccaccggcaatgatgtgttctggaattgtctgctatgattatcttccggaagatatccgtagcaagttcaaatatgaggatatgatgaactccaagagtattcttgataacaagagtacattcggcgaggctttagagaagtccggatttaagggagataagaaatatcgtctttctccggaaaaatatgagtgttattttgaaactcatatcgagcagggaccaattcttgaggataatggaaatgatatcggtgttgttgactgtgtgcttggaatgttcaactatcgattaaaattctatggacagacgacacatgcaggaacattcccgatgccaaagagaagagatgcttttctggcagcagcagaggcactgacttatctgcatacagagattgataagctggggtatccggaacttgtttatacgacaggtgaagtcgtatgtcatccatgtgtacatacctgtgtaccggatttcttcgatttctcattcgatgcaagacatgaaaaaccagaagtgctcgacaaggtactggcaatcgtaaagagctgtgcagacaagacatgggcgggatgtaaatgtgaagtcgtaaaagcatggaatcgcgataccgtatactgggataaggaactggttggtttcgtcaaagaggctgcagaggaacttggtgtttctcatcagtacattcattccggtgcaggacatgatgcacagtttgcggcatatatgcttccggcaacgatgatctttgtacagtcaaaggatggtctttcccattgcgagccggagtattcttccccggagcactgtacagaaggcgcctctgttatgttaaatgcagtattaaaggctgatgcaagatagcatagaaagacaggatcgcagaacttgatctgtagataggagagggggtgaagtcatgaaaaattatgtcattacgattgcgcgtggctttggcagcggcggaaaagacattgcgacacgtctgggagaagcacttgggattccgtgttatgaaagacagattctcaccatggcatccgatcagagtggaattgatgagagcgtatttgtggaaactgacgagaagctccgtggaaaacatctggcaaatttccttcgaagaatgccagtcagcggtgtggtagagccaatggaaaaggatttcatttccgatgtcaatgttttcaatattcaggcagacatcatccggacgcttgcaaatacagaaagttgtattattgtgggaaaatgtgcagatgatattctgcgcagctactccaatgtcatcagtgtgtatattgaagcaccgcgggcagcctgtgtaaaatccatcatggataaaatgcatgtatcggaaaaaagagcaaattatctgattcatacaacagataaataccgtgcaaaatattacagctattatacatccggaaaagactggaccaatccgacaaactatgatctggtgttaaacagtgaccggatcggacgggaaaaatgtgtacagctgatacaggagtatataaagatccggttcccggagaaaacggtaagtgaatagaagggataagataagcctgtggagagcacaactctccgcaggcatgtttatattttggaaaacggcaaagagattaccatatctctaatccagaaaataacttttgggggcatatgtaaagaaaattatcctactggattgagtatatttttcctgcttttttccttttttgcaggttttgtttttggaactttttctttcttcgcaaaaagcgtatgctttttttgcagtttcccacggatttcagcactcaactggcggtaacgttcttccgtcatatcattttgttcccggataaggtaattcatttcttttaagacggtttcccgtatttctttgctgatatcgagcgtaagtgcttcattgttctgtgcaatcgcatgccctacaatgtcactcatcagttcccggaactgtgccatgcgttcttccgcggaaagggtatttacaggtaagtcggttttatctgtattctgtcggtccggtttggcgacaaccgtgtgatgatgttcccggttacatgcgggcaatggaccaggtgctgcagaatccggcacggaaacaccggcatcttcggggtttttattgtgtaatatcatgcggattgccttcagctggtatcctttttctttgagttctttgatcttttggaattcctgtatgttctctcgtgtatagtatcgatgtcccatctcatttcgtgggatggtcaggtcgagttcttcttcccagtaacgtaacacatgggtttccacaccggccagtgcagcggcatcggaaatcatgtaacgtactttttccacgatagcatgtcctccttttttcgttacagttattataacttttcgaaaagatgagttcaaacattttccatcgtatttttctgacatttctcgcagtttataaaaatagaccttgacatttgaggtttataagaataaactgaagacaggttgatagctataaacctatggaggagacaaagatggaatatgtaaaattatgcgacagtgattaccggtttatgtgtgtggtatgggagcatgctccagtcaattccggtgagcttgtcaagctatgtcaggaacagcttggctggaagaaatccaccacgtatacggttgtgcggaaaatgtgtgaaaaagggtacattgccaatgaggatgcaacggtttccgttttaattccaaaggaacaggtgcaggcagaggaatcccgctattttgtggatcgcacatttgacggatcactgccagggtttatcacagcatttcttggaggaaagaaaatttccaaaaaagaagcaaagctgctcaagaaaatgatcgacgagcataaagaagggtaggggcagagaatggagaaggcaagtgtaatttttctggcatttctgcagcggaatggcatggtggtggttgtaattctcgcggtgcttgcagtgcgcgcgcttttgcggaaatgtcccaaaaaatattcctatgcattgtgggcaattgttggaatccgtatgttatttgatttgcccattgcatcaggatggagtttgtttaatctgtttcgtctggcaaaaagcagatcacaaatgagtgagattgcacactacacaggagtatctggagtgcatgcgcaaacggcagtacagaagatgacgcaggtatctgccggttcacgtgtgacaggggatgcagcttttgaagctggtttgacagcagctatgacgacctcgcagaaaatttgtgcggtgttgttttttgtctggctgatcgggatatttttatttttaggatatggaatgtattcctatatcaaatgccgcagtatggtacggacagcagtacgtttaaccgtaaatgaaacatctggaaacgtccggcggaccataaagatctgggaatgtgactgtattccatcaccgtttgtactgggaattttctgcccgcagatttatattccgtttcggatgaaagaggaggaacagcagtacatccttgcgcatgagagctggcacatccgcagacatgatcctttatggaagctgattgcattcgtacttttggctgtatactggtggaatccattggcatggattgcctttttctatatgacaagagacatggagatgagttgtgatgaggctgtacttgcgcagtttggaaatcagattaaaaaaggatacagcgcatccttacttgcttttgcgatggagcggcatccgtattcatttgccccggttgcgtttggagaggcagatgcaggaaggagaattaagaacgtgttgaattttaaaaaaccacatacctgggtggctgcgattgcaaccgttttggttgcgcttgtggcagtaagttgtctgacaaaccagaaaccgtcggagacaaaaacagagcatacaaccgagaaagtggatagtacacagcagccagtgcaggaaaatgcaggagctgcgataatagagcagaatatcagggaatgggcacaggcattttgtgatcgggatacagaaaaaattgtacagatgacatccaaagaggtacagacgaatttagagaaaatacatattttgcggatggatggagctacaccgtcatttggctggtcgagtccatggccatggggagcctttggcagtttctttggtggaaccggagaagaaatggatggctactggctgcatgaaatcaatacggaagaacagactgcagagattttgtattatgtggagtcatcagatccgcatgtgagcgtgtggatagagaatatccattatgcacaggaaaatggtcaatttcagattacacaggaaaaaatcaatcagtttgctgacggtccggatgctaaaacggatggaattgcatcggcagatgagtttgatatagcatatgcgcagggaatcagcgatacgcagatggactactgtataaacggtatgggtgaagtgctgaataagaatatggttccaattggtgcattgcttgagccgacagatgcagcccggcagcttttgaatttatcgtcggataaaaagcttgtttccgtggaaaaagaatctgaatctgcagataaaacacaggtcggtatacagattacatttttaaaggatggacagaagcggtatttgtctatgatccagccatggggaaaagagggaatctgggttccggcagaagccaaagaagtcaagcgttaatgtgtggatgttatcatattttccttgtattgcatcttaagttccgttataatttgaactggtacaacaaaataattaattatttattatcctggataaaggagtatagttatgaggatgttaattgataacagagatctggaattacttcttgaaaaaaagaaaaagtttattggaaataaagttactgtggatacaatgattgcaggaatttcttttttgttgtccgtatttactgcaacatatagtgattggtttggaattccaggaattgtgtttaaaacagttttttgttttattggaattttatattgtgccaagatcgtaaaggatattgttgaaatgtacagagataaatataatcacgaaatgttgatgaatgatataagagaactgaatttaattcagcataatcactcattaattgctattcgtgatacatttgaaaaagaaaatagatttcttgtttattatgatgagagatgggattgcaagttatttttaaattataaaaccgtggatcagaacaatgaagatgtaataatagatcgaatatcggctgatttggatgtggacaaaagaaaagtatcatgtaattatgttacttcaagagttcaggaaaaatattcagttagtcatcaggaaaatagaatatataatcatagactttatgaggttacattatcaaaatattcggaaaaaatgaaaaaggatagttttgtagttaatgggaaacgctattattggatgtcagtaaccgagatggaaaaagacgaaaacatcatggaaaaaaatcgtgaggttgttgattttgtaaaagaaaaaattgtttgacaaactgtgattgtctttctataataatataattatagaatacaagcgaagatgggaacaagtaccaatgtgtggaacgaacagaaagcagccggtagatgagaggcacacggaaagcacagatggatttatggaaaaaccataagccgggcgataaggaatccccccagcaagctgggtcccccctgccacggcttatggaacaaacataaac

SEQ ID NO: 1035 - DNA, 517 bp, Unknown
  gut microbiota DNA sequence
ttcactcagcggactttcaaaacaggattatatcatccaatgtcttctgaagcatgaaatcagggttgttggtggaatgaaggtggcaaagaaagtacaggtgcatcttgatacgatactggaagaattacagacattagatgaatctgacagaggtatagatgttgaagaactgctggttcaattaaagcatgtgcttgatattctgcaaagtgatgagaaaggcggtaatcattatgagtaagacaatatttgaaaagcttggcatcccatatgaagaaagggatggaatcttttatccggtgcttgtcgcaggaacagagaaggcagatatagatgtaggaaagtatgggcgtatgtggattaaatatatcaaggaagaatatccaatgagatataagagtctggtgcggttcggtgagcttgaagagagagcggatgaagtcaatgatacagcatatgagctgctcgatgatattgaagctaagtggctgaaaaagcataagccaaagaatcc

SEQ ID NO: 1036 - DNA, 485 bp, Unknown
  gut microbiota DNA sequence
ctcctttccggctaccgtgtaagtataccttgccgcccagtaattgtggtcggaatttgaccggttgaccgtgattctttttgcatctttttttataatcattccctttgtgacatgtccgcgttcttttgcaatttcaatttttctactcagcccaacttttcttttggctaaaaacttcagatcaatgatgtacagtggtatcagcgatataacggctacagttacctgccatggatactggcggatggcgttaatgatttctttaaattccatgatttcccccttttttgcttcatatcaggaagaggttttgaacactttcccggtactgccgtctcttatgcggtcagaccatggaaaggaatatggtctttgcatcctttattataggaaaacagggattatttggcaataaaaaacaactgtaaacgttttcacatattaggcatatcgttactgttcagaggtaaacttgtaacgag

SEQ ID NO: 1037 - DNA, 3538 bp, Unknown
  gut microbiota DNA sequence
tccattacataaaaatctagtttttcgtttatcattctgatttcttcttctttggtcatgttaaaacctacctacattatatacatggcgcttctcgacaaattcttacaaataactacaaattttttcacaagaaacgaaaaaaacgatactgcatagatttcttactccacacaatatcgttcttctatatttatactttcattgtcttcgccattatcaggttgtaatcggtatactcactgccaagcgcctcctttacctcatcctgttccttctttatatcaataaggcactgtgccacaaatcccggtatataaactttgcgctcactggtattgaatatctccaggaatggaaacgtaatggcaataaactcattctctggacttgccgtgcgggggaagccctgtcaaaagctgtcgaatggtgccgggaacagaattttgaatttgatgcagttaatgacaatcttccggaaatcatcgaattctatggacacaacagccggaagatttcctgtgattactatatcgacgaccggatgctgcttccggaaaacgcaaaggcatagaacccgtaatggggctatgcctttgtgcttattctggcattcatttttagttagtgcgggttatttacctaatacagtttttctcataataaaaatctgttagttaaactttttcaaattttgctacttcatccgataaatcttccgaaaggttcttattttcgtccgcctgcactgtaattgctgaaattgctgttacaagttgtgatatctcttgtgctacgtttgtaacaccttttgcagattcttcaatcgctatagaaatgttattgataccttcattcatatcattcattgtacctaagctatcttttgacttaactgcaaactcgttaaatgtattacttgcctgatcagaatcagcatcataatttccaataatttttacaaatttgtcataatcaagtgctaccttttcatctacaaaacgaatcatttccgttgcatttccagacagattgtttactgcctcaataacttttccactgatttcctgaatattgtttgctgtctcacgtgaactatctgcaagctgtctgatttcatctgcaacaacggcaaagcccctgcctgcttcccctgctcttgctgcttcaatcgatgcattaagtgctagaagatttgtctgtgctgcgatatttaagatattttctgtaagttttgcaatttcatttacagacttagatgcttctactgcctccgcgacatccttttgaatgccatcaaatgtttctactgttttttcttttgatgcaatcgcttctttatagctattttctgcagtaagcttcacttcatgcaacttcattgcagagttcttagcatcctcattcatgcctgccattttctccagcagattattacatccttgggctaaatcagatagagaagcagatacctcttccatggatgctgcaagttcttccgatgttgcactcacattggatgcactcatatttgaagattccgcctcattttgtacaagataggaagattttttcatatcttttgatacactctgaatctttaccataagattttgtaatgtttcaataaaatggttgacaccatttgcaagctgaccaatttcatcactggtttcatcaaatactcttaacgtaagattaccctgtcctgattctatacctaaaatgatatcatccaaatcattctttgctctttttgctggacgaacaatggacttattaataacaatcgaaagaagtacgattacaataatattagctaccacaagtgcaagatcaaaaatgatgcttccatttattctgtagttgctatgtctgatggcttctgccacttctccttttgctgtttcaaaaaccgcggtatcattatttttcactgcttcttcatattgttcaaactgttctataagcacattattcttttctcgaatagcttgtaatgccattaaattaaagactgtaatcaaaactgcaaaaaagcctacagacactaacattgttactaacttttttcccaagttctttctctttttcatgtttatttttcttctttctgcgaaaagcaccaatgcgttatgttttggaattttttaccaccattctaccccaccccacaaaattttgtcaatactttattctcttgatagaaaattttaatctttactctgatgaggatggcgtgaaacacatccgtatcaaagccagacctaataaatggcatgagaatgactgccctttctgtcacaagtcatgtcctgcttatgacaaacattccagcagaccaaccacttggagggggctggactggggtggtattctggtcgaagttgaataccagacgcatcgtatcatctgccttgaacatggggtatatgttgccgaagttccatgggcatatccaggtagtagatttaccaaggatttcgaccttaccgttgcatggtttgcatcctatcttccaagaagtaccacatcatacttcatgagagtggactgggaaactgtaggccgctgtgtcaatcgtgctcttcacgatttagaaccggagcactcaagaagacttgatggtctggttaatatcggcattgacgaaaccagttacaaaaagggtcacaagtagacaatttgtagacacttgcttctatcgcccattttctcaatatctgtaattcaaaatccaaagtagccagaaagtgaatacattaaatttattgacatggagataataatagcatataattaaagtacgtaaaaccatacgtttttatgtacggaaaggagtgttttatatgttagcagtaaagagcatggatgttagagataatttcaagagtttatgtgataaggtttttaatggtgaaacattaattatatcaagacccaagaacgaaaatattgttatgctttccgaagctgaatacaacgaaatgatgaaagccaagcgaaacgctgagtatcttgctatgcttgataaatctatggcagaggctgaggcaggtggttttgttactaagtccattgaagaattggagacatacgaataaatgaatatagtatttactcctactgcttgggagcaatacaccgaatggcagagggaagataaaaaaatggttaagcggatcaatgagcttattaaggatattgaccgcaatgggcttttaaccggaattggtaagccagaaccattaaagcaccgaaaagcatgtagcagacgcattaccgatgagcatagattaatttactatatggataacatccaaaatctgattatatactcatgtaaatatcattatgaagattagcactttaaacggtgctaatttttttacaatttctaaaggttcgcatattttcattagtggacctgctttgcactgtctccgcaaagttctccgatcacatcaatacttctctttcctgtattgtggtcaacttgaccacaatttttatccagtcaattactgtaatcagctat

SEQ ID NO: 1038 - DNA, 11897 bp, Unknown
  gut microbiota DNA sequence
tggagctgactgttactaataggtcgagggcttgattaaaaaagcggttaaatctgtatgaagttttgaaagtacaaataatttgatagaaagttagcaacgtactttgtctacgttgttttctcatataggggattggtcaaatggtatgataggggtctccaaaacctttggtgggagttcgattctctcatcccctgttctttaaaaacacctgtttaggtgtttttttatttatagtaatttaaattaaatttttatagaggagaatatatatgagaaaaacaagtaacagcgtgctttcgcaatatcggggtgcgttaatgggaatatccatcatattgattatagtttttcattttacggatgactgtcattattactcctatcattttagtggctggatttccttcttttggagatatatttcatcatcaagtgtggatgcttttttattcttttctggtctggggttatactattccatgaaaaaaagatcagatgttagaagtttttacataagaagattaaaaagaattctgattccttattgcatcgtagccgtaccctcttatattttactggatgtctgtgtagataaaacaggatggggagaagccataaaagacttcacatttatcacatttttcagtgatggagacaggctttactggtatattggacttatgctgttatgctatctgatttatccctatatctttcagattgtggatagcgcacgggacgcaatagatggagagatccggctgatttccatggtaagtgctattacagtattagcacttgtaattgcattatatgagaaagatatgtttggaaatgtgaatattgctttgcttcgtctgcctgtttttatagcgggctgtttttatggcagatccagttatgaaaaaagggaaagttattggaaatggttgattctttttgcgttatccggctatttgctcaccatgcttccaagtggatctcctatttttgcaaggtatgtgaccggaatttttaatatctcatgttgtgcgggaattgcctggatcttttcccggttatctatgcgcccggttataagaatactggaatggtttggtgctcattcgctggaattgtatctggtacatgttaccatacgaaaatttatgaagggagcagcatttcatacatgccgtctgcgttacgaactggtgctggtatgcagttccattgtgattgcatggatacttcagatccttgtccggtatataacagatcatttgcttaaggaaaagaggtaagacatatgaccctacagcagttacatcaggtaattacgattgcagaaagccgttccatgaacgaagcatcccgaaaattgtttgtctcacagcccaatctgtctgcggttgtgcgcgaactggaagaagaagcaggaatcaccatttttatccggtccaacaggggaatcgtgcttacaccagagggagaggaatttatcggatatgccaagcaggtcgtggagcagtatcatttactggaatcccgttatatttcgtctgcatccaaaaagaaattttccgtgtctatgcagcattatacctttgcggtcaaggcatttgtggaagtcgtaaaggctgtcggaatggaagaatatgaatttgccgtgcatgagacacagacgaatcaggtaatcgaaaatgtgcgcaacatgaaaagtgagctggggattcttttcctgagcaaatttaatgaagcagtactccagaaacttttcaaggaaaatgatgtgatttttgaagaactgtttacctgtgacacctatgtatatctgtggaaaggacatccgctggcacaaagggatgtaatttctatgaaagaactgcaggaatatccatgtctggtgttcgaacaggggaaaaataattccttttattttgccgaagagatgaaaagtacctatgaatataagaagatgatccatgcggatgaccgggcgaccatgctgaatctgatggttgggctgaatggttatacgctctgttccgggattatctgtgaagaattaaacggaaatgattatgcggcagtgccgctggcagagagcgaaaagatgcggattggctatatccggcacaaggggataaaggtcagtccgatcggagaattatatgtggatattctgaaaaaaagtgggaaaccactttgataaaaatagttttcatcaaaaaatgcttgttttggtgattggaaaggcaattttttggagaaattgcataagatagcaggtataaatataaatacacgaaaaaaaacggtaagaatctgatggaaacggttgcgcgattaccgtcattatgcaggaaaaaccggagaaatgcgaagtttgcataactttgacagatgagaaaaaaagtggcataatcttttctaaacttggggatgataataaaagtatgttgtttaaaggtagaaagaggtgttggattatgtatgaaactgttaaagtaattcggttatcagatatggatgaagttaaggattttgtacgtgcagcaggtggttgtgattttgatattgatgtaaaatgcgacagaacattcattgatgcaaagtcattgcttggtatgattggacttggcgtaaaaaagaatcttcaggtttgctacggtggaaagaatgaaaatttcgaaaacgtagttgctaaatttgcagtggcataatacaattattatatcgtgactatggaactttaagtcccgctccgtattccggagcggggctttttattgtaaaataatggaacaaataaaaacccgcttcatacaacaggaaaatacccgcgggagaaaggaggtgtacatgcaggaattacatatctctgtgagaaatctgatagagtttattttccgggcaggagatatcgataatcgtgccggaaagttggcgagtgcagaggccatgatggaaggcagccgtatccaccggaaaattcaaaaaagcatggacacctcctaccaggcggaagtaccgctgaaaattgaatggaaagccaacgattacgtactggtcgtggaaggacgtgcagacggaatcgcctatggaaaatttcagccggatctgccggctgcgacggagtctgtgctgcaaccggagatggagtttgcggcggaaatccctccggaagaagaaatcagcttcatcgatgagatcaagggtgtatatagaaacgttgcggcaatggaacagccggtctacgtgcataaagcccaggcaatgtgctatgcgtatatctatgcgaaacagaaccgtctggagcggatcggcgtgcagatgacctactgcaatctggatacggaagaaattcggtatttccgggaaatttatacatttgagacactgaccgtgtggtttggccatctgatcgaagattatcggaaatgggcagactggcagatcgcatggaaaaaacagcggcaggagagtattcatacactcgagtttccatttccctaccggcagggacaaaagaagctggttgccgatgtttaccgcaccattctgcgggggaagaacctgtttatcgaggcaccgaccggagtgggcaaaacaatttccacaatctttccggcggtaaaagcagtgggagaagggctggcagaccggatcttttatctcacggcaaagaccatcacagcaactgtggcaaaagaaacgttcgcactgctggaagaacagggctatcgtgccaaagtgatccagattacagcaaaagaaaaactctgcctgtgtgaagagatggactgcaacccggtaaactgtccatatgcaaagggacattttgaccgggtgaacgatgcggtgtttgatctcttgcagaaatccaacctgtttaccagagaggaagttttagcgcaggcgaaagaatatcaggtgtgcccgtttgagatgagtctggatgtggcaacctgggcggacaatattgtctgtgattacaattacgtatttgatccgaatgtatatctgaaacgcttttttcaggaggggataaagggagactatctgttcctggtggatgaggcacataacctcgtggatcgcagcagggagatgtacagtgccgatctgtacaaagaagacgtgcttgcagtgaagcggatcatgaaagcgcacagccgtacgatctgccgtatcctggacaaatgcaacaaagccatgctggaaatgaaacgtgagtgtgagcactaccagattctggacagtgtgggaacgttgaccttccaccttatgcggctggcctccgagatggatgaatttttggaaaaaccgcgggaatttccggagaagaaaacggtgctggatttttactttgcactgcgcaatttcctgaatatctatgatctggtggatgaccattacgtgatctacagccagatgacggaggaaggccagttccggatccggctcttttgcgtagatccgtcggtcaatctgcagaaatgcatcgataaaagcaattccacgatctttttctccgcaacgctcctgccgatcggatactacaagcggctactttccacggacgaggataactatgccatttatgcgcagagtacgtttgcccagacacagagacttctcgcatttggccgggatgtgagcacaaaatatacgcggaggaacagaaaagaatacgaaaaaatcgcggactatatcggtgcagtcacagaagcacagcagggaaattacatggtgtttttcccgtcttaccggctgatgcaggatgtatatgaggtctttgccgggaaggcggccgattcgtgcgagattctgatgcagcatagtaatatgaaagaacacgaaagagaagcgtttttggaagaatttgaaaaagagcgccaggggacactcgttgcgttctgtgtgatgggtggaattttcggggaaggcattgatctgaaaaacgaccggctgatcggtgccatcatcgtgggaaccggacttccgcaggtcagcgatgaacgtgaaattttaaagaattattatgatgagcggggattgtccggatttgactatgcgttccgctatccgggaatgaacaaagtcctgcaggcagcagggcgcgtgatccggaccagcgaggatcgcggcgtgatccttctgctggatgaacgtttcctgcagcgcgaatacggagcgctttttccgagagaatgggaaaagagaagcgtctgtggtctgccgcagctgcgggaagaagtgagccggttctggtcagacgtccgggaggagctttaaaaactcttcggtggaggcagaaaccggaagggtagggtttaacgaagccaccagctgccgctgcgggatcgtttcctgcgtgcggacgaggaagagatcctccggcttgtgtttcagacaaaaatccgggataaaagcaattccaagaccgatgcgggccatgtcaatgagcagatcgttgctgctgagctctacctgaggcagcagttccagctgatgctgcaggaaaatgtggtgcagaaactcactcgttgtgctcttgcggtctaacatcatgagcggataggtgccaagctccgagaaaggaacgatgcggtccgccagatcaaaatatgccggattggcgacgaacacatccgagaaagagccaaccgttttctgaatataggaaggattcagatgcgggtttggaaaatttgtgataatcagatctacccggcgctgctctaacaggtctacacagcccatcgagctggcattggtgattttaatcggaacatccgggaatttccgatggaatttctgcagatacggcagaagaaaatagcggcagatcgtgtcgctggcaccgatatgcagctgtcctaaaccaagagagccggattctaaaagctggctttcgccgcgtgagatcagattcatggcaggttccacatgtttcagaagcagagcaccggcaggagtcagctgcactttttttgtgctgcggataaaaagcggctgtcccagcttgcgctctaatgttttgatagactggcttaccgctgactgggagataaacagcttcttacttgcatccgaaaatgagagagagcttgcaacataatagaaaaccttgtataattcataattgatatccatcgatcatatcctcagtagtatagtataggatatattatatacctttcacaaaggagagaaaaggagattatcatgaaaaagggaattttgaaaaccttatgcggattgatggcggcactcatgctgcttgtgttcgcaggaacacccgttataactcaggcagcaaaactgccatattacattaaaatcaatcgtcagcagaactgtgtgaccgtatatgcacttgattccaaaggcaaatataccaaaccggtcaaagcatttgcctgctctgtcggtgtcaacaatgccaccccgacaggaacattttcgattccggcaaaataccgctggcatacacttatgggcggtgtgtacggacagtattgcagccgtattcacggtggtgtgctgttccactctgttttttacagtgcacaggacccgagcaggctggcatacaattcttataaccgtctgggacagacggcatcccacggatgtgtccgtctgaatgtggaagatgccaagtggatctatgacaactgcccggtaggaaccaaagtaaccatctatgacagcaaagatccgggaccattgggcaagcctaccccgatccgtattgatgtaaacagtccgtaccgcggatgggatccgaccgatccggatccgagaaatccatggctgaaacttcgcccgacgattaagggaatcaagaataaaaccatcgagagaacaaacagcaaagtagatctgaaaaagggtgtgaaagctaccgattacagaggtaagacacttaaatttaccgtttccggaaaagtcaatgcggcaaagaccggaaaatataagattacatacaccgcaaaagatgccaaaggaaacaagacccaaaagagcatcgtaattaccgtaaaagatacgaaagcaccatccatcagcctgaagcgaaagacactgacctacaataaagccgtttccaaagaaaaactggtttctgcaattaaggcagatgtagtggcaaaagatctgggcaaaaaacttgcgtcaaaatatgttttcgtggatgccagagaagcacataaggcagttaccgctatggaaagaggaacctatggaacttatagcgtgaccgtatatgtcaaagatacggcaggaaataaatccagaaagctgaaagtaaagattaattttgtaaatccaaacccgggtgccgatcagccggatcagccggaaccggacactccgggcgttgtaacggacagtgcaattaccgtacagtaatttcataagaacaggtaatagatatcgtaagcgatattaattttacttaattgtcaacccatgatacaataacataaagatcaatagaatgcccccgaatacagggggcattccgtttcgcaaaagaaggaggtaaatccaatgggcaatgtacgtcgtgtgtacgtagaaaagaaaccagattttgccgtaaaggcaaaagaattaaaacatgaggtaaagcattatctcggaatcgctgcagatcaggtgcgtgttctgatccgttatgatgtggaaaatgtatcggatgccacttaccagaaggcattgcagacggtattttccgagccgccagtggatgatatttatgaggagaactttgacgcagaaggaggaaacgtattttccgtagaattcctgccgggacagttcgaccagagagcggattccgcagagcagtgcgtgaagcttttaaatgaggatgaggagccgatcatccgcagcgcgacgacctatgtgatcaagggtgacatcacagaggatgagttagaggcgatcaaaaagtattgtatcaatccggtagattcccgtgagaccggtatggacaagccggataccctcgtacagaatttcgatgagccggcagacgtggcagttttcgacggatttatcgacatggcagaagcacacttaaaggaactgtacagctctttaaatcttgccatgacctttaaggatttcttacatatccagaattacttcaaaaataccgagaagcggaatccgtccgtgacagagattcgcgtgcttgatacttactggagtgaccattgccgtcataccaccttctcgacagaactgaaaaatgtgaggtttgatgaaggattttaccaggcaccaatcaaaaagacttacgaagaatatctggatacccacaagaaactgtatgcgggacgcgatgacaagtttgtctgcctgatggatctggcactgcttgccatgaaacgtctgaaaaaagaaggaaaacttgcagatcaggaagaatctgacgagatcaatgcatgttccatcgtggtaccggtggaagtagatggaaagacagaggagtggcttgtaaactttaagaacgagacacataaccatccgaccgagattgagccgttcggtggtgctgctacctgtttaggcggagccatccgtgatccgctttccggaagaacttatgtgtatcaggcaatgcgtgtgaccggagccgcagatccgaccgtatccgtaaaagatacgattgagggcaagctgccacagaagaagatcgtgcgtgaggcagccagaggttacagctcttatggaaatcagatcggactggcaaccggatatgtcaaagaagtttaccatccggattatgtagcaaaacgtatggagatcggtgctgtcatgggtgccgcaccgagacgtgccgtacagagactgacctctgatccgggagataagattatccttctgggcggacgtaccggacgtgacggtatcggtggagcaaccggatcttccaaggcacataacacacagtctacgtctgtatgtggtgccgaggtacagaaaggtaatgcaccgactgagcgtaaactgcagcgcctgttccgcagagaagaagtcagccatattatcaaaaaatgtaacgatttcggtgccggcggtgtatcggtagccatcggtgagcttgcagacggactgcgcgtgaatctggataaagtaccgaagaaatatgctggtctggatggaacggagattgcaatctccgagtctcaggagcgtatggcagtggttgtcgctccgcaggatgtcgagcagttccttgcttatgcaaaagaagaaaaccttgaagcaaccgaggtggcagttgttaccgaggagccgagactgatcttagagtggagaggaaaagacattgtcaatatttcccgtgcattcctcgataccaacggtgcgcatcaggaagcagatgtcgaagtcgagatgccaaaagaggaagacaacttctttaaaaagatcgaacttccgaaagttgcagatgcattacagaaaaacgacaacaaatcagcatggcttgccatgcttgcggatcttaatgtatgttcccagaagggacttgtcgagatgtttgacggttccatcggtgcgggaagtgtctacatgccatacggcggccgctatcagctgaccgagacacagagcatggttgccaaacttccggttctgaaaggaaaatgcgataccgtaaccatgatgtcctacggatttgatccgtacttatcctcctggagtccataccacggatcggtatatgccgtactggaatccctttcccgtatcgtgaccgccggtggtgactacaagaaagtacgcttcaccttccaggagtatttccgcagaatgagtgaagatccaaagagatggagtcagccgtttgcagcactgctcggtgcatttgatgcacagatcggttttggtctgccgtccatcggcggaaaagattccatgtccggaacctttaacgagattgacgtacctccgacacttgtttcctttgcggtcgatgtggcaagagaaaaagatgtcatcacaccagagttgaaagaagcaggagataagctggtactctttaccatcgaaaagaacgaatatgatctgccggtatacgagcaggtgatgaagctgtacgataagatccatgaactgattggcaagggcgcaatccgcagtgcctatgcactggacggaaaaggtctggcagcagcagtcagcaagatggcatttggtaacaaattaggtgtcaccattgcagaggatgtcacagcagaaacattatttgcaccgggatttggtaatatcgttgcagaagtaaaagaggagtttcttcctattataaaagaagcatccggagttgttgtcggtgaagtgaacgatgcacagaaatttgtatacaaagaaatgtcactttccatggaagaagcaattgcagcctggaccggaacactcgaaagagtcttcccaacccgcgcgaccgagggcaaggaaaaagtgcagagtgatgtatatgataccaagaatatctatgtatgcaagaacaaagtcgcaaagccgaccgtattcattccggtattccctggaacaaactgtgagtacgacagtgcgaaagcgtttgagcgtgcaggtgccaatacaattgtaaaagtattcaagaatctgagtgcagcagacatccgtgattctgtcgatgaatttgtcaaggcaatcaaccagtcacagatcatcatgttcccgggtggattctccgcaggagatgaaccggaaggatctgcaaagttctttgcaacggcattccggaatgcaaagatgaccgaggcagtaagcagactgctgtcagaacgtgacggactggcacttggtatctgcaacggattccaggcgctgatcaaactgggacttgttccttacggacagatccaggcacagagtgcggattccccgacgctgacctacaacaccatcaaccgccacatcagcaagatggtatataccaaggtcgtaacaaacaaatccccatggctgcagcaggcaaagcttggtgcaacatactgcaacccggcatcccatggagagggacgtttcgtagctccgaaggaatggctggacaagctttttgcaaacggacaggttgccacccagtatgtcaatgaagccggcgagccaaccatggatgaagagtggaatgtcaatggttcgtacatggcgatcgagggtatcaccagtccggatggacgtgtactcggaaagatggcacacagcgagcgccgtggtgaggccgttgccatgaacatctacggagagcaggatatgaagatcttcgaatccggagttgcttactttaaatagaattgtttatcttcacgcgtagtttcactcgaactacgcgtgaaatagttttaataatagaaaaaagtgaaaaaactcttaaatgcttaagaaaatattaaagaattttttcaataaaatgtaattttggtgttgcaaagatacaatacttggtgtatgattgtcacgtagagtagttaaaagagtactataaatagtacgacaagtgatgaactactatcgaggctatggaaactggaacttgttccagacagaccttacaattacagatacatattagaaatataagtcatcggaacctcagcttgctgatcttgatgctggacaatcaacgttgatatcacactctacgccgacgtctgatgtgcgaaagtttctggtcatttatgatttgtgtgtctgcagatgaaactgacgatggacttaacagtaagaccgaggaaggtcagtggaggcaattagcgagaacattggattggaaaaatcgtccgcagcggtttggaagagaagatgaaggaacttaaacgtgcagggttaaacgagtagaagagatggaagttagtcaaaaagaa

SEQ ID NO: 1039 - DNA, 682 bp, Unknown
  gut microbiota DNA sequence
ccggcagtgggacaatgtcaggcggggagtttgactggggcggtcgcctccgaaagggtatcggaggcgctcaaaggttccctcagaatggtcggaaaccatttgaagagtgcaaaggcagaagggagcttgactgcgacaccgacgggtggagcaggtacgaaagtaggacttagtgatccggtggtataaagtgggattgccatcgctcaacggataaaagctaccctggggataacaggcttatcactcccaagagttcacatcgacggagtggtttggcacctcgatgtcggctcatcgcatcctggggctgtagcaggtcccaagggttgggctgttcgcccattaaagcggtacgcgagctgggttcagaacgtcgtgagacagttcggtccctatccggcgcgggcggaggatatttgagaggagctgtccttagtacgagaggaccgggatggacggaccactggtgtatctgttgtcgaccaacggcatggcagagtagccaagtctggaagggataaacgctgaaggcatctaagcgtgaagcccccctcaagatgagatatccctccttcgggagtaagaccccttgaagactacaaggtagatagggcagaggtggaagtgtggcaacacatggagctgactgttactaataggtcgagggcttgattaa

SEQ ID NO: 1040 - DNA, 7859 bp, Unknown
  gut microbiota DNA sequence
gatcgtaacctttctctttttccctttgacagacactttctttgtcacatcataaacattgtaatccccactgatatcttttccctgtgataccagcgccttacggattaaaatctccttatccccgcttttgtaaaatacctgcagaactaatccgtcgactgcctgaatcatatcttttgtataaccactgatctttttcggaagctttacggaaaatcccactgcattttctgcatctttcacagaagtgtattccttccacggattcggaatctgctctccctcctgtgcggaaattaccggtgtttccggactctccgccgcaaatacactgccaataccacaggtcaacgccgacattgccatcatcccgcataatatacatacaaccagtttctttttcataataaattaccatcctttccgtatgtgtgtcacagcttttttgctgttctacttactatacagatcagatggtaaaaatgtttcattcttttttaaatttcttttttcagcaattctttcatcgcacgcaatgccttgcctctgtgactgatcgcattcttctgttccggagaaatcgctgccgatgagcatccgtattcatccagataaaaaatcggatcatacccaaagccgttttccccttccggttcccagccgatatatccttccatcgtctgacgggtcaccagttcccttccatccggaaggacagccgcaatcgcacagacaaagcgtgcggtacgtttttctttcggtacgccatccagacggtcaatcagatttttgtttttcacatcgtaagaagtatcctctcccatataacgggcagaatatacgcccggctctttattcagtgcatcgatttccagtccggaatcatcagccagaacaatcgcatccgtatgtgcagccacggcccgtgctttgatctttgcattttcctcgaaagtagttccatcttccacaatatccaccctgatgccggcttccttcatggatacaatatgtacatcacaatccgccataatctcacggatctcacgcattttatccttgtttcccgttgcaaaaataatctctgtcaatttaatatccctcctgaaatgcttcattgattgcgttataaataccctcagctgcctttttctgataacttgtactgttcagcagatccagttccttataatttgtcataaatcctacctcaatcagtgccaccggcacctcgcttgtgcggataatatagatactgtctccttttagcagcccccggttttcactgcccgtcgtatccacgacatttttcaggcagatctccgccagcttcttactcgacagctttgcgtcatccgactcgctgtacattacctgggttcccttcactttggtaaagtttccggttgcatccgaattgttatgtacgctgataaacagatctgcatttgccttatttgccagctgaaccctctgatccagcgtcggattcgtatccgatgtacgtgtatagtacaccctgatcctgcgtttatcctcatcaaacagttttttcaactgctgtacgatcgccagattaaggcttttttcagaaattccaagttttacggcacctgctgcgtggcttccgtgtccggcatccaccacaatgactttatcatagatatcgtgcggatcaataaaatcaaggtaaaggcttccctttttgaaccggtttttcagttcatacacctgatccagctgaagtgcgatcacgccctcttccttatccttataataagccatggatgctatatgatcactgcttcccttgatggcatactgctcgaaataatcatccacaccgcccgcaaatttgatataaatggtctgcgtcacataatcattttcaatttctacatctgcttttgaaattccctccggtagagcaatcttaagctgcgcgttcaaatcctttgactgctccaccaccgctttcggattcgccgttgtagcgatcagatttcctccgccgacttccttttgctgctcggctgccagaacagcccgttcatgtatatccgggaaaaagaaaaccgacacgcagacaatcaccgtcaggattcccgacagtactgtcacccactttaaaacgatttcgtccatcttaatccctcgtaaatgctttaatgcaaagattgcaatcctttttctcttttacgtttacaaattttttcccatttaaactgatataaccctctccgtcatccagatccacaccctgtaaaattttctctccggtatcatattcgattgccatcggatgtttggttccgggtgttttcaggtataccagcacggcataacgttccccttttttcagagaaacctttgtatcaaaatcaacggtgtaatatcccgctttctgtaacgttccggatgcaagctgttctctctgcgcaaaagacttctcattttcaaaatcgtgcaccacataaacttcatactgtgtgtttgcaccggtcgcataaaaagaagcagcagacaatgtttcgctcccttttgcctcaaacacattcgccccgtaaatctggtcactgtcatatcctaattttccaacccagccgcacagatcactctgatagatgtgatcataattatgtacatcatctacccgcgtatatgccacattatgcgtgccaatattcgtatcgtagtaggacacatagaaaattccgttttctccaaatccgtctccccagctgttctggcagataaacgcaccgtctccttccagcggagtattgaagttggatctcggataattgtcatcccatccaatgatcaccacatcatgattcggtttttccgtaccaatataacaatacgcacttgtattctgattataatacaccgaactcccctgtgaacttcttatggtactgtaaagggaagattccacaccgccatatttaaataccgcttcttttattccttcgtaatctttaccgtcaataacctgcatttcctgcacatgacgcactgctttcagcgaatcatccgtcatcccgtccccatacggatcgtccttctcatagaccggtccctgccatgctgccagataagccattcccatggtatattctccgccatcatactgattggcatgaaaagaattgctcatactcatatggtccacggaaaaattaactttttcctccggtcgcagggaagattccagggcactggttgcggcaaacgcccagcacgtaccataggaaccctgattgtatatcgttgatacccggtcacgctcccttaaatcataggaagccggaacaatcgcagaagtatctttatcggatgccgtaattgtattacttgcgatatcgaaactgcaactgtaacctaacaggttggacagatcttccagactgacaaccagctggcctctgacttcctttaaagcggatgaaatatctacttcatccccatttaaatacgcctttttctgacccacatccatcgatacggactgactgtgtttttccaccagaagacgttttttatcgtacacatgtgcactgcaattcagcgcatcccgcaacatgctgacaggaaccataatattgcggtttttgtccatgtaaaatttcgatttactgttattgtaagtctggttatcgattacggcatgaatggtctgcccgttgacttcctttgccaccatcggattccatacctgtgtatccagttctcctccgcggaaccgtcccacctgtgcattgtccacgcccagaatctgaaattttaaaataaaaaccagcgccagcacaattgtaaacgcaatataccgtttcgagtatttcatatattactgctgttccttcctttcgatcgtttttcctgctgcttctctgcgtttcgacggttttggccccataaactgataaaaataggtttttatcataccattataaatctttctgtttttatctgcctttcttcctatataacgctccgcatcctcataactggtaatcatatacagtgaccagctgtcaagtcctgcataagcctgtccgatctgcgtatacagctccggaagatcctctttctcctcgaggcgctctccatacggcggatttgtaatgacaaacccatattttttcggatgatgcagatccgcaaccgctctctgctgaaaatgaatcagatgatccacgcccgcacgctttgcattctctctggctgctttcaccacttccgcatcgatatcatatccctgaatatctacctggatatctgcatccataagatcctgtgcctcttctaccgtgtcataccacaactgtttcggaatcagatttttccattgctctgcggtaaactgccggttcattcccggtgcaatatttgctgcaatcatggctgcctcaatcgggaacgttccacttccgcaaaacggatctaccagaatacggtcctttttccacggtgtcagcataatcagtgctgccgccagcgtctccgtcagcggagccttgctggtcatcagacgatagcctctcttgtgcagggaatccccggaagtatccagtgtaaccattacctcatcctttaacaggaaaatgcgtaccggataaggtgctccatcctccggaaaccagttcagccggtagacattcttcagacgctctaccatcgccttttttgcaattgactgaatatccgacggactgaacagtttacttttaatagaagatgccttttttacccagaattttccatcctttggaatatagtcttcccaaggcagagcttttatcccctcaaacagttcatcaaatgttgttgccctaaaacgtcctacctgcaacagcactctttctgcactgcgaaggaatatatttgcacggcatatggcttccgcatctcccgcaaatgtcactctgccatcttctactcttgtaatttcatatcctaaatcataaatttctctttttgttaccgcctcgagtccaaaatgacacggtacaaccaattcatatgtatccataaatgttctcttttctactataatgtattgcatggtctgcagttctattgttacatattctcacgatttttaaaatagtttttcgaaatttttttcatcgcctcataaccaccaaccacacttgccacatgatacccctgttccccaagcatacgcgccatctgcatgcttcctcccccatggtcgcagtacaaaatcagcttgcggtttttcggcagacgggcagttcctcgttccagctgatcatacggatagctgacggcccccggccagtgttccctctcatactctttcctgtcacggatatcaattaccagtgccctgctctccctttgtttctgcctcagctgcgatgcgtaaatcagttcaaaatctttcacaatatcctccagaatatgccgttttcattaaaaaacagattacacgctgtccttcgtgtaatctgttttttattatattatgcaattttatgcattttgtttctgcctagcgcatattatcagatgcggaatcagacacatctcctgccttatctgataccctgtcttctgtcttgtctgatgtcttattcacagatttgttggattttctgttttcagacttgttggaataacaatcagagacacgattgcttccgctgcgatttgttgcactgtttgttcctgtactgttttttgacatactttttcctcctttaacgtttccccaaaaactgcatggttcaacgaatacaattatttagtacaggaatagtttctcaacttttcgagaaaatattcattatttgattgcaatccataccgcaatccattataataacttttgaaaagaagttttttcttcttttcaatgttatacctcttattaattatttatactcccctcaaaagagccggtcagacgaccggctcttttactttcttcatatgctttcatttatatttatgcattcatttcccgtttgatagctgcaccaaaggctgcttttgacagcgggaacttataaaacagcttcataagtccatactgtatcactcctccggtcagaaccagtacaatatctgccacaatatccaccagtggatgaatgaatccctttgggataaaaaaatgcagtccgatttccaaaagcattccggctccaaatataagatggatggaagatattctccctgtgcatatttaccggccaggatatctgtccgaaactgattggcaatctgcatataaatctgtcaaccttatacttccattttatgattttgttttcttcgcacccggctcagatgctgttcaaaatatcctttattgataaattctgccagcgcatactgttccaataccggtacggtacaggaaaatccgccggaagtttttttgtaacgttccatcagtctctccggcaaaatcatatatcccatacgaatggacggtgacagacttttagaaaatgtattgatatatatgaccgaactgctgtcatccagcataaacaatgtctctaccggcttaccaggcatgaagaactcactgtcaaaatcatcttccacaataaaatgatgtttttctcttgcccattcaagatattcgtatcgcttccctatggttgccgtaaccccggacggaaaactgtgaaacggtgtcacgtgcagcacatctgcccttgtctgtgccagcacatcactcctgattccatcttcccccataggcagcatttcacagaccgcacccgttccctcatagactttccggatctgatgataggacggatcttcaattccataaatcttatccgctccaagaatacgcacaaccgtaccatacagatgttccgctcccgatccgataataatctgttccggctgcgcaaataatccccggtaacgcagcagataggatgcaatactgtttcgcagaatcgcacagccctcatttggtgaacgatacagcaattcttctccatattctgtaataacacttcgcacggtcttaaaatacagggaatatggaaagctggaaagtgctgcattctgcaatcgtccatcttcgatttcttccggtatctcgggaagcatatgcagttgctgattctgctctttcatttctccgattacatgtatttcacatacataatatccactgcgttctctcggttctatatacccttcatcttttaacatctgatacgcattctctaccgtgatcagactgattccgaggtgttccgccagacttctcttggatggaagtttttctccttttttcagttttccacgctcaatatcccgtcggatcattttatatatataataatatttcggttcatcatttctctgttccagattgtaagtaagcatattcttctcccgtcattttcttttatatttgaacttttacgtgctggaatactaaaaaaggagtaagacttacgtcttgctccttttttcatacgtgcgcgagaggattcgaacccccgacaccttggtccgtagccaagtgctctatccagctgagctacgcacacatatttacttaacactatcaatcatagtgtaatgccggcgaccggaatcgaaccggtactgtgtcaccacaacaggattttaagtcctgcgcgtctgccagttccgccacgccggcatgaatgggacctacagggctcgaacctgtgaccctctgcttgtaaggcagatgctctcccagctgagctaagatcccataccgtaattgtaaaacaattactaaaacgacccagacgggactcgaacccgtgacctccgccgtgacagggcggcgctctaaccaactgagccactag

SEQ ID NO: 1041 - DNA, 525 bp, Unknown
  gut microbiota DNA sequence
gatcgttgaacattataacatatattatcgagtatttcaagtaaaaaaatggaccatcggggactcgaacccaggaccgaccggttatgagccggttgctctaaccaactgagctaatggtccaaaaaagaaaaagccgatgatcggactcgaaccgataacctgctgattacaaatcagctgctctgccaattgagccacatcggcgaataagctcttttgatgctcagctgagtatcagctttacagtcagtgactccaacgggaatcgaacccgtgttaccgccgtgaaagggcgatgtcttaaccgcttgaccatggagccatatttatctcttacataagaacatcttacataaaataactccccgagtagggctcgaacctacaacaactcggttaacagccgagtgctctaccattgagctatcgaggattatcaattgaaagtatatactttcaaaacttcatacagatttaaccgcttttttaatcaagccctcgacctattagtaacagtcagct

SEQ ID NO: 1042 - DNA, 269 bp, Unknown
  gut microbiota DNA sequence
gtgaatcttccggatggaaatggactggaatttgtaaggtggatgagatgcaattataatacatacattatttgccttacagcactagatcaggagatggatcaggttatgggatatgaagcaggggcagatgattatattacaaagccctttagtctttcggtacttcttttgaaaatagaagcacatttccgtcgcagacaggagaaaacggaagccggaaagatgatttcgggagatatcgtatttatcgcaggagaaatgaaagt

SEQ ID NO: 1043 - DNA, 8057 bp, Unknown
  gut microbiota DNA sequence
gctccaacctatcgaaagagatataaaaaacgaagaacaagaaaagaacagttgcagatgcgcattttaatgattctcattgccgtaattttgctgggatccattctgggaatcatacataaagtgaagcaggaacgggcgcagcagacggtgtctgacagcagctgggatattacagataaaaaatacgttgaccagagaccggaattagacgtggaactgcttccggtcaatgaatattcccgtccggggcttgcacttaaaaaggttcgtggaattgtcgttcattacacggccaatccgggaacgactgccatccagaaccggaattatttcgcagggctggaacaatctcaccagaccaaggcaagcagtcatttcgtgatcgggctggatggagaaattgtacagtgcattccctgcaatgaaatcgcatatgcatccaataaccgaaacagtgatacaatcgcaatcgaatgctgtattccggatgacaccggaaaattcaatgacagtacgtatcagtcattgattcaattgacaacctggctgatcggaagatatgatcttggaattgaagatgtgatccggcattatgatgtgacaggtaaaaactgtccgaaatattttgtggaacatgagagtgcatgggaagattttcatgatgatctggcggcttacatcgaaaaaaatggagtggacaaagaataaaaaatcatctacaataaattaaatataggaagtattctgaataattaacggaacagaggagaaatttttgatacaactatttacggaattacaggaaaagaaaaatgtaaggagtaatctgagtgctctgcgtgccagcctgaaagaagcaacggaagagcaaaaagcgcaggctatagaatttgtacgcgggcatgaagatctggtgtttggatttttacaggaagaggatgcaaagacgcggaagaatgcagcacttcttctgggagacctggcagtacagaatgcgttgcagccgctctggaaagcatatacccgggaacagacactgttcgtaaaaagtgcatatctggaagccatgaaggcacttcatgcagaagaaatcctttcgcagctgaaagatcgtcttgcagagctggaaggagagccggtcaccgaagaaaaccggaaacaccgggaagcagaactgcgggcactgcgggcaatcctgattcagtatgaaggaatcgatacccatcattttgatataaaacaaaataacaatcatgtacttttggtgacaaaccgcaatcatcgcggaatactggaaaatcagaccggtggaaaggcgcatccgctcggtgtgattgtacagacggatgatctgttgcagctgttgcagatccgcacatatcgggacatgttgtttttacttccggtcaaaggacttctggagcaggaaccggaaaaagcagcagagacggtgtggaagccaatgcttgcaatctgtgcaaaataccaccgggaggacaagccattcttttttcggattgagtgcagatccgcaatgacactggaacagagaagccggtttgtcaaaaagcttggatctgccattgaacagttgtcggatggaaaactggtgaattctccgggggattatgaggtagaacttcgactgattgcaaatcgtgagggaaagtttttcccggcactgaaattttatactattccagatcaccggtttgcgtaccggaaacatgcaattgccgcttccatgcacccttcccttgcggcattgattatggaactggcagcaccatatctgaaagagaatgcgcagattattgatccgttctgcggcgtgggcaccatgctgattgagcgggatatccgtgttccggcacgtgaaaaatatggtacggatatttttggggaggcaattgacggagcacgggagaatgcggctctggcaggagaacagatcaatttcatacacagggatttctttgattttaaacatgattatttgtttgatgagattgtaaccaatatgccggtgcggggaaaaatgacgcgggagcagctggaccgtctgtatgagaaatttttccggaaagcattaaccattctggaaaaggaggctgtgattgtaatgtatacaggagagattggatttgtgaagaaacagctgcgtcttcacagggaattctctcttttggaagaatattgtatgcagagtaaggcaggatgttatctgttaattataggagtaaagaggtaatggcatgaacgatgatacgaatctgatagatatatcaatgttacagcagctgcaggatcagttttgctgtgcagatcatttgtatctgatgtgtgtggataagaataaaggtgttgtgacaaaaccgtttggaacagaagaacaggtggggtttttacggacacaggtagataaacatgcctacatggaactggtagaccagatgcagcatgaccggatggaaacggttgtggagcgggaaacagcacaggatttcatgaaattgtgtgctgtttccacaaaagtagaagatcagctgcaggttgtctggattgttatgggcattataaaggagcggctgacaccagaggttcatctgccggagggaatgcttattacgacggaggagcagttttacgcatcggtagaatttctatcactgctttccggacagttgtttgagagtcgcagaaatcagatgatcgcgcagaaagcggttgaaaagagttctgtttccgagctggcgatggaataccagctgcaccgcagccgggcaatgaccgaaattttgcagatgatggattcggataacagttttgaaaaagtggctgaggatattttgcgggagacatgtgaaagtctggaaatttccggtggatgtctgttgcgcgagaatacaggggaaaatacggcagacatgatctgcgagtatacaaaagaaccagacaagtccattcttgcagaggggcagcatattccgatcggtgcactgccgttttataatggtaaaacttatatgatctcatcggactccatcatgccggaaccgtttgcacatttatttaaaacctgtcatatcagtgccggaatttttgaaccgattgaaatacaaaaccgcacggcgatgtatttttgcgtgtatgataatgaaaaaacaagaatctgggagaacagagatatcaaatttgtcagtgatgtgcgaagagttgtgcagagcatcatgcttaaaagaattgcaaagaattcgctggcaagttcctatacatctttagaggcgattctggaaaataccggatgtggaatatatgtggttgattaccatacccatgcaattctttatatgaatcacaaattcaaagaacttttctctcgcagtatcgcgggaaatcatctggaaaaaatgctgttttccgaccgggaaacaaagcgcagccagtattatgaggaaatttattcggttgttgaggaacgctggctggatgtgcataagaccgagattgactgggtggatggcagaaaagttgccatgtgtacactctatgatattaccgaaaagaaaatttatcagaaagaaattgaaaatcaggcgaacaatgatttcctgacagggttgtttaatcgcatgcgctgcgaacaggatctgggacagtttatacgaaagacccgggaaaaagatgcaacaggagcgttgctttatatgggactggatgattttaagcatatcaatgacgggctgggacaccagtatggggatattctgttgaaagcgatttcccatagcctgcgcaggatagatgggattgagaatacctgttaccgcatgggaggggatgagtttgttgtgattattccggattccgtgtatccggagctggaacggattgtgcgggatgtgacatccatatttaagaaaccgtggtttttaaagggagaagattattattgcaccataagtatggggattgtatatttcccgaaggacggagaaacggtggaagaacttgtccgtaaagcagatattgccctgttgtcggcaaaacgcaggggcaaaaaccgcgtggaatactatgatgggatggacgcatcttcctcataccgcagactggatctggagaaaaatatgcgtactgcagccatgaatgcatgcacggaatttgaagtgttttatcagccgatcattgatgtctgtcagccgggagagccatgctgtggtgcagaagcattgatccgctggaattcaagtgcacttggatttgtgaatccggcagattttattccacttgcggaatatctgggactgatcaatccaatcggggagtatgtcatgagaaatgcggcattgcggtgcaaatactggaatgatatggggcatccggagtatcatgtcaatgtaaatttgtcggttgtacagctgttgcagaatgacattgtaaagaaggttgcaaaggttctggaagaaacccgtatcataccacagaatctgacattggaagtaacggaaagcctggcgattaatgatatggtccggatgaagaagatattaagtgagatccggaatcttggtgtacgcgtggcactggatgattttggaacaggatattcatccctcaatcatatccgtgagatgcctttggatgtgatcaagattgaccgttgttttattgaacatcttggcgaggacgacttttccaatgcatttgtgcggatggtatcggaactggcaaatgccatcaatgtacgcgtatgcgtggaaggtgtggagactaagcgccagagagatattgtaaaaaagatgggaatccgtatgattcagggatttttttatggaaaaccgatgaagattgaagattttgaaaagaaatatctgatataaggaggatgatatgtacacagcattaacaattgctggaagtgattccagtggaggcgccggcattcaggcagatattaagacaatgacagcaaaccatgtttacgcaatgagtgcgatcacggctttgactgcccagaatacgaccggtgtaacagatattatggaggtaaccccgaagtttttggcagagcagctggacagtatttttacggatatctatccggatgcgattaaaaccggaatggttgcttctggtgaactgattgggacgattgcgcagaagctgacagagtatcacgcaaaaaatattgtcgtagatcctgtcatggtggcaaccagtggggcaagactgatcagtgaggatgccatcagcacattgaaaagtaaattattaccgcttgcaacggtgattacgccaaatattccggaagcggaagtgctttccgaaatgcagatcaagaccgatgcagatatggaaaaagcagcagaaattatttgtgacacattgggctgtgccgttttattaaaaggtggtcatcagttaaatgatgccaatgacctgctctaccagaagggtaaagagccggtatggtttgagggaaagaggattgacaatccaaatacacacgggacaggctgtacgctttcttctgcgattgcatcaaaccttgcaaaaggaagagatcttgaaacgtccgtgaagtatgcaaaaaattatatttccggtgcacttgccgccatgcttgaccttggaaaaggaagcggaccaatggaccatgcatttgcaattgaaggagaatattagtatccggcaaatgtgaggccgggtttatcataggttaagaggagtgtacaaatggaaaaaaaaggaacttccgtgttcagtaacggattaatttggtttggagcaggtgtatccctggcggaaatactgacaggtacttattttgcaccgcttggatttggaaaagccatggcagcaattttactgggacatctgatcggcggacttatgatgtttgcagcaggaatgattggagcgaaagaacgaaaaagtgccatggaaactgtgaaaatgagttttggcgagagaggaagccttctgtttgctgtcttaaatgtgttacagcttgtagggtggaccgcaattatgatttatgacggagcacttgcggcagacggggttttgcataccggaatctgggtatgggcgatcattatcggcgcactgattgttgtctggatttttgtcggacttacgaatcttggcaagttaaatacggttgccatgaccgcactttttattttatctctggttctttttaaagtgatcttttttggaaccggaagcgcggctccggtcgtggatgatggaagtcttacatttggtgcggctgtggaacttgccgtggcaatgccgctttcctggctgccactgatcagtgattatacaagagaagcagaaaaaccgtttgccgcaacacttgtcagtgtggttgtctacagtctggtcagcatttttatgtatatgatcggtatgggggctgctatttttaccggcgaatatgatattgcgcagattatgttaaaaacagggtttggcgttgtgggacttctcatcattgtattttccacggttacgacgacgtttctggatgcatattccgcaggagtttcaagtgtttccatttcttcaaaaattaaggagaaatgggcagcgattgttgttaccgtgattggaactgtggcagcaattgtttatccgatggataacattacaaatttcctgtatctgattggttctgtatttgccccgatgattgcagtgcagattgcagattatttcattttaaagaaagcagatgctgaggaatccgcttttcagtggagaaatcttgtggtgtggctggtcggttttgtattgtaccgggtgctgatgcatgtggatacaccagttggaaatacgctgccggatatggtgattaccgtaattgtctgtgtgattgtagagaaaattgcagcagcagtaaaagaaaaataaggtgttatcatcctacacctattaatcataagactttttgtttgactttttagaaaaagagaaatataataattttcaaacgagtagcaaacgggcgtaaatccagttttgttgctcgttttaattttataatgccatgaaaaagtgtgtagcttatcagcgtaagtccagcttgtgagataagtacatgctttttttatgtagaaaaaggaggattcagttaagatggcagaaagaaacaggatgaaggagatgccggtcaataagctcatggtacagatgggaataccgatgatcttgtcgatggcattgcaggcggtctacaatattgtggacagtgcctttgtcggaaacatgaaggagggaagtgaagccgctttaaatgcacttacgctggtgtttccggtgcagatgctcatggtagcggtaggaatcggaaccggtgtggggacgaatgcacttcttgcgcggacacttggacagggaaacagccaaaaagcagcaaaagttgcgggaaacagtttatttcttggagtaattatttatgcggtatgtctgctgtttggaattttcggagtgaaagcctatatttcatcgcagacggttgatccggaagtaatttcgatgggaaccggctatctcaggatatgttgtgtgatttcgtttggaattatcttcttttccctgtttgaaaagttattacaggcaaccggacgttcactttattctacaatcggtcaggttgtgggggcagtggtaaatattattcttgatccgatcatgatctacgggatcggacctgttcctgaaatgggagtagaaggtgctgcatatgcgacggtaatcggacaggttgcatcggcagtattactctttattttccatacgaaattaaataaagaatttgcgcatggaacaaaatacatgaaaccggagggtggaattataaaagagatttattcgatcggacttccggcgatcattgcacaggcattgatgtctattatggtttatgtaatgaatctgatcttaaaatttaatccttcggcgcagaccgcatatggattgttttataaagtgcagcagtttgtgttgttccttgcatttggtctgcgtgatgcgatcacacc

SEQ ID NO: 1044 - DNA, 122025 bp, Unknown
  gut microbiota DNA sequence
ctatgggatgggaagtaaaaatcgaattaaggatggtatgaagtacggactgatttatacaatcgtacttatggttcttggtgtggcgatcacggaaattttcccgggtgcatttgcaactttattcaacgcagggcagtcaagagaatattttatcggagcaatgcacattatttctatcagttttctttttgcaggaatcaatgtcgcatatcagggaatttatcaggcattggacggaggcatcgagtcgcttgtgatttcgctgcttagacagcttgtaattatattgccgttggcaggcattttctctattttcgtccgaaacggacagatgggagtttcgctgatctggtgggcgttcccgatcacagagtttatcgcgtgtctggccggctatgtatttttaaagagaatatggtgtatgaagcgcagagaaaagtgattttggagattgcggaaaaggaaagctgtgtgatcataggacggaatgcggattttatcttaaaagacaaagataatgtgctgaatatttttatacatggggatatgccggaaaaggtggcgcgtatctgtaaactgtataatgttaccgaagaggaagcagaaaaaatgatggcagatatcgataaaaggcgtatgacaaattatcgattttatacggatcagaagtgggggatggcaaagaattatacattgtcactgaacagttccgagcttggatatgatctgtgtgagaagatcataatggattgcaagaaatagaagaaaacaaatgtgcaattaagagataccatacatgtgacacccagatctgacggaagttgttttgctattttttcagtatttccagaacgggaataataaatgataattgcattcatataactcttcctttcattatccaacactgtgttgtacaatattataaaagttagagaaacgtttatcaaccaacaaacagatgaactggcttcgttgatacacactttatatattagtggagcacagggagtgttgttggattgacttgtccttaaaatgcggtaaaatttaagggaaagaatgaaaattaggggaatgagaaatgaagataagaacagcaaccatggatgatcttaacgagattgcaaatgtagaggcagagtgtttcccagcagcggaggctgcaacgaaagaagaatttgccggtcgaatccggtattatggaaatcacttctggattatgttggaggaagacaaactgatcgcatttgtagatggttttgtaaccgatgaggcagatttgacagatgaaatgtatgagaaggctgctatgcacaacgaggatggcgcatggcagatgatattcggtgtcaatacacttccggattatcgtaaacacggatatgcaggacaactgatccaatgtgcaatcaaggatgcaagagagcagggcagaaaaggtcttgtgttgacctgcaaggaaaaactgatcaagtattatgcaaaatttagttttgttgatgaaggcgtgtccgataaatccacacacggaaacgctgtgtggcatcagatgcggctgactttttaattcattgtaatgcgtataagtaatcgaaaaatcaatcgtatttttttacgattgattttttgattgcttttgcatataaatagcttacattgtttttgcaacgattttctcatcgtcattctgaatctcgttagtgtttttttttcttatgattgataaataatgtccggaagatcagtcttgcaagcggtcctacaaaaataagctgcagcggaaatgccatgataaaatttttgcaataggtcataagataatccggtgtaaagttggcggtaaatccatgtccgtgatagacaccgatcacactggcgaatgcaacctgccagattaccgtgaaagtctggatcgcaaagatgataaaaatcggccggtcgccaggctggacaacgcggaaggcgcacatttttgagagatgaccggacacgaaataggcaagcaatccgatgatgatatactctatccacattcccttcaatgcaataagaaaggtcgtatttgtaaagcttcctgttgcgagtaccgtgttatagactgtcatgacatagaccatcatccatgcggtgatcgctgtaaaaaatatggattctcctcgtgttctaggcattttcttttcctccgttgtatttttgaatcgcatcaagaatgagtttcataaccatagtgtttcctttccgacaacaaaaaaagacaacaaatgctgcccatccgtctgacagtggacaggtgacatttattgtctgatatgtgtcttgtatttaatttgtttttacaactcttgcattttagcagaaaaatgaaattaaagtcaagtaaaaaattttttacggttgttttctatggcgtttccggttgttaataaattctatgcatgctatattggtaggagtgaggtaagagtaacgaggataagaacagcaacaatggaggaaaatcatatgggtttggtccaagcgttacgatagcaactgcgaatcatccgattgagccatcacttcgtgaaaatgcgatgcagtataacaagaccgttcatattggggaaaatgtctggatcggcgcagggactattatagttccgggagttacaattggaaaaaattcagtaattggcgcaggaagtgttgttgtaaaagatattcctgataatgttgttgcggtaggaaatccatgtcgtgtgctgcgtaaaatcggagaacatgatcatgaattcttttataaaaatgaaaagattgactgggaaaatctgtagaactatgttaaaactaacaaagaaagttaaaaagttataatggtctcgattttctttaccattgaattttttttttaaagatatggtatactcggtttaatcagttgaacgaaagcgaggatattaaaatggatatattagagaccatgaaagtgcgacacagcgtaagacagtataaaaattaggcaattgaatcttcaaagagagaaaaaatcaatgcgttgataaaagatgttaatgcggaaagtaaactgtcgatacaggttttttacgatgaaccgaaatgttttgattcatttatggctcattacggaaaatttgaaaatgtaaagaattatatcgcgattgtcggaaataagaatgatcaggaaaaggcaggatattatggcgagaagattgtgctgaaatgtcagaaacttgggcttaatacctgctgggtggcaatgacgcatggaaaatcaaaagcgcagatcaaaagaggacagaagctactcattattatctcactgggatatggagaaacacagggagttccacataaaagcaaaagtatcgcagaacttggacaggcggatcagaagaacgaatggtttgaaaaaggtatggaagcggtaagtcttgcaccaactgctgtcaatcagcagaagttttattttgaactgaaaaacggaattgtaacagccaaaaatcttggtggtttttattccaggattgaccttggaattgtaaaatatcactttgaggccgtgacaggacatgaggtaaaataatgccggacattattatcgtagaggacaacagggagatcggaacacttttgtgcgatttcctgcgaaaagaaaattatacggtgagccttgcggacaccggggaaaaggcgcttgaaatctttgagcagtacggagccaatcttgtcgtgcttgatatcggtctgccgggtgtggacggttattccgtttgttccaaaataagagaaacctcaaacgcacacattatgatcgcgactgcaagggatgacaaggaaagtacgttaaaggggttgcagatcggcgcggatgattacatctgtaagccttatgacatcgatattctgatcgccaagatcaacggtatttttaaacgcaaatatgcattggacgaaatcgtatgcgacaatctgaaattgaacaatgtcacgcagacactcaccgtgaaccaaacaccggtcaatgtcacggaaaaggaattccagctgctgaaactgctggtcgaaaataaaggaacgacattgaagaaagaatacctgttcaaccgcatctggggaagcgacagtgaatcggagctgcagacgctcacggtacatatcaagtggctgagggaaaagatcgagaaggattcgaagaagccgaaacacattattacggtttggggaacgggataccgatatgaataattacaaaaaatttgcagcaaagttttgtggagtggagctgcttattattgcacttgcgaatattgtttattatgtgacagcaaataatcaggaaccgtgcatttcgcgtgtgcaggataaaaccggaacaatctacaggatcatttatacacagacagacgacagaacctggattctcatggatattgccttgggaattctgtttttgctgtctgtttttctgatttgttatatcggaaagaagatcataaagccgtttgagcagatgcagtcgctgaccgaggatctagcgaaaggcaatctctcggtgccggtcaaagccgaaaaaagcaaattcttaggcagattcctatggggaatggatatgctgcgcgaaacattggagagcaacaaagaaaaagaactcgcgctgcaaaaagaaaaaaagacgctgatcctgtcgctgacacatgacatcaggacgccgttatctgcgatccggctgtatgcgaaggcgctggcagaaaatctttatacgaccggggagcggcgtgtcgaagcatgtcaggggattgaaaagaacgtaaaagagattgaggagtatgtcaatgagatcacgctcgcatcgagagaggatttcctgcaactgagtgtcaatccgggggaagtgtatctgtcccatgtgatcgatgcgatccggggactttatgaggaaaaactgcataatttacataccggatttcagattgcatcctacacggatctgttgctgaaaggagatgcggaccggctgatcgaggtgttgcagaaccttttggaaaacgcgatcaaatacggggacggcaagtgtatttccatcgacttttcggaggaagaggactgcagactgatcacggtaagaaattccggatgcagcttaaagcaggaagaactcataaatctgtttgattctttttatcgcggaagcaatgtcggctcggcagatggttcgggactcggactgtatatcagccggcagttgatgcaaaaaatggatggggaagtatttgcggaaattaaggaagatgatttctgcgcgacagttgttgtgcgaaaggcataatgtgcatttaaggattgtttaataatttctcctgtaagatgagtacatcaaacgaggggaggaacgttaaaatgctttttcgtattttgaaaaaagatttgaaaagaaaaaaagtaatgaacgcaatattgctttgttttattctgctggcaacgatgttcgtagcgagcggaatcagcaatgttgtttccgtcatgaacggaacggattcctatctggataaggcggagatcggcgattatgtggtcatctcgatgggtgcggacagcaaagcgtccatcgatgagatcctgcatgagatggaatccatccgggattatcgcattgagacggttgtattcggagaaaaatccaatctgaaagatatgcacggagaagaactggaggcaaagaattctgttatttaccagtccatcgaggacagccggcttaaattctttgataaagagaataagcagattacccagatcaagccggggcatgcatatgcaaccgatgattttatggagaaaaatcatttgcagccgggggataaaatcaggattacgcacaacagtatttcttttatggtaacgctggatggtatggcaaaagatgcgcttttagggtcttccatgatgggcaacagccgtttcctttttcatcgggaggagatcgagaagctgctttcggatgaaaccatttacaatgggtatcaggggcagatcagctatattgatctaaaggatgaggcaggcgtatcggagattgcttcggctatttcacaggctccaggcatcatgttttccggcgcacgttcgctgataaaaatgtgctatgtcatggatatgatcgttgcgtttacgatgctgattttaagtatctgcctgatcatcgtgtcgtttgtcgtattaaagttttccatcacgtttacgatctttgaggagtttcgtgagatcggtgtgatgaaagcaatcggtatcagcaatttcaagatccggagtctctacctgacaaagtatctgatgttggcagtaataggagcgtttgtgggattttttatgagtatcccgttttctgatctgttactgcgatcggtcagcagcaatatggttctggaggcggataaccatttcctgttgtcggttctgggggcaattctggtcgttattgtcattctgctgtatgcttttcgctgcacgaagctggtgaagaagtcttctccgatcgatgcgatccgttccggtcagacgggggaacgttataagaaaaaatcgccgtttcgtctggtcaaaagccatggaagcaccggtttctttatggcggtcaatgatgtgttcagcgcaccgaaacggtacatgacgatcataaccacattctttttatgcacgttgtttgtgcttgtatttgtcaacgtctcatcaaccatgcgaagcgatacgtttattacaacattcggaacgcggagtgatctgtactacaccgatctgacggaagcgatgagttgtatgaatccggatggaagaaagcagatcgaggagtactttgcaaaaacggaagcgctgtttaagaaaaacggaatgcctgcgaaactgtgtgtggaaacgcagtacaaatataaggttcattttgacggaaaagattattccatcagttgtcagcagggaatccatacgaaagcatccgcgtatgaatataccgaaggggtggttccgcaaaacaaaaatgagattgcgattacaccgacggtcagcaaattgacagaggcgaaacttggagacaccgtaacgatcgattttggaaccgggacacttgactgcgttgtggttgcttattttcaaagcatgaatcagcttggagaggtcatacggcttcacgaggatgcaccgaccgattttacctatattgccaatgtcatgagttatcagatcgattttgaggatcatccgtctgcaaaggagattgaggttcgaaaagaaaagatcaaaaagctttttgacaatgaaaaagtgatgaatgccacagaatactgtgatgattgtatgggcgcggcatcaacgatggaatcggtacagtatctgcttcttggaattacactgatcgttgtaattcttgtatgtattctgatggagcggtcatttcttgcggacgagaaaagccagatcgcggttcttaaggcgatgggattcggtaacaaacgggtgatggaatggcatatgatacgattcggtattgttacgcttgtggctgttcttttggcggcgatctgttccattccggcaacgtatctgatcggcaatccgatattcggcatgatgggggccggaaaagtggcttatgtgatccgtccgtggaaaatctttttcctgtatccgggcattattttccttatgacgattctggcatcgggaatgacagcattacagatcaggacgatcaagagcaacgatacaaccaatatagagtaaacggaggaaaatcttatggcagcattgctttgtgcaaaagatctttgcaaaacctatgtaattgataaaaggcagaataatgtgttaaagaatgtaaatcttgaagtaaaagagggggagatggttgcaatcatgggaccatccggctccggaaaatccacgcttttgtatgccatctcgggtatggaccgggcaacgagcggtcaggtgctttttgaagggaaggatctgacgaaactgagcgaaaaggaacttgcaaaaatccgcttggatgagatgggattcatttttcagcagatgtatatgatgaaaaatcttacgattctcgataacatcgtgcttccggcagcagaaagcaaaaagtccagggaaagcaggcaggaaaagcaggaaagaggcgagcagcttatgcgcaaaatggggatcatcgagattgcagataacgatatcaacgaggtttccggtggacagcttcagcgggcgtgtatctgcagaagcatgatgaaccgtcccaaactgctttttgccgatgaaccgaccggcgcattaaaccgtacttcctccaatgaggttatggacgaacttgtgaagttaaacaacgaggggacaacgatcgtcatggtaacgcatgatgcgaaagttgcggcaaaatgcggcagagtgctttttatcgtggacggcaatatcaagggagagtataccggtctcaaggagattaccgatgaaaaagagagggagagaagtctgaataactggctgctggatctgggctggtagtcgggaaaggcgtttgaaacaatcggggacgataaatttatgtttcaggctattgcgcatgcgtaagtatgatttatatgatagtgtatatgaataaaaatgtgaaaaaacacattgattcatacgaaaagatgtaatataatacattaaaatataccaaaatattttggagaagaaggaagaagaaggagaatgcatacgcatgaaacgtaaaataacgtctaagttatatgagtggaaaaatatgtcagatggaagaatgccattgcttatttatggtgcacgtcaggttggaaaaacatttgaaatgcgtgagtttggatcattatattacaagaatacgatttatgtaaattttgaaacagacgaaagaattggaaaatattttgaaacagatattcatgcagatcatgtgatagctgttttggaaaaatactatcaggcaaagattgtacctgaaaatacactcataatttttgatgaaattcagatgtgtgaaagagcattaacttcgctaaaatatttttcagaagaagctccggaatatcatgtaatggctgccggaagcctgcttggtgtggcggtgaaccgggaaaaatattcatttccggttggaaaagttcagatgctgaccatgtatccaatggatttggaagaggtgttgtgggcaaaaggaaaacagatgcttacagacacgatccgggaacattatgaaaataatcagccgttgaatgagatgctccatgaggaggctatgcaggaattttatcattattgtattgttgggggaatgccggcagcggtgaaagctgaccttgcaaaagacagtcctatagagcagacggaaatcagacagatgttattaaattcttatattgcggacatgacaaaatatgcgaataagtcagatacagtgcgcatttttgaagcatatgattcccttccggcacagttggcaaaagatgctaaaaagttccagtataagttgataaaatcgggtgcgcgtgcatctcaatatggagatgcgattgactggctgattcgggctggaattgtaaataagtgtatgaaatgtagtcagggattttatccggttgcagcatatcaggatgtgagtacatttaaattatactatagtgatatgggtattatgtctgccagaatgggaatgacgctggaagcattgaggagtaaggaaacagagcattttcgtggtatattgacagagaactacgttgcgattgcattgaaaacgaatggctatgatcttcattattgggagtcagataatacggcagaagtagatttcctgatacaaaaagacagtcatgtaattccggttgaatgtaaagcgggaaatcatgtgaaagcgaaaagtatgatggtttatatggaaaaatatgatccggtttatgccatcaggatttcaacaagaaattttggaatggtaaaggggataaagtctgtgccattatatagtgtattttgcacttgatatacgaggcttcactacaaatgaatcatttgaaaaacagtaccagttattactgggaaaaagatttattaaatgtttcactttcgtctatgtaaagtgtatattctgccaagcagacaccttctttcttctatagtatttaatctcttacctaaaccaaaagccaccttttacagtggctttttacaagtgaacgatattctaattttttatttccgtcatccccggaggataaacctacatgtgaataatattctaagcgtcattcacgcacttgcgtatacaacattaattaccatgtggtttggtcggtaaagtacaggcgaaactgtattcacgactatcttcataaagtgaccagagcagtagtgaattattgtaaagcaaatgatatccacacggttattattggcgatatcacaaatattcgaaggaataagaatctgggaaaagtgacaaatcaaaaacttcatgcaccacaagtaacaaaagaatatgcaaagaaatgtaacagaacgaacaggggattgtataaggtgttttatttaaaacagtctccaaaatttcttgaaatatcaaatgctttatgctatattgaatataaagaaagacacctgctggaacagatgcctttcagttcggatagtatccattccaaaagtggatgctcccaagtatgcattttgctcttatgagcacagccttacctgtttgccgacaggtaaggcatttttatttcttcttattatttctcttatcgagaaaggtaagaaacgcaataatcaaactaccacaagacatcaacaaagctaatatcccaatgaaaatcgtaatgatttcataagctgtcatatgcgccacctcccttcttatgtattccagtaaactgtcattaagctcgggaggctaccacccctgtcatgggctttccgtaagaaaattgtatcataccaacataagggtttcaacaatattcgacagcgtgatttttcattttttccaaataaaaacacatattaatagtgaaacaaaagtgctctatcataaaaatgggaaacacatattaataataagaataaaaatcgaaggaggaaaaaatatgagaaacgatgatagttatgaagcctacaaaaggaaatttaatctgggggttgttggtgtaattatacttatgctggtgctttggtttgggaattttgatggttcgaaccacaattgggagctactggttaaaaatataggcaccaccaaagcaacttatcggtgtagtgattcttccatcactgatcttatcactgatcttttttgggacgaacataatcaggaaatgcttgaaaaatatgtgaaagaagaacgggaatgggaatctactcatgaatatgaccattttttggaagatttgggattatatagtgttatttgcctcgatggttgcattggttgcgccccatggcgcacctttggctgtaccactgtagtagatagtggttaaagaaaatgcgttttcaaataaatttgtgggtatatttgtaaggttatttgataatgttacactaataagattactacaagattcaaacacaccctgttctatataagttacgctattcggaacaactatggccgttaagctttcatttatctgattcgtccgcatgtgctgaggtaggggaaacaaccattccaacagcaagcgcccctgttaaaatttttgctactaacttttttaattggctattttggctgtataccagaaaaatagggtgttatattctttgggagcagaacaaagaaagatatcgacaggatggaacttcctgggattgtatatgtgatatgcaaaaagacgcatggtcaaaattttctttagactcattggtgacgaatagagataaaaaattttgtgatgcagatacgcttactgaagaaatgaaagaattattgatagagaagatattggtttatagcaataatgtattggaaatatactggaaagcagatttcataaaatacttttctgatacaagcaggatcattggaaaggagacaggaaagaatgagtgaaacagcaatcaaggcaccaaaggtgaatcattggatttttgtgttaaaagacggaaaatttgtatttgataaaaagacattggaagctattgacaaggtatatgcaatattagaggctgttgagccttgcggagaggataacagaagagagttgtggctgaaagcggagcgtggaactatagacgattatgacgactacgaaagcctaaaggatgaagaagtcgtagagaattatgaagagtttgagaaaatgtggcatgaagaatatccagacgaaataagctggtatcatcttgtgacaatagaacgggatgattacagggcaatatttcttggaagagagctgatctatcagtccaggattctggaagctcactcttcatatgagtacaatgttgaagaactatttgtatggatgcaggatgcagttaagaaatgtattgcttaaatgaaggaaggaacctataatgaggatgtgaatgataatctaaatgccagacagagaacaggtacaatatcaagaaaagattactgggatatattccctgaacgaaaagattcttatctgtcagacattacagccgctacgacatcggagaaaaggagcaggatattattgctcttgtcggagttggaaaaagcaaccgtgagattgcagacgaactgtttctgagtgagggaaccgtccgcaattatatcagcagcattctcgataagctttctctgcgtgaccgcacccagcttgcagtattctatttgacgaaggtgcgcaactagcaacgaaaatttaatcgaatcagaaaaccagtccttaaaggcagatggtagctgctcaaagggcacaagcgaaaatagtcatataaacaaaagaagggggaaagacgagtttatgccatttatgggtatagagcattggactattgcaatatgcgatgatgatgaaatatttctttcgaggttggagaaacaaataagggcagaattgcagcagctaaatgtagtgggggaaattgtatcatacacggatagtgagaaattgttggagacaaaactgcatcagacagaaattttttttcttgatattgatatgccggaagtaacgggtatggaattggctgccaagttggaagaacaaaatccgcaggcaattgttatttttatcagcaatcatgaggaggctgtatttgaggcaattcactataagccatttcgtttcattagaaaagcgtatttacaggcggaactttcggaagcgttgcaaagcttgaaaaaacagaaggagaagagagcgcgatttattacattagatgtaaaagagcaacagattgtgcttccggtaaaggaaatcgtttatatagagagtcaggctcattacctactatttcatgtaatgaattctgagcgtgaagaacaggttgtgcgaagcagaggaaaaatatctgattatgcagaaaaaatgcttattttccatttcctgcgtccgggaaaaagttatcttgtaaatagcatgtggatacagaattttaatttgaaggaaatcactgtaaaaacagggcagcatattccggtcagtagagataagaaggaagaggtaaagaaacaatattttggttatatgaggagtcggatatatgaaatggattagtttcataatagagattgcggcctgcattatcagttttggaatttgcacagcggtaattcgggcgcaatttagacctagagacgaattggcatggtggaagtatcttgtgtttggaatcacatttacagcagttacttattttgaagtggggtcgaatctgattgcgtcatttattggaatgggaatatgtattttttttgcctggagatattttgaaggacggtttgcttcaaaagtcatctctgttattatgattaatgtattgacaattctgataagtatcatatgtctttatgttatttcagcattcagcggagtgacaatggaaaaactgacgatgtatgggaattcgatgagacttatcgaggtttgtgtcatgaagagtctctgcatttttatcgcatatgcttatataagaactataaaaagacagagagaatttgtacaacaggaattgctgataagcgggattttttttgcttgtttttttgttgtctctctgttttttattatcctgttaaaacaggttatgttaccgcgaatcttacagatagcttttgcagtaataacgcttttgtttctgggaatcattcttcttgtgttgtggctcttgaaccacttgcaaaatcaaaatcgagaactgcttgagaacagtattttgcgaactcagttgagggagcaggagaaactgatgaaagtatcagaggaaagcaaccaaaaaatccgcgaagtaagacatgatatccgacgttatttctcgaactatctccaacttttggaagaaggtaaggtagaattagttaaaaaagaaatgcaaaagacttttgccacgaaactgtcagagaaacagcagatttatacccctaatttgatgttgaatgctgttatcaatgagaagaaggagatatgtgaaaagaaccacatacgatttgtgattcatgtgaagcttccggagaatatagatacgatagaactggcaattgctttgtcgaatcttttggataacgcgattgaagctgagcagaaagagcaggagcaggaaattcatcttaacatggaagtggtagatgaaatgtttaatctaattgtagagaatcacattcaaaactctgttctttgtgtaaatcctaaacttgtcacatcgaaaaaaaataaggctgaacatggattgggaatcccgacagttcgggagattgtcaatcagtatcagggatttttaaatatatcggaagaagcaaataatgtgattgtacatatggtaattccacttgctaattttgccaaaaacaggtaaaacttgccaaacgaattgtaaagattaagaaatcagttatcatcagattgaaaggacgtgtgtttatgtctggattatcaaaaatgatagctgatttttttgttcgtgaaaatgtaattgaacatgaggaatatgagatttataaatatggttcagatatattaattgaaaatataggtacaactatatttttgatttgtctgggttttattttcaataaagaaatcagtacactcatttttattgctgtatttgccggtataagacgatattcgggtggttatcatgctaagacaaaattaaaatgttatattttgactatcacaaattgggcagttgtaatagtgttacagaggctgcaacaaaaatttgggttcactagatttggaattgaacttattatatgttgcatggttttcatggttatgttcttttttgcaccagtagagaatccaggaaagccattgtttgaacgggttagaattgtaaataaaagaaagacacttatcataacattgatggttatcattatatcgttaagcataaggataaaattgccggacgcatcatttgctattctggtagttttaatagaagtagcgctactaattatatgggggaaggaggatgtcagatgaaaggtaagaaatttgcagaggtatttgcgtcacttgtaaaaacagtggcaattgcatccgtatctgaaagctcagattggtataattatcagactaaggagccggaaggactgaggaaaatctatttgataaaacatgaaaagaagtaaagaatgaaattggtaaaaatttttgtggaaaaacgtactttacaggaggaaataacaatgaaaaacaaattaaaaaaagcactttgcttagggttagtgttaaccatgttttcaacaacaagcgttatggcagcaacctatggatattcatttggtctcatgccggaaaatgttcaaaatacagcctataaagcaaaaactggaagtacagcctatgcatctgtgcatgttacggaaatgaattatccgtctgcctcaattaagtaccgtacacatgtagcagataagggatttacagcggagtatactgaacaaagaggcttaggaacgtgtacagttatttacaataaaacggtaaaaaaagatgaaaatgtaagtttatatggttataatccttcatcaaacggtggaattacggtttcagtaggaggaacttgggaaccataagaagttatgataagcagatgcggcatttggcgcatctgcttattggagggggaaagaaagatgggaagaaaaaattgtgcagttattatgctgacaagtgcctgtcttgttctgacagcctgtgcgccaacggagtttcccgagcagaatggcacagagcaccagaatcagatggagggggtcgccaaacaggagcttacagagtttgatacagatgatgttgagaaaattccagatcatctgacctgtcaggtggatgatctgttaatggtagatgcagatgtccggttatgggggctttcggaatggaagctttccgactggtatgcgacagaaaaaaattatacagaatcagaagaagaggcacatgagctgattcagaaaatgatgaacgaagcagggtggaaatatgaggagaaggatgtagagtgttacaggaacagtgaaggggaaaaaatttattatgtagagatttcaaatcatgaggacaatgtttatgttttaccggacagatttagttattcaactgaacgcgggtatgtttccttaaatcagtcagacttctgcggagattataagggagacaacagagaactgtacaaaaccggcagagagctggcgttcggttcgataaaagagagtgaacagctggcagtggattatgcagaaaaaatgggaattcaggtcagtgatacagtggactgctatacactggatgaaaagaataagagaatatcatggctggatcttgataaattcgacaatcacacaccggaggaagaagaaaataggaatttctcgtatgcgatatttctttatcaggattactttggcattccgggtcttagatatgatccgggggatggaaaacttacaaacgataccactttccgttcaagcgtgtgtgaagtaagtgtagacagggatggaattgcatattttcagtctgcaccaacgtatgagctggagaaaatgggaaccgaacaggagattcttcgtccggcggacattatagaaaaacaggtagagatgatgaagtcaaaggaggaaaccggtgaaatgaagctgtcggaggtttcgctggaatatctgccggtttacgataaagaaacggaattgtaccatatgtgtccggtatgggcatgttattattcgcagacagtcactcactatggtgaggtgaattatgattccgaagagaaatatatagctatttatgatgcctatacaggtgaagttctgcagaccaaatgaggggggagaaatatgaaccggtattttacaacaaatgtacttcgcatgtttcagaatcgaaaaatatatatctgcacacttggaatggcactgacactgtatatgagcggaattgcttttatccgctcagacggggattctgcgaatctgcaggatgctttttccgtcgtatccagttccgggttcattatcctgttttatctgctctgcgtgattggcggaggtctcagttactgtgaggactgtaacagtggttttaccagatacgcagtcgtaagaggtgatgcaaaaaagtatatcagggggcatcttttttctgcagcccttggcggctgtgcaagcatgcttggcggtatggcattgtatgaacagctcatgatttttacgctttggccgataaaaggctcgttttatgctatgttttcgcagaatcatgcttactttatccagaatatctggaatgctctgctactgtccctgctgggtgcggttctcgcaggattggcgatgacggtgacggcatgtattcccaatatatttgtcgggacggcaatgcccattcttatttattacatggtcatctgcctgtccaataaatatgctccgctggagctgggaccaattctgccggcatgggtatactttggcaatgcggaatttctggggggaggaatctggcagatgctttatgctctggcgtatacaggctgtatctactttgttttgtggaagattgcggcaaggcagattataaggaggatggaaaatgcttaggagtatgtgtaacaatttcagaaagtggaaaagcagctaccgggtattcatcgtctttttgtccgttttggttttcacatttatccgggaagattatttaaggcagtatgcgcaggatgtgggactagcggtgacaccatattttttcgcttttcagatggatgacggaataacgcggatgcttttttattttggggtggttttattgttttgtaatgccccgtttatggatgaccagcagatgtttgttctggtgaggacagggcggctgcgctggtttgccggacagcttgcctacattgttgccgcgaatctggtatattttctgtggactgcactgacgacagttctggtactcattccgcaggtcggattttctacggactggggcggtattatccggatgtgtgcagaaaataacggactggccggagtggtgatgcacaaggaaatcgtggaagcctatacgccacttgctgcctgtctgattacctacggactgaatgtacttgtgggtacgctgcttggtcttgttgtttttcttggaaacatgcttgggagcagaatatatggatcagcagtggccattggctggattgttttttccaatatgattgatgtggtgaggctgcctaagctcagagttctgtcaccactgcactggacgaccacctatgcttatttaaggagcgatgatgcagttccgctgtggtatattcttgcggttgaaatcgcaattattctggtgaccggatttatcattatgaaaaaatcgaagacatacacacttgacgctattgagtcaggcttatagaacatttgctgaaggcagagaggatttagagaatggaaaatttgatagaaatacaggatgtcgtaaaaaggttcggggaacagacggttctggaccatgtgagcctttctgtcacacccggaaaaatatatggaatcatcggaaggaacggaagcggcaagacagttctttttaaaagcatctgtggttttgtcctgccggatgcggggaaaatcctggttcgtggcaaacaggtggggaaggatgtggatatcccacagggaattggaattattattgaacatccgggttttctgcgggattattcaggctttcagaacctgaagcttcttgcgcgtctgcagaaaaaaatcacagatgagaagataaaagagagcatccggctcgtggggcttgatccggaagataagaagaaggtggggaaattttccctcggcatgcgtcagcgacttggaattgcacaggcaattatggaaagtccggacatcctcattttggatgagccgatgaacggtctggataaacatggcgtggaggatatgcggaagcttctggttcaattaaaagaagaagggacaaccatcctcgtagcgagtcataatccactggatatagaaattctctgtgatgaggtgtacgagatggatgccggagcaataacgaaagttcattaaaacaaaaaaaccaagcagggaattattatataatgcttattgactgtgcaatcatacaagaatatattcctgtctttgacagttattagaagaaaaaatcgctgtatccattgattttactggggttcagcgatttttgccgttgttttgaagtatagtaatttattccttccctttgcagatataaaaggactctgcatttttggattttgatatatgaagatgcatatgcaacaccttcttattatacaatacaataacagaaaataacatatataaaaacataaaatttgacgcaaaaaaagcaggttttataaggcctgcaagtactttttctattattcaactgtcaaactcccgagtaggcggtgatagtgatgcgctgttgacaaaatgtagtttacaacataaaataaatatgaattaaatataacacttatcgttgccaccgggcagcgattaaatgaaaggtgttcaggacaccgccgtaggtacagcgcattaaaaatgtgctataaggcgatgccttggatacttttttctttttggtggcaattgggaaagaaaggagattttatagtgaagataagaataaattcttagaagatttttgtaaacaaagattaacttatggtaacattgagggaaatcctgaatttaaagcaggagtctgcaagctttataaaactattaaattggatgagattatccccacgcatggtgctacgggtgccaatcatcatgtgttttattctctcatttcgccgggagagagagtcattagcatcagaccgacctatcaacaattgtattctattccggaatcctatggtgcagatgtgcagttgattgatcttaaaaaggaaaatgggtatcttcctgatattgaggagattcgccgtctggcaacaccggaaacaaaaatgatctgcccattgattcttatacgttttgtgaagaaatgtacaagcagacaggtgcttttgtcacgccaggggactgttttgaacagtcgcacagcatgaggattggatatgcctgtgatgccgaaatcctgaaagctggtctatgtgcggtcagcgaatatattaagatgaaattgaaagtgaattaaaaaatcatgtgatttatccgatatatgaaatataagggaaacaatggatatatttcacggaggagacattatgaaagtaggagaggcaagaggaatctacagttctgttctgaaatcatacaatcagcagaaattcaaactgtcaaagcagcgaaatgagctaaaggaacggatggaaagcacaccggacggtaaaacgttgtatgccgatgaggcagccactctggatttgcaatataatgccgttgcagaaaaacaggatgaatatcaggattatgtagatcagcttatggagcagtgggaaagcaagtttaacagtgttgcggcaaagcagcaggacgaggctgcgaaagactacagtgaggaaatgggaaaaatcatgacggtagccagacgcatcatgcatggagacattgtgccagcacaggatgagaaaaagctgatggaatttgataaggatctgtacatgatggcaaaaaatgccggaatgatggcgcggttggaaaaacgcaaaaagtataagtcgctttgggatgatgaggaaaagaaagagcgtgaggatccaatggaagcagctgatgcagaggaagcatttgcagccggaccggaggttgtgtcggtggaatcggttatggaggcagcgactggggagatggagtcggaataagagtaaatggactttcaagttggtaaaaattgtgctaaaataacagttagaaataactaacctgaaaggagagacgtaactatggtaatcaggattacagtagaagcaatcgtgtacagtctgctttatacagcgtttatgctcgttttatttagaatccagggagcaaaataccagctttacaattatccacctgcaattaaggcgcgggctattgaaaaagggattacaacacaggcggagttggatgcacatgcgaaaaagaatagagtattcgggcttttcgtgtaagtgagtatggaaatagcatcctatgtattttttacaagaaagtttagtttgactttttagaaaaagagaaatataatgattttcaaacgagtagcaaacgagcgtaaatccagttttgctgctcgtttttatttttatgatgccatgaaaaagtgtgtagcttatcagcgtaagtccagcttgtgagataagtacatgctttttttatgcagaaaaaggaggattcagttaagatggcagaaagtaacaggatgaaggagatgccggtcaataagctcatggtgcagatgggaataccgatgatcttgtcaatggcattacaggcggtctacaatattgtggacagtgcctttgtcggaaacatgaaggagggaagtgaagccgctttaaatgcacttacgctggtgtttccggtgcagatgctcatggtagcggtaggaatcggaaccggtgtgggcacgaatgcacttcttgcgcggacacttggacagggaaacagcaaaaaagcagcaaaagttgcgggaaacagtttatttcttggagtaattatttatgcggtatgtctgttgtttggaattttcggagtgaaagcctatatttcatcgcagacggttgatccggaagtaattgcaatgggaacaggttatcttcgaatatgctgcgtgatttcgtttggaattatcttcttttccctgtttgaaaagttattacaggcaaccggacgttcgctttattctacaattggtcaggttgtgggggcaatggtaaatattattcttgatccaattatgatttatggtattggacctgttcctgaaatgggagtagaaggtgcagcatatgcgacggtaatcggacaggttacatcggcagtattactctttattttccatatgaaattaaataaagagtttgcgcatggaacaaaatacatgaaaccggagggcggaattataaaagaaatttattcgatcggacttccggcgatcattgcacaggcactgatgtctattatggtttatgtaatgaatctgatcttaaaatttaatccttcggcgcagactgcatatggattgttttataaagtgcagcagtttgtgttgttccttgcatttggtctgcgtgatgcgatcacaccgatcatcgctttttcttatggaatgggaagcaaaaagcgtatcaaggatggaatcaaatacgggctgatttatacgattgcacttatgatcctcggtgtgctgatcacggaaattttcccgggtgcatttgcaactttatttaacgcagggctgtcaagagaatattttatcggagcaatgcggattatttctatcagctttctttttgcaggagtcaatgtcgcatatcagggaatttatcaggcattggacggaggcatcgagtcgcttgtgatttcgctgctcagacagcttgtaattatattgccgttggcaggtattttctctattttcgtccgaaacggacagatgggagtttcgctgatctggtgggcgttcccgatcacagagtttatcgcgtgtctggccggctatgtatttttaaagagaatatggtgtatgaagcgcagagaaaagtgattttggagattgcggaaaaggaaagctgtgtgatcataggacggaatgcggattttatcttaaaagacaaagataatgtgctgatttttatacatggggatatgccggaaaaggtagcgcgtatctgtaaactgtacaatgttaccgaggaggaagcagaaaaaatgatggcggatattgataaaaggcgtatgacaaattatcgattttatacggatcagaagtggggtatggcaaagaattacatataaatatgattacattgcttttgcaacgattttctcatcgttgttttgaatctcgttgctgcttttttctttcttacaattgttacaacaaaagagaaatttgaacaaagaaatggtgccgagaaaaatgctgtttattgtattggacagacatctgtaagtcagtatgctaatctttgtagtgtaccattaaattctattttaaggagaaactatgtatgggattaacagatacaagtaaatttttaagtctggtactcagacataaaccggatacaataggaatttcgctggatgaacacggctgggcgaatgtatcagagttaatagaaagcatttcaaagacaaggccgtttgacatggaaatgctcgaaaaaattgtacaaacagataataaacaaagatattcatttaatgaagataagacgttcataagggcaaaccagggacattccatacccgtagatgttgaattaaaaaaagccataccgccggagtttctttatcatggaaccggggagaagtatgttgcatcgattgataagaccggtctgattccaaagagtcggttatatgtccatttatcaggggatgaagatacggcagtcaaggttggaagcaggcatggaaagccggtgatttacaaagtggctgctggaaagatggaaagggcaggttatgcgtttttcttatcggtaaacggagtctggcttacaaaagaggtgccgaaagagtatttgattaaaatggaataagagtaattccgattgaccattttgagtgtctccttgcttaggctttattgttgcgtgcaaattgtatttctgtgttaatgtcatttaaggataaatcctgcagattgttttgttctgcggaatgacgcagggcattaaaagcagagcgtccgtcctctaaagaaacgctggtggatgcacaaatttcaaatggaattttacgttctctgacaactgcccgcgcaaaaatattaaatgcggtggaagcgttcataccaaattctttacataaattatcaaattgattttttaaagaccatatggagcgctggtcgatttttgtaaaaagtgcaggtagaaacagttaagcaaagatgttatcatttaaaatatcaaagtgaaatatgtggaggaactatattggttagagaaatttatgaaaatgaattaaaggatctgcttgaattatatttgcatttgcatgaaagtacaatttcggaaatgtcagagtatttaagtaaaacatggaattgtgtattttcgacagcaggacacgcaatagacagcgaacagagagggcaggggctggaaattgctttgccaatcacagtgggagacaatgtctggattggaacgaatgtattcgtgctgccgggcgtgacaatcggaaacaataccatcattggtgccggaagtgttgtgaataaaaatattccggatggtgtgatcgcggccggtaatccctgtaaggtaatccgtaaaataaccgattccgataagaaaaaatatccaatttttgaggaaaatcatgaacattttaatcatagaagatgatgcagccatccgtcaggaattaaagctgctgttagaaaatgcactgtatcaggtcacggtattgacagagtttcatcacgtggtagaggatattctgcaaatagagccggatctgcttctgctcgatgtaaatctgccgcagcaatccggatttgaaatctgcaaaagtataaggaaaacgtcggatgttccgattattttcctgaccagcaggacggattcgatggatgaattaagcggaatgctgcagggcggcgatgcttatatcacgaagccgtttcagccgccgttacttctggcacatatcgcagccgtattaaaacgggcgaaaaaagcagacataccagagaagatgacctgtaaaggtgtggaacttgatgttgtccgtggttgcgtaaaatatcagggtcagcaggtggatctgtcgaaaaacgaattgaaaatcctgcattacctgtttttgcatcagggagagattgtgccaagaatcgaactggtggaatacctgtgggatcagcaggtctttattgatgataatgccctcagtgtaaatatcacacgcctgcgcgcaaaacttgcagaaattggcgtatgtgactttattgagacaaaaagagggatgggctatcgcatatgaaactgacagaatatctgaaagacaaggtgttgctactgcttttacatatggtatgcatggctgggcttgttatctttttgcggctgaccggctattccatggataaatgtgtgattatactggtgtgttacggtgtaatactggcaggatggcttttccttcagtttttttcacgcagaagctatttcagaaaattagagcagcttacggatcagctggacaggcgttatcttcttggagaactgatgccggaatcgtttgggctggaagatcgcaagtaccgggaactgatccgcaaatccaacaaatcggtaatcgagcggatacaccagatggaacaaaaccaaaaggattaccgggagtacattgaaagctgggtgcatgagatcaaggcaccgatcacggcgattgcgttaaactgtgaaaataaccgggatgagaggagccgctatctccttgtggaaaaccgcaaggttgagaattatgtggatatggcactgtactatgcgcgtatggatgcggtatacaaagactacatgatcgcggaatccaatctgcaggaagtggcacaacaggtgcttttgcagaacaaatattatctgatccagagccatgtaaaggcggaagttgcctgccccgatacggtatacagcgataagaaatggatcgcttttattttaaaccagctcattcaaaacagcgtaaaatacggcagaagtgagggtactcacattcagattgttactaaaaaaacgaaaagcggtgttcttttgtgggtaaaagatgacggtatcgggattccaaaggaagaactcccacggatttttgaaaaagggtttacgggaacgaacggaagaaaccgggagcgttcgaccggaatgggactgtatctgtgccgtaaactctgtgacaagttaaatatagaaatccgggcagaatctgcggaaggaaagggaacagagatcatacttatgtttccggtgagtgaatatcttaccggttacagggagacataacgcgtttatctttcaaaactgtaagattcaggaaaggtaatttcatacaaagcggaaagatcccgtgttaaagtaggcatagtgaagaaaaaatgatattctttactatgccttttatttacaagcgagggaaaggagcgtcagaagatgcaggaaatcatacgcgtaagcgatgtggagaaatattatggaaacggggatcaggtgaccaaagcggtggatcgtgtcagttttgccgtgcagcagggggagtttatcggtgtgatgggagcttccggttccggaaaaacaacgcttttaaatctgttgtcaaccattgaccgggtgacagcgggacatatttattacggagataccgatatcacagaactgggggaagaacagctttcggaattccgtaaaaaacagcttgggtttatctttcaggaatacaatctgctggatacgctcacgctggaagaaaatatcatgctcgttatgacgctgcaccggcgtggcaaaaaggagattcagaaacggtgcagggagctgcttcgcattctgggaatcgaggaggttaaggataagtatccgtatcaggtgtccggcggacaaaagcagcggtgtgcatgtgcccgtgcacttgcaaattatcccacacttcttctggcagatgagccgacgggggcactggattcactggcagcgcagacactgttagagacatttacggagatgaacaaaaacatgggggcaaccattctgatggtgacacacgatgctttttccgcaagttattgcagccgtattctgtttctgaaagacggacggatttttcatgaactggtgcgtggggaaaaagaacgccgggcgtttttaaatgaaatactcgatgtgatgacactgacgggaggtgaacgttcccatgatgtgtaaacttgcttttcgaaatgtaaagcgcatggcaaaagactatatagtgtattttatgacgatggcggtcgtgaccgcactcatgttttcgtttcatacgcttttgttttccaaagatgtgcagaatctgtttcagatggatgccatgatgagtgtgatgacgggacttgcgactgcttttatcgtgccgatcattgcgtggctgatcaattatatggtgcggtttgtactggaaaagcgaagccgtgagtttgggatttatcttctggtcggggtaaagaaaaaagagattgcgagactttattttgcagagaatctgctgcttggagcgggcgcatttcttgtagggatgggactgggcctgctttttcagcagatccttctgtccattttttacagcatggtgcagctggattacaaactgcatctggaatggaaccgaaactgtattttgatgacggctgcatgttatctgtgctgttatctgctggcgctgtttcgtagccaaaaaaaattccgcaaaatgaatatccatgatctgatggacagccagagacagaatgaggaaatcaaagaaacacatgaaaaggcaaagagatggttccttccgttatctgtgctgtttcttgtcgtattcggtgtgtttctgttttgttttaaagcatgggataccggagttgtaatcgcttttctcattggactggtgctgacgatttatcttttttacacaggcattgcggcgtggatcgcctgttatgtcagaaaaaagggagctgctatttaccgtggggatgcgctgtttctgctccggcagttttcttctaagatccggacactgcggtttaccatgggaacactgacggcactgtttactctggcgatactcggaagttcggtggcatttatgtttaatcatttccagaatgaggtgcttgtgagcaaatttccgtttgatgtgcaggtatacagcagcaatgtgaaggatgagtttcagcaggaaattgctctgctgaaacaggagacagccataaaggaaatttttacttataaggtttatgagaacgaaacgaatcaggtcaatgcatatctgtatacacatctgaaagaatttggatcagagtatcggaacgcagatggcacaccggactggaaaaagatcagtaaaaatgaagaactggcatattgcaattacgatacctatatgggactctcggattacaaccggctccgtaccatgatcggactttcggaagtgcagttaaaagaagatcagtataccatccatatcaaagaccgcgtgctgaatcagaccggggatttttccggtcggatcaaaattcagggaacagatgggacattatcttttgcgggctatcacacggagggattttcgcagaacggccacaacggaggggattatattattattgttccggatgccgttcttgcacagatgcatccctattatgcagaattggtggcggatatcaaaggcgaggcacctgcggatctggagaaacggctggatgatctggagaaggatccggataaaattagtgtgcaggggcacgccatgacggaagcagcttcggatgactgggatggggaagcacttggaaattcctgttcgggttcggatacaattgttacctatacggcaaaaaatcttgtgcgtgacaatctgattccggaagtgaaatatatgttatcttcgctgatgtttccgcttttttatatcggactggtatttttgtgtgtggcactgaccgtgctttccgtgcagcagctcagcgattccgtaaaatacaaattccgctacagggttctctttcagattggttacagcagaagagaaatccgcaggatgattttaaagcagcttgccgggtattatctttgtccggcatgtgtgtcacttgcaatcagcggactggtctgtgtatatgttggtggtaagtttgacttttatacgggggttcgggcggcaccggcaacttattttttgatttcttcggtattgtttttcggaatttatctggtgtattttatcattacctatattggattctgccggaatgtggaagagtgggggtaagaaagggatggggagaaaatgaagaaaaagaatcgtgcgttttatcattatttcattccggtcatatatgctgtctttgtatatatcctgtgggaactgaccggaacattggtggcttatgtggttggaaaggtaatggacaactgggaggaaactttatacagttcttatatttccatgttattcaatgaagtgttgacgtttgttattatgtttgtattgtttcgcaaaaaagcagatttcgtaagaaaagaaaaaagaaatgggtcatggttaccggtattgggaatgtttatttttccgttaatacagattgggaatgatcttatgactctcgttcatggaaaaaaagttttttcactgctttccggtaaagggatttgttttttcctgatctgcggtgtggcaagtcttagtattggactgctggaagaatatgtgtggcggggaattctgttaaatatgtttcttgctgcatggggaaaaaagaaaaatggaatttattgtgcggtagttgtgtcttcccttggatttggtctgtgccattaccggaatctgctagtgggacagaactttgcagatacgacaaaacaggtattgtatgcgatttgttttggcatgtttctggcagcactttttatacagacgaatcatttattcattccggttcttgtacatggactttgtaatttttctaatttttttatgaatgaaattcttggatggaattataccgtttggaaatatgatgatattttgcagggagtattagccgttttttatttgatcgcaggcctctatgtggtttacaggagcgtgcagaaaaagcagaacataaggaggaaaacagaaaaatgagtaccaaaaaagtaattggcggttcggttgctgccatagttattctcatcattgcacaacttgcagcacagcttgccgcaagtgcattgaacctgataaagattccggatggaatatgtaatatcattgcaggaattttttatgtcggactgacttatgttattttaaagatatatattgagaaagtgatcaggttacctatttctgattttggaatgcccgtatttcatattaaaagaaaatggattctaattgctattctgttgccactgctggtaaaaggaagttatcttttgttctttcagggtgcgtatgtttcctcgcatatgaatggaaagcagatatttcgtacattaagtgccggaattatgtttaccggaatcgcggctggatttgtcgaagaaatggtatttcggggcgttattttaaatcttttaaggaaaaaatggaatcgtaaggtggcggttatcgttccatcggtgctgtttggcatggttcatattctggaaatggatttttccatcggaagctgtttgcaggttcttgttgcaggcacgatggcgggaattatgttttcaatgattgcaatcgagagtggttctgtctggaacagtggaatcgtgcatgccatctggaatattgtaatgatcggtgggggactggcaattggacaaaaagcggatcaattctctgtcatgacttatgttcttgatgcaaaatcatttgcggtgacgggcggagaatttggtatagaagcgtctgttatttcgctgatggggtacatcatagttactggtgtggcttttggaatgaatcaacacacagatgcataggaaaacaaaagttgacagcacagttagcgtgtgctaacttgacattgacaggaacgataagtgttgattattgattggcaagtcgagggaaaaactatgaaaaagttgttttttgtttcttgttggtgcagatgatgattccttctgggaagcgggaagagtagaatataaataaagaatcgcgtgaatagtccgatatatgaaatgtaaggaaacaatggatggatgcatttcacggaggaaatattatgaaaacaggagaggcaaggggaatttacagttctgttctgaaatcatataacgagcagaaattcaaactgtcgaagcagcgggaagagttaaaggagcggatggaaagtacgccggatggaaaaacacggtatgcggatgaagctgctacactggaactgaaatataatgcggttgcggagaaacaggacgagtatcagaattatgtaaatcagcttgtggcgcaatgggaaggtaagtttaacagtgttgtggcaaagcagcagggcgaggccgcaaaagattatggggaggaaatgggaaagatcatgaccgtggcaagacgcttgatgcatggagatcaggtgccgatgcaggatgagaagaaactgatggaatatgataaggatctctatattatggcgaaaaacgccggaatgatggcgcggttggaaaaacgcaaaaagtatgattcgctctgggaagatgaggaaaagaaagagcatgaagacccgatggaagcagccgatgcagaggaagcatttgcagccggaccggaagtggtgtcggtggaatctgtcatggaggcagcgactggggaaacggagtcagagtcatagtcataggatggtttaaaaactatagataaacaaaaaggattcatccgtctggatgaatcctttttcgatgcaggagatgggacttgaacccacacgatattgctaccacaggcacctgaagcctgcgcgtctgccaattccgccactcctgcgaacaaatgctattctataggaatctgagcaatatgtcaatagataattttaattttttttattttgttgcaataaaagaaaaaatttaaaaaaattaaaaattaccattgacatatgagggagagtttgctattataaacaagtcgctaagacatgcggaagtgtcggaactggcagacgagcaagactaaggatcttgtgatcattgcgatcgtgtgggttcaagtcccatcttccgcactaagatgtgagaaagccttgagagatcaaggcttttttgttatataaaatatggtataatgaagcatgctgatgcacacaacaaaaaggataactatataaatatgaatattcaaaaacagtttataaaatatgtttcccagaatatctgtggaatgttggggatttcctgctatattatcgtggatacattctttatctcgcaggcagcgggaacggacgggattaccgtattgaatctggtgttgccggtatataacctgatttttgccataggatcgatgattggggtaggatcggcaacccggtatacgatattaaaagcacaggaagatgacagtgcaaagaaatattttgcaaatgcgattttgtgtatcctcataatcagcattccatttgtcctgtctggcattttttctccggatacggtgatgcatatgatgggggcggatgccgggatcacgcagctgggccgcacatatacgaggattttcttattatttacaccgttttttatgatgaattatgtgttttctgcgtttgtccgcaacgacaatgctccgaccctcgccatgattggaacgatgatgggaagtttttccaatgttgtccttgactatgtgtttatgtttccaatggggatgggactggcaggagcagcacttgccacagcagcctctccgatcgtcagcatattaatctgcagtattcatttttgtcagaagaaaaatacggtacagtttgcaaagaccagaccatcggtacggatgcttacagcatcctgccagctgggggtgccggcatttgtgggagaattttcttccggagtgacaacaacgctttttaattacctgattttagggcttgccggaaatgtaggagtggctgcctatggcgtgattgccaactttgcactcatatttacctgtatttttaacgggatttcccagggagcccagccactggtcagccgttattacggagaagggaatgaacgtgcggttaaaaagattctgcatctgggactggctacgggcgttgttttcagtcttttgattatttcgcttgtctggggatttacagacccgatggtagccttgtttaacagtgaacattcggtaaagatggcggaatatgcatttacaggaatgcggctttatgtgatcggatttttgtttgccggtttcaatattatcggaaccgggtatctgagtgcatcggagcatgcaaaagaggcatttacggcctcggtttgcagaggatttgtagctattgcggtgtgttccgtgatattgtcacgtatatttggaatccgtggtgtctggctgtcgtttatggctgcggaagcactgacggcaggaattacggcatgggcgcttcttaaagatcgcaaaaaggaggctatggtatgaagtatgataagaaagaacctgaaacgatggatgcagatccgatgcgtcttttggtttccgccatactggcatttacggtgatgctttttatcaatgggtttgtcggaagtatgggtggatttcctgcgtttgttgcatttacgctggtatttttccggatacggacccgtgcgggaatggaaaacggagggatgcagcaggaattgtcagatcgtcagatcacaggacggctgttgtggaaatatgctgttggttatctggttttatggggaattttaagaattgcgtttctgatctcccgggtcaccggctggggaaatatcaatggagcttccgcagtggaatatgtacggcagatgtggaacacatcgcttttggaaaaatgggcatatttttttgcggggatgatcatgtttgcgtttgtgctttcactgtttccgcttgctgtaatcagggaaaaggtgcggtggattcgctatgcattagttgatggtgcggtgtttgcactggtatgtcttggaattaacggcgtctgtcgtttgaaatttgaacagaaatcatcaggcagagcaacatgtctgatcgatcatctgctgctttgcggccggatgcggacctggcaggaaatcacctgtctgttggcaatggttgtttttattcttgtcatcggtgcatttgtatttagctatgcatccagacagtatgcggttaaaaatatagatggaataccggcatctgccggggaagaagaatcgcgcagacaccggatgatcagaaagattgtgacggttggctgcagtattgcggctgctgcaattgttgtcgtgatagtacttctgatgccaaaagataccgcaggggattatacgaaggttgcggaatttctgactgaggatacgcggatgggaccgatggaatatggagatgcggtttatgtaccggtaaatgaggaagcggatctggagaaaaacggaattgcccagggctatctggcagagcgtggagagcgctgcgacagtcggttttatcagcttgcgattgcaaatcttctgtataccgatccgaccggaaaaacaaatctcgtacagacagccggaaccgatggaggaacatatgcaccggtggcattggtggaaacagacaaggcatgggaaacggatgatgtgtttcttctctgggatgaagactgggctttggaatcggcatattcgcatgagccgacaggttatgtggcatgtccggcggatctgatacaggggcttaggatgcagtttccggatgtgacctaccgcacagcggatttttcggagtatgatgcctattttacacttcggggatatcaggagatggagcaggcactggaggaagatcctgtggatggagactgggtcggatgtattctggtgaaagataacaaattttattttggaagctacgaaaatcagattacgggtatctgtctgcaacagctgcggaaagtactcggaggaaatgcaaaataaaaaaggaaatcaggaattcacgcagaatatataatatgtagagttgtttgaaatattgtaaggattttggcggtttgtgccgcagaaatgagcagaatatgacaattcgggaaagaatagaacagatagaagcagatactttaagtccgtacgcctgtctgtccataaacgcaaagggcagagacagggaggaaccgcagtgtgatattcgtccggtctttcagagggaccgtgaccgtatcctgcacagtaagtctttccggagactgaaaagtaagacgcaggtttttctcacaccgatgggagatcattaccggacgcggctgacacatacgcttgaagtatcgcagaatgcgagaaccattgcgaaggcgctccggctgaatgaagatctggttgaggcgatagcattggggcatgatctggggcatacaccgtttggacatgcaggagaatttctgctgaatcaggtgtatgaaggcgggttccgccacaacgaacagagcgtacgtattgtagaaaaactggaaaaagacggagaaggactgaatctgacctgggaggtccgggatggaattttaaaccatcagacacggacgattccgcacacgctggaaggaaagattgtgcgcctgtccgataagattgcatatgtcaattccgatattgacgatgcgatccgtgcaatgattctggatgaggaagatattcccgtggaactgcgtcgtacgctgggatttaccacgagagagcgcctggatcacctgatccacgatatcatcagcaacagtatgggaagagacgatatcattatgtcggatgagaccgcggaggcgctgcgggatctgcgcttgttcatgtttgaacatgtataccggaatccggtcgcaaaaggcgaggaagtaaaagctaaggccatgctggaacagatgtattatttttatatggaccatatcgagcagctgccggcaaagttattaaaaatgctggatgagggtgaagacaaagggcgcatcgtctgtgactatatttccggtatgacagataagtatgcgattaccaaatttaaagaaaattttatgccgcaggcatggaaagtggatggatattgatgactagagaaaggaggggatttccacgccgtatttttcagatgatctgattgaggaggtacgttcccgcaatgacattgtggatgtgatcggcgggtatgtgagtctgcagaaaaaaggaagtacatattttgggttatgcccctttcataatgagaagacgggatcattttccgtttctccgaataaacagatgtattactgctttggatgtggagcgggaggcaatgtttttacatttctgatgcagtatgagaattatacttttaccgaagcgatgcaggtacttgccgatcgtgcgggaattgaacttcccaagcaggagatgacaggtgcacagaaacgtgaggcggacaagcgcacgaagctgctggagattaacaaagaagccgcaaagtatttttataaacttctgcgcagcccgagaggggaaaaagcatatgcgtatttccgtaagcgggagctgtcggatgaaacgatgcgcaaatttggcctgggctattcggatcagtacagcgatgatctctatcgctatttaagacatatgggatatgacgatgcgctgctgaaagagtcggggcttgtctccatcgatgaggtgcgcggaggtcatgacaaattctggaatcgtgccatgtttccgatcatggatgtacataaccgggtgatcggatttggagggcgtgtcatgggcgaaggggaaccgaagtatctgaattcgccggagacgaagatttttgacaagagccggaatctgtatggattaaatattgcaaggacaaccagaaaaccgcagctgcttttatgtgagggatatatggatgtcattgcactgcaccaggcaggctttgacaatgcggtggcctctcttggcacatcgcttaccagtggacatgccagtctgctgaaacgctacaccaaagaagtgtatctgacatatgacagtgatggggctggggtaaaggcggcactccgtgcaattccgattttaaaagaagttggaattatcacgaaagtcataaacatgcagccgtacaaagatccggatgaatttatcaaagcacttggggccgaagaatatcagaagcggattgatcaggcggaaaacagttttctgtttgaaatccgtatgctggagcagaattatgatatgaatgatccggagtccaagacggcattttataatgagacggcgcggcggcttttagcctttccggaggagcttgagcgcaacaattatatccaggcggtcgctgataagtacaggattggctttgaggatctgcggaagcttgtgaataatctggcaatggcagggagcgggattacaaaggcggctccgttaaagagcggtatccatgaaaaaaagaaagaagatggcatgaaacagtcacagaagctgcttctgacctggctgatcgaggatacgcggctttttgacagcatcaaaggatggatcacggaggaagatttcacggaaccgctgtatcgcaaagcggcacaggagctgttcactcagtatggggagagcggacaggtgaatccggcaaagattatcagccggtttcaggaggaggaagaacaaaaagaaattgcggggctttttaatgcaaaaattcatgaagtagagacaaaacaggacaaagaaaaagcattaaaggaaacaattgagagaatcaaggaaaacagtattgatgttcgaagccggcagtcagatccgaatgatctgacggtcgttatgcagctgatcaatgaacagaaggaattggagaagctgaagaaaacgcatatttctattgattagggacaaaatagaaagtaacctgagaggacgaaacgacatggcaaagaaaaaagaagagaatgcagcagtggaaacggaagaaacaaaggcaaagttcagagaaaaactgaaaagtctgctggaactgggaaaaaagaaacggaacattctggagtatcaggagatcagcgattttttcagggatatgaatcttgacgaagaaaagatggagaaggttctggatttcctggaagcaaataaagtagatgtcctcaggatcagtgacggggatgatgaggatgatgatatcattctggatgacgaagacgaggtagaagtagaaaagattgatctttcggttccagagggcgtaagtgtcgaggatccggtacgcatgtacttaaaggaaatcggcaaagtgccgctgctgtctgcagacgaagaaattgagctggcacagaagatggaggccggaagtgtggcagttgaaaaaattccactgctcaaagagcgtctggcagaaaccggtgatgaacaggaaaaagaagaaatacaagcggagatcaaagcattgcaactggatgtcgaccgtggatcagatgccaaaaaacgtctggcggaggcaaatcttcgtctggtagtcagcattgccaagcgctatgtgggcaggggcatgctgtttttagacctgattcaggaaggaaatttgggactgatcaaggcggtagaaaaatttgattaccgcaaaggatataagttctccacttatgcaacatggtggatccggcaggcaattacccgtgcaattgcggatcaggcaagaaccatccgtattccggtgcacatggtggaaacgatcaacaagctcattcgtgtcagcagacagctgctgcaggaactcgggcgggaacctacgccggaagaaatcgcggaagagatgaagatgccggtggaacgtgtgcgggaaatcttaaagatttcacaggaaccggtatctttggaaacaccaatcggagaagaggaagattcccatctgggcgattttattaaagatgataatgtaccggtaccggcagatgctgcaacttttacgctgcttaaggaacagctggaagaggtactcggaacactgaccgagcgggagcagaaagtgctgacgcttcgctttggtctggaggatggaagggcgagaacccttgaggaagtcggaaaagagttcaatgtaaccagagaacgaatccgtcagattgaggcaaaagcgctccgtaagcttcgccatcccagcagaagtcgtaagttaaaggattatttagagtaacatgatgaaattatcgaggagaatgaaagcagtggcttccatggttacaaccggcggtatccttgcggatatcggaacagaccatgcgtatgtgccgattgcactggtacagaggcagaaaataaagggagccattgcaatggatattaatgagggaccgcttgcccgggcacaggaacatatccgggcagccaggctggaggaatatatacagaccaggctttcggacggggcagaggcactgcttccaaatgaagcggattccattctgattgcaggaatgggtggagaactgattctgcatattctgacggaaggggaatccgtctgcagtacagcgaaagaactgattttgcagccacagtctgaaatacataaggtccgggaatatctgcgccagcatcagtataaaattgaagatgaagatatggtctgtgaagaaggaaaatattatccgatgatgcgtgccgtaaaaacggagcaggatgaaacgtggaaccggttgaacgatcagacaatagcagtctgtgatatttacggaccgcttcttctgagaaacggaaatccggtactgcgccggtttctggtgcgtcagcatggacagctgacacagattctgcagacgcttgaagcacagaaagaatcggaacagatcatacgacgtattgcagaagtgcaggaaaaattacagcagaatgaatctgcgtatacgattttgggggcgataaaaagtgcaggaatttgagatcacattggagactgcgccggggaaaaccgaactggttctgattccggagcagacaaaactggaacagattgcaaaacaatatcagaaaaattacagtgacaggattgtactggcatgtgtagatggaaaactgcgggaactttcaaaagtggtgaaggcatccggtaaaatttcgtttctgacgatgacggacagggacggcaaacgcacctatcgcagaagtatgacgcttttattgcagaaggcggtagaaaatctgtggaaggatcaggtaaaaatcagagtatattattctctgggagaaagttattactgtgaactgcatggaactgcaaatgatgcagcagccgtgcaggcactgcgtgcagagatgcagcgtctggtagaggccgatttaccgatcaagaaatgcagtgtaaaaacagaagatgcggaacagctgtttcatgataagggaatgaaggacaaagagcggcttttacattatcgcagaagttcgcgtgtcaatatttatgagctggacggacatcaggactattattacggttatatggttccatccacgggatacctcggagtgtttgatctggagttatatgaagacggctttgttcttttgttcccaaataaaaagggagatgaagtggaaccgcttcatacctccaataaactgtaccacacattaaaagaatcacgcagctggagccgtatgctggacgttggaacgatcggtgcgctcaatgatgcaatcgcatccggcaggggcgaacagattattctgcttcaggaagcattgatggaggaacggatcggttccctggcagcacagattgcagcaaaaaaaggaattaaatttgtcatgattgcgggtccgtcttcttccggaaagacgacattttccaaccgcctgtcgattcagcttctggcaaagggaagaaaaccgcatccgatcagtctggatgattattatgatgacagggagcggtgtccgagggatgcagacgggaatcttgattttgaatgtctggaggcactggatgtcagacagtttaatgaagatatgacccggcttctggcaggggagaaagtagatatgccttctttcaatttcaagacgggaaagagggaataccgtggcaggaccctgcagcttaaagaaaatgatattcttgtcatagagggaattcatggtctgaacgataagctgtcgtatacacttcccgcagaaagtaaatttaagatttatatttctgcgctgacacagttgaatattgatgaacacaatccgctgtccacgacggactgccgtctgttacgccggatcgtgagagatgccagaacccgtggaacgacggcacaggagacgattgcgatgtggaaatctgtgcgaaggggagaagaaaaaaatattttcccgtttcaggacagtgcggatgtcatgtttaattccgcgttactgtatgaggttgcggtgcttaaagtatatgcggaaccgcttctgtttcagattccgcgtgacagtgcagaatatctggaagcgaagcgtctgcttaagtttttggactattttctgccgcttccgacggaaggaattgcacagagttctctggtgcgggaatttgtcggaggaagttgttttaatgtataaaaacacggtataaaaacacggtaaactttacggcttgaaccttactggaaactgtgttatagtggaaaagcatcttaagatggaggacaggtgatcgcggctgcaggtgtcgaaagaccgcaggtgaggaaagtccgggcttcacagggcaggatgccggttaacggccggtggaggaaactctaaggaaagtgcaacagaaatataccgctataagagatgcatcacagatgcacctctatagtaagggtggaatggcagtgtaagagactaccgcctcgctggtaacagagagggcacatgtaaaccccattcgaagcaagaccgaaacaaagcgctgacgtggcccgccagctttaggtaggtcgcttgagacggttggcaacaatcgtactagatagatgatcacccaacgacataacccggcttatcgtccttcttcttaagatgttttccgtaaatatcagcagtattctttggaaattttcatttttcacgtctataccattataaatttcccggatttctaaacactttatgaaaagtgtatgaaaagaaaatacgttgcttgacgatatgatttcccatgatatataactaatataagacacgaaaaatatcgacgaaacacagaaaagaggaattgtatgagagacaaattgtatcgttttatgcagggaagaaatggcatggatgaactggcacggatgcagtcctggcttgttctgattcttttgcttgtcggtatgtttacacgcattggcctgttttcctttgtagcgctgattttaatgatttatatgtatttccgggtattttcaagaaatacatccaaacgttatgaagaaaaccagaagtatttgaatttccgttataaccgcaccgtatcgtggaaccggtttaaaaaacgcatgggacaggcaagggattaccgctttttcaagtgcccgatgtgtaaacaggaagtccgtgtgccgaggggacatggaaagatagagattacctgcccgaaatgcagggaaaaatttattcgcagaacctaaatcggaggcagtatgttcggatatattaatgtaaacggcgcacagctgtcggaagaaaataaaaaaatatatcagtcgtattattgtgggctttgccggaaattaaaagagttctgtggaaaaaaaggacaggcacttttgaattatgatatgacatttctggtcgttctgctgaccggtctgtatgagccggacacgcagactggtgcatttacctgtatgatgcatccgatgaaaaaacggcagctgcgggaaaacgatattcagagttatgcggcacagatgaacgttcttctggcatattacaatctggtggatgactggaaagatgaccataattacacgaagaaaaccattgcctcaatgtttgagaaagattatcagcggatcaaaataaattatccgcggcagactaatgccattgagcagtatatggagaaactggcaacttatgaggcggaaaaacagacgaatattgatcttgtggcagggctgacaggcgagatgctcggagaaatatttgcatggaagcaggacgagtggtatgatgaattgaaaacacttggattttatctgggcaaatttatctacctgatggatgcctacgaggaccgggataaagatgaaaaaaaagacagttacaacccgctccggtatctggatacagaagatgagcaggagtatgagacgttgtgccgtctgatgatgaccagcatgatttcggaatgcgcgaagtcttttgaacgcctgccgattctgcttcacgcggatattctgcggaatattctgtattccggtgtatggtccaagtatgaatacattcagttgaagaaaaagaggaagaaatcatgacagatccatatcaggtgctcggcgtcagccgtagcgcttcggatgaagagataaagaaagcataccgtacattgagccggaagtatcatccggatgcaaatgtcaacaatccgaacaaagatcaggcggaagaacgtttcaaacaggtgcagcaggcctatgatctgattatgaaggaaaaacagcagggaacttccggaagctacagttatggtgcaggctctgcagatggcagatcggcaggcacaggaagctatggacaggggccgtttggagggttcagcggacagtattattatggaaatggaacctaccgttcccagagccgtgcgacttctccaaaattacaggcggcacttaattatattcagaatcagtgttatccggaagcactcaatgtgttaagttcgattccattttccgagcgtgccggacagtggtactattacagtgcggtggcaaatgaaggcgtgggaaacagtgcaacggcgattgagcatatccgccgtgcggtggaacttgagccgagcaatatggagtaccggcagttccagcagcatcttgaatatggcggaacctggtataccaatatggggagcgagtatgagcgtccttatggaaattacagcaatttctgcatgagtctgctgtgtgcgcaggcattgtgtttctgctgtcgcccatgttaattttatatagctgctatattagccttgaaaatagccgcagtttattatatgatagtaaaaatgcgttaagctgaaggaggataaaaatgcggcatttaatgagtcctttagacttctccgtagaggaactggatcagctgttggatctggcgagcgacattgagaagcatccaaagaaatatgcacatgcctgtgatggcaaaaaattggcaacctgtttttatgaaccgagcacaagaacacgattaagtttcgaagctgccatgttaaacctcggtggttctgttttaggtttcgcgagtgctgattcttcatcggcatccaaaggcgagagcatttctgatacgattcgagttatttcctgttatgcagatatctgtgcaatgcggcatccgaaagaaggcgcggcactcgttgcatcccagaagtcccgtatccctgtaatcaatgcaggcgacggtggacatcagcatccaactcagacattaactgatcttatgacgattcgttccctgaaaggaagactggggaatattacgattggtctgtgcggggatctgaaattcggacgaaccgttcattccctgatcaatgcactgatccgttatgaaaacgtgaaatttatcctgatttccccggaagagttaaagattcctgattacatccgggaggatgtacttcaggcaaaccatgtggagtttgaggaagtggagcgtttagaagatgccatgagccagctggatgttctttatatgacaagagtacagagagaacgtttcttcaacgaagaagattatatccgtctgaaagatttctacattctgaccaaagaaaagatggaacttgcgaaggatgacatgatcgtgctgcatccactgcctcgtgtcaatgaaatttccgttgaagtggatgatgatccgcgtgcggcttattttacacaggtacagaatggtgtatacgtccgtatggcactgatcctgacattactgggaatcgaggtggagtaaagatgctgaatattagtggaattcacgagggctttgtactggatcatatccaggcgggaatgagtcttcagatttatcatgatctgaagctggacaagctggattgttccgttgccattatcaagaatgcaaaaagtaataaaatgggcaagaaagatattatcaaagtggaatgtccgattgaagcgctggatctggatattctcggttttatcgatcataatattacggtaaacgtgattaagggtgaccggatcgtagagaaaaaggaactgaagcttccgaagcaggtcaaaaatgtcatcaagtgcaaaaatccgcgttgcgtgacatcgatcgagcaggaactggatcagatctttattctggcagatgaggaaaaagaagtgtaccgctgcaagtattgcgaggaaaaatataccaatccgaaccggcgtcagataaaagtaatgtaagaaaaggggcacatcacgagaggatgtgcttctttttttgggaaagaatatattcaaagatcagcccggcggtgacccatacaggaaaataatcgaggcggacaagaccgaaaatactgtagggagttctactgtaatcccagggacatagagagaaaagcctaagaaaactgccactgataaattcaacgagcatgatgccggcaccgtaaaaacagccgcgcagaagcacaggccagtggcgcaggcgcacggaaagaggtccgatgactgctgcaagtccgtagatcggaaacatccagatggatgtgtgtccgtttaaaagcagatctccccgcagcagtccgcccagcgaggtgaacaggatttccatgcaccatccggtcagaccacagataaaaaatgttttccagttcatgaaaagacctcccgcaaaaaatactatgcatgtaggatatgcgattatccagcagatatacttgaaaaaaatacaaaacaattataagataagggtattatggcttattttccaatgtttatagatatcgaaaaaaagaaatgtctggtggcaggcggaggaactgtggcattgcgcaaagtccgggtgcttctggatttcggggcgcagattacggtggtggcaccacagattgacccgcagattctgcagcttacaggaaatgtatgtgtaaaggaacgtacctttgaaccggaggatctgaaggaatgtgttctggttgtggcagctactgatgatgtcacagaaaatcacaggattgcccggatggcacaaaaaaagcatattccggtcaatgccgtggatcagcaggaggactgcagttttatttttccgtcctatctgaaacaccgggatctggtgggggctttttccagtgcgggaaacagtccggtgctcacacagtatttaaaagaatctctgaaagaaattctgacggaagaactgggacagattaacgattatatgggaagtatccgtccggtggtaaaaacgcggatagaagcagaaaaactgcgcagacaggtatatcagaccattcttgccaggctgcttgcagagaaaaaaacttcactgttaccggaagaactggaacagattcttatacaggaaaagcgtatgaaagagtaaaagaaaagaggaacaagggaatggatcgaacaagaagattaagacagactgctgttatgcgaagtatggtcagggaaaatcacgtgaggacagaggaactgatctacccgctttttgttatggaaggggaaaatatcgtacagccggtggaatccatgccgggcatctgccagtattccgttgaccgcatgaacgaagagttagaccgtgtgaaagcattgcagattccggcaattctgatttttgggattccggaacataaggatgaagtggggagcggggcttatgatgagcacggcattgtacagaccgcgatccgccggatcaaaaaggattacccggatctgcttgtgatagcagatgtatgtctctgtgagtatacttcgcatggacattgtggcctgatcagagatggaattattttaaatgatgagacactgccgcttctggcacagacggcggtcagctatgcgcgtgcgggggcagatatcattgcgccgagcgatatgatggacaagcgtgtaggggcgatccgtcaggcacttgatgcggccggatttacctatacaccgattatggcatattccgcaaaatttgcatccggatattacggaccgtttcgtgatgcggcacattcggcaccagggttcggggaccggaaaacttatcagatggaccctgcaaacgggcgtgaagccatgcgggaagtggaagaggatattgcagagggagcagatctgattatcgccaaaccggcaatggcatatatggatatcattacggagatccgcagaaattataatattccgatcgttgcctataacgtgagcggggaatattccatggtaaaagcagcggcggcaaacggatggatcgatgagaaaaagatcgtgatggaaaatctgatcgggatgaaacgtgcaggagcagacatgatcattacctatcatgcactcgacgtggcagaatggatacagaaaggggaagtataacatgacagaccagacatcagaattactttatatgagagcaaaactccggcttccgggaggcgtgaacagcccggtacgtgcgtaccaggctgtagggcgtacgccgcgttttattcagagtgcaaaaggttcccatattaccgatgtggatggaaatgaaatgatcgactatgtatgttcctggggacccgggattctggggcatgccgatccacgtgtcatcgaaaaggtaaaggctgcatgtgaggaaggtcttacgtttggcgccccgacagagcgggaagtggagatggcagaacttctggcacagctggtgccatccatggaagtcagccgtctggtaagctccggaacagaggcaacgatgagtgccatccgtgttgcgcggggatatacgaagcgtgacaagatcatcaaattccgtggatgttatcacggtcattcggacggacttctggtaaaagcaggatctgcggcattgacaacatctgttccggacagtgcgggtgttccggcagattttaccagacatacactggttgcagaatacaattccccggacagcgtcaaggcactgtttgaggcttatccggatgagatcgcagcaatcatcgtggaaccggtggctgcaaatatgggcgttgttccgccggcagacggattcctggagtttttgcgtgagatcacaaaacattacggggcacttttcatctttgacgaggtcatcaccggctttcgtctggcactgggcggagcacaggagtattttcatattacgccggatttgtccacgtttggaaagattatcggtggaggtatgccggtcggcgcgtatggtggaagagaggatatcatgcgtatggtttccccggacggtccggtttatcaggcaggaacactttccggcaatccgattgctacggctgcaggacttgccacacttcgtattctggaggcagatacggatatttatatgcgtctgcaggaaaatacagcgatgctggcggatgcggtgcgccatgccgcaggaaaccgtgtgcatgtcaatcagatcggctctctgatgagtattttcttcaccggcgaagatgtgacagattacgattctgcgacaaccgcggataccaaagcatatgccgattattttgggtttatgcttgatcatggaatttatgtggcaccgtcacagtttgaatccatgtttgtgtccgatgcgcataccgatgcagatatacaaaagaccatccatgtgatgcaggagtactttgcagaatgaaatttggatatataggaattgattataaacatgcagatcaggacatccgtgacagggtgtcctttaccgataatcagaaaattgattttctgcagaaagccgggaaagcaggaattgaacaatgttttgtgctttcgacctgcaatcgcagcgaagtctatttttttgcaccggaagagattgcacagccgcttggcgtgattcgcaccttgtatgaagagatgtttccgggagtagatttttcggaatatctcaaacaacgggaggaaatggatgccatttcctatctgttccgggtgactgcgggactggagtccatggtgctgggagaggaccagattttaggacaggtcagggatgcatttgaattatcacggacggttggaagtaccgggaaagagttaaaccgtgtggtacaggatgcggtcacctgtgcaaaaaagataaagacaaagttaagaatcagtgaacggccgctttcggtcagctatgtgggaatccgccagctgcaggaaacgtttggaattgcagggaaaaaagcactggttgtgggaagcggacatacggcaacactggctctgcgttatttgtacgaatatggagctgcccatgtaaccgtctgcagccggacattttcacatgccggaaatctcctgcatgagtttccaacacttaccatcattccgtttgaaaagcggtatgaagcaatgaaggagtgtgagctggtagtttccgctacagcctccccgcatcatattatccgggaaaaagacatacagttgttacatccgactgcaattttggacctggcatctccgcgggatgtggagacggcgattggacgaaatccccaggcacttctgattaatcttgacagtttaaatgaaattgtagagacgaaccggaagcagcgggaagaactggtgcaaaaaggtcagcgtatgatagaggaagccattggggaaaccagggaatggctggcaacgaccggtgtcgatgagacgatcgcttcgttgcagcagcgctgtacggaaattgtagaggacagttatgcatatctaaaccgcaaactggatctgagtacgagggatcagaaaattgtaaaaaagattttaaaggcatcattaaagcgtctgatccgggagccgatcctggagcttaaacagacggaatccaaagagcagcaggaacagtataaaaaggtattgcaggatttatttcagtttgataccgaaatccgggagtagggagaaaaagaatgaatgtgatcattggaacgagaggatcaaaactggcattggcgcaggcagagtatgtaaaaaaccgcctgcagaaacattatccacaaaacagttacgaactgaaaattatatccacaaaaggcgaccgggaacagaaaaaagcgttagaccagattggggataaaggactttttgtgcgggaaattgaacaggaactgctggatggaacgatcagccttgcagtacacagtatgaaagatatgccggccgaacagccgtccgggcttgtgtttgcacatgcatggaaacgggaagatccgagggatgtattgattttgcgggaagccgtttcactggaggaacttccacagcatgctgtgatcggcaccggaagccgaagaagggcatttcagcttctgcagcttcgaaaggatctgcgcattacgggaatacgcggaaatgtcgataccagaataaaaaagatgcaggaagaacaactggacggaattgtactcgcggcggcgggactgcaccggctggggagaacttctttgatcacgcagtattttgagccggaacagatgataccggcagcggcacaggggacgctggcactggaattgcgggaagaccacgaagaattgttcgagcaggtgaatgcactttcagatatcgtgacggaggagattacatgtgccgagcggctgtttttgaagggaaccgggggggactgccatatgccgatcggagcatatgcatgtaaactgcccgatggaaggatacaattgcttggaatggtcggaaatgcggacggaagcagtataaagaaatgtaaggttttcggagagaccccgcaggaagcggcacagcgtgcattgcgggaaaccgggtgtacccgataggggttcggttgcgggcaataccgcagaagtggtataataagatagatttttatttgcaaaaccaacgccggaaaatgaatttttagcatttattaaaaagcagcagtgctgacagggaaaggaaaaaagaatggcatctatggtatatctggtcggtgcaggtccgggagatccgggacttgtcacagtcaagggactggaattgataaaaaaagcagactgtattatttatgacagactttcgtctccggaattattggggtatgcaggaatggactgtgagcgtatttatgtaggaaaagcggaccggcatcatacgcttccacaggaacagatcaatgaactgctggtcgagaaggcaaaagaatatcattgcgttgttcgtttaaaagggggagatgtctttgttttcgggcgtggaggagaagaaggcctttatctgcgggaacatggaatctcctataccgttgttccgggggtgacttctgccattgcaggacctgcttatgcaggaattccggtcacacaccgtggtgttgccacaagctttcgggtgatcaccggacacagaaaaaacggagaggatctgtcagaacctgattttacaacgatgtcagattcaaaagaaactctgatttttctcatgggactttcgagagtaagacagattgtggatggactgatgcaggcaggaagaagccggcagacaccggcagctgtgatttcccatgctacgacagaagcgcaggagatttgtgagggtacgctggagaatctggcagatcgtgtggaagaggcgcaactgacttctccggcactgatcattgttggggatgtggttgcacttcgccgccagctgcatttttttgaagagaagccgctgtgggggaaacattatctggttgcaaaaattggtccaaaaccttcacgtctggccgccatgctccgggcaaagggggcatataccagtgagtgtatgacaggtgagattgtcggtgtgccggcagtgtataccgcacaggaactggcgcatgtggacgtattattgtttacaagtgccaatggtgtggattattttatgaaaaatgtatttgcatcggggctggatgcacgggcacttttccataccagatgtgcagtgattggacaaaagacggcagaaaaactgcgggagtatggaatttgtgcagactttatgccggaacattccaacagtacgaatctggcacaggaattaaaggaatatctggatcaggaatttcgcggagatccgtttaagagggcagtaatctggtatcctaccgcaaaaaatgcaaatgataaccttgtggatacactgctttctttctgtgattgcggacggctcaatgtatacgaaaatgtaccttgtccgatggaggtgccagtggacaaggatgtatacgatgcgatcttttttacctgtgcgtcttcggcggagcggatgcttggcagtttaaagccacaggagagagaaacactggcatccgttacggatatttattcgattgggccgaaatgcagtgcagcactgggagaacttggcgtttctccggtgattgaggctgctgtaaatacctatgagggcctggtcaactgtgttttgagaaaagaataagtatgaagtatgcaaatattattgtagatatatcggtagaaaaactggataaaacttttcaatacagcatcccggaaaatctgcaggaggaaatacaggttggtgtacaggtggatattccatttggaaatcgtaaactgacagggtatgtcattgaactgacggaggatgccgaatttgatcccagacggattcgccccattatttcggtacatgagggaagcgtggcaatggaatcccagctcattgcactggccggatggatgcggaagaattacggttccaccatgaatcaggcactaaagactgtacttccgatccgcaggcagacgaaagaagtacagaagcgggagattgtattactgattccgaagacagaggcgcagcagaaactggcactctttgaacagaaacactatacggcgaaagcaaggctgctgcgggaactgatacaggaatccgtactggattattcgcttgtcaccggaaaactgaatatatcagcagcagtgatccggggtatggcacagcagcagattcttaaggtggagagcagcagacagtttcgcaatcctgtgtcacatctggatcagaagggatatcatctgacactgaatgaaaatcagcagcgtgttgtggacacagtatgttcggatctggatgctggaattcataaaacgtatctgctcaggggggtaaccggaagcggaaaaacagaagtttatatggaactgattgcgcatacggtggcacagggacggcaggcaattgtcctgatcccggagattgcactcacctatcagaccgtgatgcggttttataaccggtttggagaccgggtatcaattatgaattccaaactttcccagggagagcgctttgatcagtttgaacgtgccaaggcgggggatattgatattatgatcggacccaggtctgcgttgttcacaccatttccgcatttagggcttattattatagatgaggaacatgaaacgtcttataaaagtgagacggcaccgcggtatcatgccagggatgttgcaatcgagagggcgcgcatgaatgatgcatcggtacttcttggttctgccactccttcagtggacagttattatcaggcaatgcagggaaaatatcagcttctgacgttgtctgagcgtgtggagaagaaaccgctgccggattgcgaggtcgtagatctgcgcagtgaattgcgggcaggaaaccgttccatcttttcggagagattgcaggaactgatggaagaccggttaaaaaaacgtcagcagatcatgctgtttttaaatcggagaggaatttccggatttatttcatgcagagcctgcggatatgtgatacaatgtcctcattgtgatgtttcgctgagccagcatgcgggaggccggatggtctgtcattattgcggatatgagcagccattgccaaagatctgtccatcctgcggcagtaaatatttaggcggattcaaggcgggcacgcagaaggttgagatgctggtgcagcagagatttccacaggcacgtgtgatgcgtatggattttgataccacacggaccaaggatgcttatgagaagattctgcatgcatttgccaatcaggaggcagatatcctgatcggcacacagatgattgtcaaagggcatgattttccgaatgtgacgctggtaggagtacttgccgcagatatgtctctgcatgttccggattttcatgcatcggagcggacgtttcaactgctgacccaggcggtgggacgtgccgggcgcggaaaggaaccgggacaggcggtaatccagacgtatgatccggatcattttgcaattcagaccgcaaaggaacaggattacgatgcattttataagcaggagattgcctatcggagaatgcttgcctatccgccggtgtggcagctgcttctgattcattgtacgggaaccgatccgcaggtgacgacagttgcagccagggatctggcagaatttctgcatcgcgtgatatcacagaaaggcaaaaatattatgctggtaggaccggcagatgcatccattgcaaaaatcagtgatgtttaccgaaaggtcatttacatgaaggcaccggaatatgcgacgctggtggcatgtaaggatctggtggaacgaaaaataaaaaataacagcgcattttccaatgtgtctgtacagtttgattttaacccaacaagtggtttttaggaggtaattatggcacttagaacaattcgaattcagggagatcccgtattgacaaaagtatgcagaccgattccggaggtgacggatcgcatccgtactctggcggaagatatgctggagaccatgtatgaggcaaacggtgtaggtcttgcggcaccgcaggttggaattttaaagcgtatggtagtcattgatatcggggacggacagggaccgtttattatgatcaacccggaaattatcgagtctgacggagagcagaccggagatgaaggatgcttaagtcttccgggaaaagcaggtcaggttacacgtccgaaccatgtaaaagcaaaattttatgatctggacatgaatgagtgggaagtagaaggcgaaggtctgatggcacgctgcatttgccatgaactggatcatctggatggacatatgtatacagaaaaagtagaaggcggacttcatgatgtgaattatgaggagccggaagaggaataatatgaaagtaatttttatgggaacaccggattttgcggtgaatacattggaaaagatcatagaagccggacacgaggttatgcttgtggttacacagccggacaaaccaaagggacgcgggaataccatgcagtttccaccggtaaaggaatgtgcggtttcccatggactggaagtattccagccggtaaaaatccgggaagatgcaagtgtggaatatttgaaaaagtttgcgccggatatcatcatagtggcggctttcgggcagattcttccaaagagtattctcgatcttccgaaatacggatgcattaatgtacatgcatccctgcttccgaaatatcgtggtgccgcaccgatccagtgggcggtcatcaatggagatgagatcacgggagttacgactatgcgcatggatgtcggactggataccggagatatcattgccaaaaaacaggtgcgcattgcagaagatgagacaggtggaagtctgtttgacaagctggcggcagtcggcgccgagctgtgtgtggaaaccatgcagatgctggaaaacaaaacggcgacctttacaccgcaggacaatgaggcgagtacccacacaaagatgatttccaaggagctgggagatattgactggaaaaagccggcggtggagattgagcgcctgatccgtggattaaatccatggccgagtgcctatacccatctggataataaagcgtttaagatctggaaagcccgggtggtggagacagatggcgcttatgcaccggggtgtatctgtaaagttggaaaaaatacgatggtggtacagaccggagagggtggactggaacttttggaagtacagcttgccggtaagaaaaggatggatgcaggatcatttctgcgtggctatccggttgcagagggatcttttttacagcagtaagacggaggtagatttatgccatacatttattgggacagtacctatatactggttgttatcggtgcagtgatctgtatgattgcatctgcacgggtaaagacaacgttcaacaaatattccgcataccgcagtatgtcaggaatgacgggagcacaggcggcagagcggattttgcacgcagcaggaatctatgatgtgcgggtgcagcatgtatcgggaaatctgaccgatcattacaatcctgccaataagaccctcaatctttccgacagtgtctgcaatcagacttcggttgcagctgtgggtgtggcagcacatgaatgcggacatgcgatccagcatgccagaggatatgtgccgcttcggctgcgtaccgcatttgtgccgattgcaaactttggttccatgcttgcatggccggtgatcattcttggtgtgatcataaacagccgttcatccatgatgcttatcaatatcggaattctgctgttttcgtttgctgtgttattccagctgattacgcttccggttgagtttgatgcttcgcgtcgtgcgatggttcagctgagggaacagggaatcctgggagatcaggaactccattacacaagaaaagttcttacagcagcagcactcacgtatgtggcaagtgcagcagctgcgattctgcagctgcttcgaatcgttttactgtttggaggaagaagtcgtgacgactaaggtcaatgagagagcactggtgctggaaatgcttctggcggtcaatgaggagggacagtacagtcatctggtcctccgcgatgtgctcgataaatatcagtatctgggaaaacaggaacgcgcttttctgacgcgcctgatggaaggaacgctggaaagacagctgacactggactatgtgatcgatcagttttccaaaaccagagtaaagaaaatgaaaccgctcatccgcaatcttatgcgcatgagcgtttatcagattatgtatatggacagtgtgccggattccgcagtgtgcaacgaggcggtaaagctggcgagaaagcgtgggttttccggtctgagcggatttgtcaacggtgtgctgcgtagtgtggcaagaggatggagagaagttcgcttcccgaatctgagcgttacatattcaatgccggaatggatcgtggacatatggaccgaaaattatggagaggaaaagacccgtcagattctggagggacttaccgcagaaaaccggctgacgatccgtaccaatctttccgctgtgacaccggaagaactcataaacaaactgaaatcagaaggggtgacagtacatgcggttccggaactgccgtatgcttttgaaatatccgggctggattatctggcgggactgaaaagttttaaagaagggctgttttatgtacaggatgtcagttccatgctggttgcggaaactgcggcaccgaaaaagaatgattatgtgattgatgtgtgtgcggcaccgggaggaaagagtacccatatggcagaactgcttcagggaagtggtatggtagaggcaagggatctgacagaatataaggtggatctgatccgggagaacatagccagacatggattgtcaaatatgaaagcggtacagatggatgcaacggtggatgatccggattcccatcagaaagcggacgtcttagtctgtgatctgccgtgttccggacttggcgttatgggaaagaagacggatatccgttataagatgaccaaagaaaaggcggcagagcttgcaaaactgcaaagacagattctttctgttgtatgggattatgtcagaccgggcgggacacttgtgtacagtacctgtacgatccaccggtcagaaaatgaggataacaccgcatggtttttaaaagaacatccggaattttccctggaattccagagacagattttcccgggagaagccggaagtgacggattttttcttgcaaagctggtaaggagtaaataagaggatgagtgaaaagacagatattaagtccatggatctggaagaattaaaaacctttttttccgatatgggggagaaagcgtttcgtgcaaagcaggtatatgagtggttgcatgtgcggcaggtggaaagctttgaggagatgacgaatctttccaaaaccttgcgggagagactggatgagacctgcaggatcatcacactcagaaaagaacaggtacagatttcaaaactggatggaacccgcaaatatctgtttttactggaagacggaaatgtcattgagagtgtgctgatgaaatataagcacggaaattccgtatgtatttcttcacaggtcggctgtcggatgggatgccggttctgtgcatcaacactggacggactggtgagaggacttgcaccggcggaaatgctggatcagatctatcagattggtaaggatatcggagagcggatttcgaatgttgttgtcatgggcaccggggaaccgatggataattttgataatctggtaaaatttatcactttgctgacggatgagaacggacttcacatcagccagagaaacctgactgtttccacctgcggaattgttccgcggatgcgggaactggcggataaaaaacttgcgattacgctggcattatctttgcatgcttccaaccagaaaaaacgtctggagctgatgccggtggcgaacaaatatgacattcatgaagtaattgatgcctgcaggtattattttgaacagaccggcagacgtgtgacgtttgagtatagtctggtaggtggtgtcaatgatacaaaagaagatgcaaaagaactgacggaactgatccacgggatgaactgtcatgtaaatctgattccggtgaatccgatcagggagcgggattatgtgcagtcaaatgcacatgtcatcgaagcttttaaggagaaactggaacggagtggtttaacggtgacagtacgccgtgagatggggcgtgatattgatggtgcctgcggacaattaaggcgcaagtacaaagagaatcagagacttgcataacgaaaagtcatgtgctaagatagacagatgatggaagagtatgtatattacatgtaattgagaaaggataaagcggatgaagacgtattccataacggatacaggcattcttcgtgaaatgaatcaggattattttttcgcgtcggatgaacccgttgggaatctcccgaatctgtacattgttgcagatggcatggggggacacaaggcaggagattacgcatcgcgttacacaacgcagcgcatcgttgcatccgtgtcccggagttcgggagaagaaccagttacaattttaaaagaggcaataacaactgcaaacagacttctgatcacagaagctgcagaagatgaagcgaaaaaaggtatggggacgacacttgttgcagccaccattattgacggacggctttatgttgcaaatgtcggagacagcagactgtatatcatcggtacggatggcatccggcagatcacgagggatcattctcttgtggcagagatggtcaggatcggtgaagtaggtgcaaaggaagcacgtgagcacccggacaaaaatattatcacccgcgcagtcggtgcaggggaagaagtagaggcagatttttttgaagtggaattaaagaaagatgaccacatcttaatctgtacggacggactcacgaatatggtggaagacgaagaaatctgcagtattattctgcgggatgcttccattgaggaacgcgccggacttcttgtaaaaactgcaaatgacaacggtggaaaagacaatattacagtaatgattatagaaccattttcttgatgaggtgaaagaatgttaacagttgggacgtatttagcagatcgctatgaaatcgtaagtaagattggtgcaggcgggatgtccgatgtttataaagcaaaggatcatgtgcttggccgttttgtggcaataaaagtattaaaaccggaattttcggaagatcgtggatttgtagcaaaatttcgcacggaggcacagtcagcagcagggctggagcatccaaatattgtaaatatctatgatgtaggaagcgaagaggggcttcattatatcgtcatggaatatgttgagggaatcacacttaagacatacattgaaaagaaaggacagttatcctttaaggaagccgtcagtattgccattcaggtagcaagaggtattgaagctgcccacaacaaacagatcatccatcgggatatcaaacctcagaatatcatgatctccacagagggaaaagtcaaggtcatggactttggtattgccagagctgcatcttccaataccgtcagctcggatgtgatgggatcggttcattattcttctccggagcaggcgagaaacgggtttgtagacggaagaagcgatatctattctctgggtattgttatgtatgaaatggtaaccggacgtgtaccttttgacggagatacaacggttgcagtcgctattcagcatctgcaggaagagatgacacctccaagtgtgtatgcaaagaatctgccgatcagcatggagaagattatcttaaaatgtacacagaagaatgcggaccgccgttaccagaccattggagatctgctggcggacctgcgcagatcgctggtacatccggatgaggattttgttgtgattgctccgcttgtggacaatggaaagaccaaggtcatcagtggggaagaattaaagcagatcaaagaacacggggtggagccaaaagaagacaggcacgcttccaagctggaatcttcctatgatccggatgaggatgaggacgatgaggatgaggacgaaaacgaaggactcagtccgaagatggataaggcaatgaccatcatgggaattgtggtgtttgttgtaatccttgcagtgattatttaccttgtgggaagtttctttggcttattccgttttggcagtaattcgtcaaagaatacagaaacgcagacgcagacacagacgcagacacagacacagacagaaagtgaacagcctgtcgtggtacaggatgtatgcggaaagttacaggaggaggcacagtctgaactggaagcacaggggctgtatatgtttgttattcaggagcagaagtcggatcagccggaaggaaccgttctgaatcaggacccggttggtggttctgaagtatctgccggaacgacaatcaatgtaattgttgccggaaccgaaaatgtggatttcacagattcggagagtcagagtgagcagaacgatgttccggttccaaatgtagttggaaaactggaaaaagatgcttcttctaccctttcggctgccggatttaaagtgtccaaaacatacaaatatgatgattccgtagatgcaggaaaggttgtttcccagagtccgagaggtggaaatgcacaggagggaagtacggttacgattgtgatcagccagggaaagaagtctattacggtaccatctgtccagggacggtccaagaaggaggcacaggcagctttgcagaaagctggcttaaaagttgctgtaaaagaagaatacagtgattctgtcaaagcaggtcaggtaatttcacagagtgtagcatccggaaagattgtgccggcagatacaacggtaacgattacggtaagcaagggaccggaagagaaaaattacagctataaattctcaaagtcatatgaagcaccggaaggggctgtcagtgcaacgtatacactgacgggaagcgatggtacgacctatgcaagcggaaccagtgaagtcgatggttctcttacgatcggtgcatccgatatggcatgtgagtccggtaaagtgacgattacctggagcattgaagaaatagatgatgaaggtctttccgatacgtctacaaagacagaaacacattctgtcagcttttcaaaacagtaggtaatatatgaagggaaagattgtaaaaggaatttccggtttctactacgttcacgtggcagaaaccggaatttatgaatgtaaggcaaaaggaattttccgtaatcagaagatcaaacctctcgtgggtgatgatgtggaaatcgttgtactggatgaagaaaaaaagattggaaatgtagaaaaaattcttccacgtaccagggaactgatccgccccgcagtggcaaatatcgatatggcactcgtaattttcgcggctgcaaaaccggacccgaattttaatctgctggatcgctttttgtgtatgatggaatatcagaaagttccggttacgatctgttttaacaaatgcgatctggtgacggaagaacaaagagaagtattacgaaaaatttatgaactggcggggtatgagctgctctttacaagtgcaaagacacaggaaaatgtggaaaaactcaaatctgtgttgcagggtaagatgacggcagtggcaggaccgtccggagtaggaaaatcttcgctgatcaatgatctgcaggatgcggtgcagatgcagaccggaggaatcagtgacaagattgagcggggaaaacatacgacacgccattcgcagattataccaattgcggaaaacacctatattatggatactccggggtttagttctatggatctgcccggattttccaaagaggatctgtggacatgttatccggagttcgtgcgttttgagcctggatgcagatttatcagatgcagtcacatcggagagccggattgtggcgttaagacggcacttgcagaaggaaaaatatcgcaggtgaggtatgacaattatgtgcagctttatcaggaaatgaagaatatgcgcaagtattaggaggaatcaatgaactgtttatcaccgtcaattttatcggcagattttgctaatctgggagaacagatccggttgctggatcaggcaggtgcggaatatgtacacatcgatgttatggatggaatgtttgttccgagtatttcgtttgcatttccgatcatttgttccattcgtaaatgtaccgatcggatttttgatgtccatctgatgattgaggaaccgattcgctatatagatgattttgttgacgcgggagcggatattattacggtccatgcagaagcatgcaggcatcttgaccgcacagtggaggcaatcagggaaaagggggttctggccggtgtggcattaaatccggccactccgctggaaactgtccgatatattcttccgaaggtggacatgcttcttatcatgaccgttaatccgggattcggaggacagaaactgattccgtatacgttagataaagtgcgtgaagcgaaaaatcttgtgaagcagtccggatgtaagaccgatattgaagtagatgggggaattaatctggaaaatgtggaagaagccatggatgcaggagccaacataattgtggcaggttctgcggttttcaagggagagatcgaaaagaatgtggaagcatttctggaaaagttgcaaaggcaggggtagaagatgaagtatttaattgtttccgggggagaagtgaaggaaggttttttaacctggattgtaaaaaatggaggatttgatgtcatattagcggcagatgcgggaatggaagcattgtatcgggatcatattctgccggatatcatagtgggggattttgattcggtaaatccggatacccttgaatattttcatgacaaagagcagatcgaggtgtgcatgctgaatccggaaaaggatgataccgacacggaatatgcgatccgggaggccattcgcagaggtgcaatggagattgtggtcattggtgcaaccggtaccagaattgatcatgtactgggcaatatcagtctgcttggtattggtctggaggaacagataaagatcagcctggtcgatgaacataatcgtatccgcatgattaatcagccgttgacgatccggaaagcggagcagtatggaaagtatgtttctttgattccattttctgaaaaagtaagtggtgttaccctgcgtggattaaagtatccgcttacggattatacgatgggaggatttaattctctcggaatcagcaatgaaattgtttcagatgaagcgtcaatttctttatcttccggacaacttattgtaattgaatcaaaagattgaagattttatgaaatgacggaaaaatggtacgaaagaagtagttcgtaccataaaaaatagcaaatattatggaaaaatgcttgcattggagtaataagtctgctatgattatctacgacgaaggtgtcaaaagagaattcttttgacgccttttttgcgtttaaaaatacaagagatcggaggaagataggatgaacgcaggggatacaggatttatgctgatatgttcagctctggtgttttttatgacacctggattagcctttttctatggaggactggtgcgaagaaagaatgtcgtcagcaccatgatggcatgcgcagcgattatgggattgtcggttgttatgtgggtattgtttggatattcactgtcttttggtggaaatcatgcaggaattattggagatttccggtggtttggattgcatggaattaaaatgaatgaagcaggtccatatgcgtcgacgataccgcatctggtttatattgcatttcagatgatgtttgcaatgattacgccggctttgatcacgggttctcttgtgggtcgtgtaaaatttaaggcattgtttttatttattatgttctggtccgtcattgtatactatccaatggcacatatggtatggggacagggaggatttcttgcagaaatcggatcggttgattttgccggaggaaatgtggtacatatcagttccggtgtcagtgcactggtattttccattatccttggcaggcgaagaggatatgaacagacggcataccgggtacataacattccgtttgtagcactcggagcatttattttatggtttggatggtttggatttaacgcaggaagtgcattggcagcaaacggactggcagcacatgcatttatgacaactgcacttgccagtgcaagcgccatgatgtcctggatgtttattgatgtgatcaaggatggaaagcctaccttagtaggtgcctctaccggtctggttgttggactggttgcaattacaccgggagctggatttgttccgatctggtcggcaattatcatcggagcactggtcagcccgatctgctgtggtaccatttccctgttgaaaggaaaattaaagattgatgatgcactcgatgcatttggctgccatggcatcggaggagtctggggaggaattgcaaccggattgtttgcaaaacattctatcaatccggtcgcccgctgggatggactgttttttggaaattaccgtttatttgttgcacagattattggaattgttgtgacagttgccgtggcgattgtcggtacactggtctgccttggcattgtaagattgtttacggagcttcgtgtagatgaaaaagcagaaaaagttggtctggatatttcgcagcatggagagagtgcgtatccgacatttaatggtctggattcataagtcccagaaacagacctcgtatgttataatggatccgtcagttatttcgagacagagataaatctggaagtataaaataatcatgtataaggagaaaaaagaagcttatgatgataaaagtggaagcaatcgtccgggaagaagtttttgaggatgtaaaggaagcattaaacgcgattgatgtgaatggtatcaccgtatcacaagtgatgggatgcggtgcacagaggggatataaaaagagagtgcgtggtacagaagtagatgttatgatgcagccgaagattaagtttgagattgtggtatcgtccgaggaatgggagaaagcgaccattgatgccattcagaaggctgcatttaccggagaagtcggggatggaaagattttcagctatgagatccgtactgctacaaagatccgtaccagagagagcggggctgacgccttaaattagatttttaacagaatctacagcattgagttttggttttgataaacaataaaaagagcatccacatgggatgctctttttgcatatcgaatttacctgatacagggaaattataactgaggaccagcagaaaccagtgccttaccagctgcatttccttcatacttggagaagttcttgatgaatcttgctgcaagatccttagcctttgtctcccactcagaagcatcagcataagtatcacgaggatcaagaattcctgtatctacaccgtttaattcggttggtacttcgaaatcgaagtaaggaatcttcttagtaggaacgttgttgatatctccatttaagattgcatcgatgattccacgggtatctttgatagagatacgctttccggatccgttccatccggtatttacgaggtaagccttagcgccgctcttctgcatcttcttaacgagttcctcagcatattttgtaggatgtaactcaaggaatgcctgtccgaagcaagcagagaatgtaggtgtaggctcagtaattccacgctctgtaccagcaagctttgcagtaaatccggaaaggaagtagtactgtgtctgctctggagtcagaatagatactggaggaagtactccgaaagcatctgctgacaggaagattacgttctttgctgctggagcagaagagattggacgtacgatattcttgatatgatcgattgggtaagaaacacgagtgttctcggtaacgctcttgtctgcgaaatcgatcttgccgtttgcatctacagttacgttctcaagaagagcatctcttctgattgcgttgtagatatctggctcagaatccttatccaggttgataaccttagcatagcatccaccttcgaagttgaaaacgccgttgtcatcccagccgtgctcatcatcaccgatcaggagacgcttaggatctgtagaaagtgtagtctttcctgttccagacagaccgaagaagattgctgtattcttgccatctaaatctgtgtttgcggagcagtgcatagaagccatacccttgagtggaaggaagtagttcatcatagagaacatacctttcttcatttctccgccgtaccatgtattgatgataacctgctctttgcttgtgatgttgaaagctacacatgtctcagagtttaatcctaactctttgtagtttgcaactttagccttagaagcattgtatactacgaaatcaggctcgaaattctcaagttcttcagcggaaggcttgatgaacatgtttgttacgaaatgtgcctgccaagctacctctacgatgaaacggatagccatacgagtgtctttgtttgcaccacagaatgcatctacaacgaaaagtctcttgttgcagagctctttctttgcaatatccttaacaactgcccatgtgtcttctgtcattgggtggttgtcgttcttgtactcatcagatgtccaccatacagtgtcctttgagttcttgtccataacgatatatttgtcttttggagaacgtccggtgtagataccagtcattacgttaactgcaccaagctctgtctcctgaccaacttcatatccttcaaggccagcttttgtctcttcttcgaataatttctcataagaagggttgtgaacgatttctgtggtaccggtgataccatacttgcttaaattgatttctgccatcttgatttaaacctctttctttatagtatagtaagaaaaaattcctttttccctaatttagtattatacataattacccaataaaatcaataaaatttgtatgaaattttcccgtttttgtaattttgtgggggcaatggaaaggcggttccgtggcgttggatgattgcatgcaaattactggtaaaatagagaaaacacgtaaaaacacaaacaatttaaatataaacagaaaataaagagaaaaatttaaaaatatagaacaaaatagttgacaatataaagcaactatgataatatacagtcaaccaaacaaacaagacctaattacacaagacttccaatcggaccaagcggttggaaagccaattggaaatagaaagaagcttggagtaagcaggaattgaatgagaaaaggaggtacagtccaatgggacgatgatcaaaacaaaaacttcatggtaagcgtggtagtgtctgaaaatttcagcgggaaaagccttttggaatagaaaataataattgagggtatttaggataagataccaagagtgagaaaggcaatggatatgtacagacattttactgatgaagatgctgcggaaagataccacagaaggtaatttgagggtaagatgtgcggaagaagttcattttataaaaagcgagagagcagacttcagattattattcaatatagagattacatatcactaattttctaaacagatggaagtatctgtgagctgaagaaaataaattacaaaagaaaggaacaaaaaattgaataacgaaaccgagtagaacggtcactgtatttttagatttgaaagtatggtggccgtttcttattgttgtgatatataatgaaagtaaaatgtatgggagaaatgatatggaatatatagcacataaagatggggatagaattcagacggttttggaacatttaaccggaacggctcaattggctggagcatttgcagatgcatttggaaaacaggaatgggggtattgctgtggaatgctccatgacataggaaaatattccgaagaattccaaaagaaaataaaatatgatacgaatgaacaggtagatcattctacagcaggaacgaaattgtgtatggaaaaaggtgggtattattctttactggcatattgtattgccggacatcatgccggacttccggattatggaaatacagaaattccatccagtttatgcggcagattaaagaaaaaaatatgtgattatcaggcatatcaatatgaagtaaagattccgaagatagagacggacccatttgtaagaaaaccaaataaaaattttgatttttcactcagtgtttttatgcggatgatttattcctgccttgtggatgcggattttttagatacagaaaaattcatgaaaaatggtcagacagggagaaattccggacagaatatggaaatattgttggaaaaactggaaaatcatgtgcagccctggcttgaaaatcaggacctaaattcgatcaatggaagaagaacagaaattttaaaagcatgtatggaagctggaaaagaagaaagaggtctgtttcatctgacggttcctaccggtggtggaaagacgattgcatcgttagcatttgcgttaagacatgcagtttttcatcatatggatcacattatttatgtcattccatacaccagtattattgaacagaatgctgaggtgtttcggaacatcctgggggaagaaaatgtgttggaacatcactgtaatgttgattatgacagctcggaagatctaaaacccatgcagcttgccagtgagaattgggataaaccggtgatcgtgacaaccagcgttcagttttttgaatcgctttttgctaatacatcgtccaagtgcagaaagcttcataatattgcaaattcggttgtgatttttgatgaggcacaaatgctccctgtagattatttaaaaccgtgtattgcaatgatggaaacacttatggaggattatcggtcaagtatggtattgtgtacggctacacaaccggcgctggataaaatatttatcggagagcgtacatttgtagaattgtgtccgaatgtgaaggaacagtttgaatttttcagaagggtaacgtatcaaaatctcggatatgttcctattgatcagttagcgggccaactgcagaaagaaaaacaggcattgtgtatcgtaaatacaaaaaaatgtgcacaggaactttatcgcaaattaaagggagagggagtttatcatctgtcaacaagtatgtatcaaaaacaccgaaagcggattctggcacagatcagggaaagattaaagcagaagaaaaagtgtatcttaatttctactagcttggtggaagccggggtagatctggatttttgccatgtgtatcgacagattgcaggtgtggattctatcatacaggcggcaggacgctgcaaccgggaggggcaggaaaaagcagaggacagtatcgtttttgtgtttgatgtaacagacagcaaaatagctccaagtcaaaggctgccggtggatattgcaaaagcaattttgcaggaaaccgatgatatttctgatctggacagcataacagagtattttaaacggttataccgttttcgggagcaaagtctggataaaaagaatattatgggaaaatttcaagaacataaatataattttgaaactgcagcaaaaaaatttcgtctgattgaagaagatacaagaaccattttggtgccggtggagcaggaggcagaagaactgctggcggaattgaaacatcagggattttcaaaggaacggatgcgaaaggcatcacaatattgtattcaggtatatgataacctttttaaaattttgtgggatgccgggatgatacaggagatttcttcggatgctacagagttttatgagcttgtgaagctggatcagtatacggaggatatgggattagatttgtctgtggattcgggaatggatttgtatttgtaaagaggagtggcgatgtaaagaagattacatcgccactcgtttgcgttactaaaaagactattatttcaatccacaggtggaacctgacaatagtaagtataaacaattttatttttatattcaagaataaatttaaagttcaatagtaatttaagtaaaaagtcaaaaagaattgattaatgatagataaagtagtatgataaataaaagatagaatgttgtaaaatgatgacaatagaaagaggaaagaatgatcttatatcacggcagtaaagaagttgtaaaatatccggaaattcgaaaggcacgttttcataaagatttttatttcggattttattgcacacagtttccggaacaggcgaggcgatgggcaggcaggtatggaacgaaagggtatctgaatcaatacgagtatacaccaaatgaaaagttaaaatatttgcgttttgatgagatgacggaagaatggctggattttatcgtgcagtgcagaaagggcattgcacatacttatgatattgtggaaggtccgatggcagatgatacgatttataattatatccagaatttcattgacggaaaaatatccagagccgcattctgggaattggcgaaatttaaccatcctacccatcagatcagctttcatacgatttcggcgctggatacgttagaatatatcggaagtgaggctgtgtatgggaacaaaaaataataatgatttattttatacatgtagtctgattgaatatattggaagacagatgaaacgaacaagaaaagaagtcgtggattgtcttacaaaagaacgcattcagcggatttacgaattcgcggatgtttttcactgtgagccgatcgaaaaagtggcggatgagtttatacaggaatgtcacatgaactctggaacttttgataatgtgcaggcatgccggtataaaataccggattattgggatatcggggaagtttatgaacggttgatagaagactgttatgatgatcataaaattgtagatggaatctgggaagtatatcattcgtggatagatgcacagatctccaattataattctgatttttactatcagccgagagactatattgcagcgtgctatgaggaaggagtggtactttaaatgggagtaggagtaaaggtacaggtatggggggaatatgcattattttccagaccggagatgaaagtggaacggtgttcctatgatgtcatgacaccatcagcggcaagggggattttggaagcaatctattggcatccggggctgcgttgggtgattgacaaaatatatgtaaaaaatccaatccgctttacaagcgtccggagaaatgaagtaaaaagcaaagtttccgccagcaatgtgttacaggcatataatggagcagacaagcctctttatatcagcacaaaagaggacattgtccagcgggcttcattgattttaagggatgtatcatatgtgatagaagcacattttgaaatgacggatcaggcaaatgagacagataatccgggaaagtttaaagatatcatgatgcggagactaaaacgtggggaatgttatcatatgccatattttggctgccgggaatttccagcacatttttgtctctgtgaggaggaagtgatccataccatttatgatgagattccggaaaaagacctggggtttatgttgtatgatatggattatagtaacaaggaagatattcagccgatgttttttcgggcggttatgaaacgtggtgtcatcgatttgcgggattgtgaggtgatacgatgattttgcaggcattggtaaaggaatatgaaaatcttgcacaaaagggtctggtttccaagccgggatggagtcaggcaaaagtttcttatgccattgatctgaatgcagatggaagtataaaagtcatttattctttgcagacagaagaccagcgagggaaaaaaatagttatggttccagcgctgttatatgtgccggaaatggttacacgatcttccggggttgcagcaaattttctgtgtgataatgccaaatatatgcttggaattgatacagatggaacaaatgatcgtgtgaaagactgttttcaggcggcaaaggaaaaacatatcgcactattaaaagatgtagataatcctatggcaaaagcaatctgttctttttttgaaacgtggaatccggaaaatgcaaaagacaatggctgcgttcaggacaaatgggaggaactaaatgagggtggaaatcttatcttttgcatgggaatggattatgcacaggatgattcagatataaaagcagcttgggaaaattcgattgaagcaaacggggaagaacaaacgggaatatgccttgtaacaggggaaagaacggagattgcaagaatccaccggggaatcaaaggggttcctggggcgcagtccagcggggcggcgcttgtttcgtttaatgccccagcgtttgaatcctatggaaaggagcaaagctacaatgcaccggtgggaaaatatgcagagtttgcgtatacgacagcattgaattatcttttaagcaaaagggaaaacacattttcattgggggattccatgattgtattctgggcagaaaccggagaaaaaaagtgtgaggatcttttttgtatttcgatcaacccgcaagaagataatcaggaacagttacagaaagtttttgataatttaaaagcaatgcgtccgatcgatctggacgatataacgattgatctgacacagcagttttatatattatgtctggcgccaaatgcagcgagactatcggttcggtttttctatcagaattcatttggaaccattttaaaaaatatagaagcacattataaacgcatggatgttgtaaggccttcctgggcaaacgatagaaaatttcttggaatctatcgtatgctgcaggaaaccgtgaatatgaaatccaaagagaaaaaaccggttgcgaatatggcggcttctgtattacaggcggttttgtcggggaatcggtatccagcaagtttatatacagataccctgattcgcattcgttcggaacagggaaatgttacttatggaagggcagcaattatcaaagcttttttgataaaaaattatcaatggaaagaaggagaagaatgtatgggattaaatgaatcaagtaatgagactccatatatattgggaagattattttcagtattggagtctattcaaaaggatgcaaatccgggagttaatacaacgataagagatcgctattttaattccgcatgtgcaacacctgcgtcagtatttccagttttaatcaaattaaaaaacagccacattaaaaaattggaacgtgaaattgggggtggatcaaaaatttattacgaaaaactgttgacagaactcatggaaaaaattaacgcttttccacaacgattgagtttggaagaacagggaaaatttatgttgggatattatcatcagacacagaaaaagtatgaaaaaagggaggataagtaaatgggagaagcaattaaaaacagatatgaatttgttgtattatttgatgtggaaaacggaaatccaaatggagatccggatgcgggaaatatgccacgcattgatccggagagcggattaggtctggtaacagatgtatgtttaaaacgtaagattcgtaattatatcgagatggtgaaagaagacgaagctggatacaagatttatattaaggaaaatgtgccattaaacagaagtgaccgggaggcctgtgagagcttaggagtgacggaaacggaagataaaaaggtaacggatgccctgaaaaagttaaagaaatcagatccggatgcagatctgaaactgcgggattatatgtgcaaaaatttttatgatattcggacatttggtgcagttatgacaacttttgtgaaagcttccctaaattgtggacaggtgcggggaccggtgcagcttgggtttgccagaagtattgatccaattattagtcaggaagtaaccattacaagagttgcaattacaaccgaaaaagatgcagaaaataaaagcacagaaatgggaagaaagagtattgttccatatggactgtaccgcgtggaaggatacgtttcggcgaatttggcaagaaaggtaaccggattttcagaggaggatctggatttattatgggatgcaattatcaatatgtttgaaaatgatcattctgcggcaaggggaaaaatggcagtccgggaattgattgtgtttaagcacagtaaggaattgggagattgtccggcatataaattatttgacgcagtggaagttaagaaaaatgaaactgtggaatatccgagaaagtatcaggattataaagttaccattcatgaagaagaaataccagattcggtagaagtgaaaaggatgatttaatggaatacgcgcaggatgattatttgatgatctccggaatccagcattttaaattttgcagaagacagtgggcattgatccatattgagcagcagtgggcagaaaatgtccatacggttgttggagaactgatgcataaaaaagcacatgatccatatcttacagaaaaaagaaaggacatccttattgttcgggcacttccggtatcttcaaaaagtatgggagtaagcggagaatgcgatatcgttgaatttcataaatgcgaagatggaataacattatttggtcataggggattgtattcagtatatccaattgaatataaaaaaggaaaaccaaaggaatcagatgaagacaagctgcagcttgctgcacaggcaatgtgcctggaagaaatgttttcgacagagattacggagggagcaatcttttatggggaaacgagaaggcgagagccggtggaatttacggaagaacttcgctgtgaagtaagaaaaatattcgaggaaatgcatgaatattataagaaaaattatacgccgaaagtaaagccgacaaaagcatgttcgtcttgttcgctaaaagaaatctgtatgccaaagctggaaaaggcaggttctgttaaatcgtatgttcaaaaggttctggaggatgcagaatgagaaaattattaaacacattatatgtaacttccgagaatagctatctgggattggatggagaaaacgttgttgtttacgatgacaaaaaagaaatcggacgtgtcccgcttcacaatctggaaggaattgtttcgtttggatatcgtggaacaagtccggcacttatgggagcttgtgcagacaaaaatatttccctttgttatttgacacctcagggaaagtttctggcaaggattaccggaaaaataaaaggaaatgtcatattaagggaacaacagtttttaagttgtaaggatgaaaccatccgtttgagaatcgcaaaaaattgtattttaggaaaagtatataatgcaagatgggtgttggaacgtgcagttcgggatcattccatgcagattgatgcagaagctgtaaaaacggcatccttgcaattaaaatcttttctggattatatccagaatgcaaaatcgatcgatcagctccggggatatgaaggagaagctgcaagcatttattttggagtatttgatgagttaattttgcaacagaaaaaagattttatatttcagggaagaaataaaagaccaccgttagataatgtcaacgcaatgttatcctttgtctatacattactgaccaatcagattacatcagcattggagacggttggccttgatccgtatgttggatatatgcacacggatcgaccgggaagggcttctctttctttggatttgatagaagaattgcgtgcagttatggcagaccggtttgtcttatctttgatcaataagaaaattgtgaatggaaaagactttacaagaaaagaaaatggtgcggttttgatggatacagagtcacggaaaaagttgttgtcggaatggcagaacaagaaaaaagaaatgattacccatccttacctcaaagaaaaaatggaatggggaatggttccctatgttcaggctatgttacttgcgcggttcctaagaggtgatctagatggatatccggtatttttatggaaatgaggaatccaaatgcttgttttaattacttatgatgtaaatacggagacggctgcaggaaaaggccgcttgcgaaaagtggcaaaacagtgtgtaaattatggaagacgcgttcagaattcggtgtttgaatgtattctggataatgcacaatgtgtgctgttaaagtcgatattaacggatattattgatgaaagtgtggatagtttgcgattttactatctgggaaataattatcacacaaaaattgaacacataggtgttgatcggggaattgctgcggatcagacgcttatattgtaaggactatggtgcgaacggaaagtacacataaaatactggagggattcgcacttgaaatattaaataaaaggcattgaaatgacatttctatgaatagatagagatggttattttatgttattgctgacaaaatatacagtattatacaaagaaaatgaaatttgttgtataatattgctgtcgctcccttcgcgggagcgtggattgaaatgttttttcggtgtttgctcgactgaacaatttgaggtcgctcccttcgcgggagcgtggattgaaatccacattgccggtaaggtgctcagccgtgtttcatgtcgctcccttcgcgggagcgtggattgaaatttacacttctcgtagagacgtgtgcggttttcctgtcgctcccttcgcgggagcgtggattgaaatcattttgttgtttgtgattgggctattccggtgccgtcgctcccttcgcgggagcgtggattgaaatgcggaaagagattaaggggctttttgccccttattgtcgctcccttcgcgggagcgtggattgaaatgctttactgctttatccagagtgcggatacccggtagtcgctcccttcgcgggagcgtggattgaaatatagcagatacacgaatgaggaaattgcaaccctgtcgctcccttcgcgggagcgtggattgaaatatcggaagtgctctaattttggtgtagccggaagtcgctcccttcgcgggagcgtggattgaaatcttgactttggacgtttattatccactaaccgttagtcgctcccttcgcgggagcgcggattaaaaagagaatgacataacgatgtatggtattcaaactttggttaggagattttatcaaaattgttttttgatttcataggaaagctctttcccattttttatattttgggtattatatttgttgtgaaaaaatgaaagaaaaataatgccaaaaaatttgaatattttatgtgaaaaaaggtggataaatagtataacagaggttctcattttcaataggaggtgaacaacttggaaaaaagacgcaaccttccaggcctgacacgtgaagcagaagaacaaaatctgcaggaaatcatacagattgcacagaataacctggatcatgcaaaagcggacatacgaaaactcaatgcggatctggaagacctgctggatgtgtacgatgcgcaggataaggaaggacttgcactctggaacaatgcaacagtgcggctgcacgaaaacgagcataatctggtgcgttatgagaaagcacgaaagaaaccctattttggtcgtattgattttaaagatccaaatgcaaaagaagcagagtcttattatatagggagagttggcattgccagggacgtttccgagccggtagtgctggactggagagcgccgatagcctccgtttactacgagagcagtctgggctcctgccagtatgtcgtcagttcagaaggaacatttacgatcgatttgaaacggaagcgcacatacgaaattgaaaacgatcatctgaaagatttttttgattcggatgttgtggcaaacgatgaacttttgacaaagtatctggcgaaaaacaaaaaagcagtgcttggggagatcgttgcgacgatccagaaagagcaaaaccagatcatccggcgttctcccaagaccaatatcattgtgcagggagtagccggttccggaaagacaacagttgccatgcaccggatttcctatattctatacaattacagagacgatttccgaccggaagacttctatattataggaagcaaccggattttgctgaattatatcacaggcgtgcttccggaactggatgtgtatggtattcggcagatgaccatggaacagttgtttatccgtctgttgtacgaggattgggatgaacaaaattacagcgtgcatcctctggaaaaagacgatgcccaaaatgcccagaaaggaaacagagaatggtttcatgatctggaattatactgtgcagcctatgagcagagggagatttcacatgagaaaatctatctggaagacacagaaacacttctagccgggccggtactgatcaatacctacttgcgggagcatccggagctgtcgatgcagagtaaaatccttatgctcaatgaaatcctgtacgccagatatgaaaatgaagtattgggaaaacagatctcttatccggcaaaggtgaaaaaggcattggataagaaatacacttcttattttggcgatggaaaatggaagacatccatttatgatttttaccgggaatttttacaggtgcaggctgttgcgggaaaagaggtggatataccggaaaactcttttgatgtgtatgatctggcagcacttgcatatatttataagaggatgaaagagacggacccggtgcgggaggccagccatgtcgtcatcgacgaggcacaggattttggaatgatggcgtattgctgtctgcattattgtctgcgggggtgcacttatacgatcatgggagatacgtcccagaacattcactttcaatacggattaaatgattgggaagaattgaaaaaactggtgttgaccggcacctatgacgcatttggtctgttgcagaaaagttatcggaacaccgtcgagatttcggaatatgcaaatgatatcttacggcacggagattttgccgtgtatccggtggagccgattatccgccatggggcgaaggtgcgtgtagaaaaaaagcaggatctgcaggagttactggcacaagtagtacatacgatccgtcagtggcagcaggatggatatgaaaccattgccgtaatctgccgtgatgcgatagaagcggccaagattgctgcacagctgaaacagtatattgcggtgacagactgcgatctggagacaaccgaatttggagaaggcgttatggtgcttccggttgcttataccaaaggccttgagtttgatgccgtccttttatatgatccatcggagaaaaattatccgctggacaatgggcatgtaaagcttttgtatgtcgcagcaacgcgcgcattgcatgaactggcggtagtttatcaggaatccctgagtaaaattctggcagatccggttccggaaaacaaaaaaatgcaggaattttcttcggagacactgacgaaagcaaaagagtacgacaggaaactatttacacagaaagagatcgagcaggagcgccgtgcaaaaggagataaagagcacaacatccggggatatatcgggccgaaaaaaatagaagcatgtgtgccagaggagaagactgtgcacacgcatgccattcctcccgcttctaaaatatcaaaaatatcaaaaaagccggcaatcgaacaaatgaatatgtctccctatgcctttggagaactgccggataaccggagtcttccggtgcgcagccacgcaaaaatcagtggcgccgtgaaatcggccaaaaagacaaaggaacatattgatattgcaagcgcggcaggacttcttcgactgacaccgatcacaccggaaatcatccgtgtcagctatgtcaaaggagtaacaacaaagataaaaaatacttactggaagccaaaagcagaggaaacggttctctggagtgccaaagagtcaaagtccgcgttaagagttgccacagaaaaagtaatggttatcatcgacaaaaagacgggagccatgcgctttgaaacagcagacggaaccttgcttttaaaggagcgcacaacagaaccgcgcctgattatggaaaatcagacctgggaatttttcgactgggagttttccgaaaaaatcaatgcaaaaggagtgctttccacagatcttctggtgttgcgctccaaggcgaagtatatttcctttggcggaaaaccgatgcggatgccacttgttttatcggggaaaggatacggaatcggtgtcgctgcgacacaatccgttcttctttgtaatatcaaaacctatggtccctatatcagcacgcagggggacggacagattgattactattttatttatggtggaaataacgaaaaaaccatagctttgtataaaaaattaaattcataatttacaaaatggcaggtttttgccgatttctttcttgaaaaactttctcttttatatcggacagtgtataattgaaaataaatatcaataagtacagaaaaaacgaaggacaaaagagaatgacgttaaaagatttggaaatcggaaaaagtgccgttatcaaagcggttggcggggaaggtgtgctccggcagcactttctggatatgggggtcattccgggagcggaagtgacggtgattaagtttgctccaatgggcgacccgatggaactgcagatccatgggtatgagctgactcttcggttggcagatgcagatcagattacaattgagcagatttcttcccgtaccagaaagcatgaaggagccagaaacattaatcagtcggttcatccgggattgggcgaagaaggaaagtatcatgtaaaaggggatggaaaccctttgccggaaaagacgaggcttacatatgcgctggtgggaaatcagaattgtggaaagacgacgctgtttaaccagctgaccggttcaaaccagcatatcggaaactttccgggggttacggttgaccgcaaggatggaccgatcaaaggatacccagacactttggtgacagatctgccgggaatctattcgatgtccccttacagcagtgaggagattgtttcaagaaattttgtgctggaggataaaccaaaggcgatcatcaatattattgatgcaaccaatatcgagcggaatctgtatctgacgatgcagctgctggaaatggatatcccgatggttgtggcactcaatatgatggatgagatgaccggaaattcaggatcggtggatgtaaacgggatggaagcgatgctgggtgtgccggtggtcccgatttctgctgcaaaaaatgagggagtggatgaactggtaaggcatgcactgcatatcgcaaaatatcaggagcggccgggacgacaggatttctgtagtgaaaatgagtttggtggagccgtgcaccgctgtattcatgcagtcagccatctgatcgaggatcacgcagagcatgcgggaattcctctgcgttttgcagcttctaagatcattgaaggggatcatctgattctgcagaaactggaactggacgagaatgagcaggaagcaattgaacatctgattgtacagatggaaaaagagcgtgggctcgatcgcagtgcggcgattgcggatatgcgttttaatttcatcgaaaaggtgtgcgagaaaacggtagtaaagccgaaggcaagccgggagcgcatccgcagtgagaaaatcgatcggattctgaccggaaaatatacagcaattccatgttttatcggtattatgctgttggtgttcttccttacgttccatgtgatcggcgcttttttacagaacctgcttgccatggggattgacgcactgtctaatgtgacagaccgtgcgctgacggcagcgggagtcaatgaagtgcttcacggactgatcattgacggtatttttgccggagtcggaagtgtactgagtttcctgccaattatcgtaacattatttttctttctgtcattgatggaagacagtggttacattgcgcgagttgcattttttatggataaacttctgcgaaaaatcggactttccggacgaagcattgtaccgatgctcatcggatttggatgtacagttccggcggtgatgtcgacccgcacgctgccgagtgagagagaccggaagatgacgattttgctgactccgtttatgagctgttcggcaaaacttccgatttatgcattttttaccagcgcatttttcccagagtatggagcactcgtgatgtgtgctttgtatctgaccggaattgtgattggaatcctggttgcgttgttgtatcggaaaacactgttccgtggagatgcggttccgtttgtcatggagctgccaaattatcgtctgccggggctgaaaaatgttatgcagcttttgtgggagaaagcaaaagatttcctgcagaaagcatttaccgttatttttgtagcaacgatctgtatctggttcttacagaaatttgatttgcattttaatctggtggcagattctaaagacagtattcttgcgatgatttcaaactgcctggttccaatttttgcaccgcttggactgggagattggaggatctgtacttcattgatcagcggcgttatggcaaaggagagcgtgatctcaactctggaaattttatttggaggagcagtaaaggatgcattgacacaggtagcggcagcttcacttctggtatttagtctgttgtacacgccgtgtattgcagcaattgcttccattcgccgggaacttggacgaaaatgggcagttggcatggtgatctggcagtgtatgatcgcctgggtggcagcatttgcggtaaggtggctgatggttttatttatgagataatgaaaatagagcagaaagtacttgaaggaatcggaaagatagaataaaataataacaaaaaaaaggatcatttaatatgcgaaagcaaatgtggaaaaagagagtttgttttgttctggctatgattttggcagcgcttgctgtgacaccggttgaaatggatcatgcggatgcggcaatggtgcattccgttacggcactgatgactggaaatcttgtaaacaaatccaatgcagataaactgacgtaccggcagcttgagacaagtgcttatgagagaaaactgatttcaaaaggtgtgtacagctataccatgcagcaggttcccgcactgaaagaggggtcgaaccatatcaatgtgccggggatgaagggcaaggcaaataccagctatgtcaatgatgacggtatgggggaaaacgtttcctttgtcaaattccaatgtacaaaaaccggcaaataccagtttacggaaaataattttaagggaaaatccaagaagaaagttatttataacgacaacaactatcttatgtttctgccgaaagagttaaaaaacggatatgagatttatgatccatggaatcgtacctactaccagttcctctccagaaattttgcgagtggatatggtaaggtatggtacgatgccaatgccggaaagaaacttacaagaagtgccaatcgtgccatcaaaaattcaccgggatataccagtgccatacagagagaactgcagaagaaaaaagacagtatttccaaatacagcatgggatcagagacaaatacctaccgtctgaaaaaaggaaatacgtatctgctggttctttttacaccggattcattccgctttaaaaagaagattacaaaagaaaatgattattatgcagaacagtatctttcgggtgttccgtggtcatttgatttgaaaatcacctatatggattaacccatggtttagcaaaattaccctattgtattagaaatcagaacgtggtacaatgcataggaaaagaaaaagcattgacggaacgagtaatggaatcagaacatgcagagagagtggcagatggtgcgagccacttatggaaagatttcatgaaaaccactcctgagctgtgcgcgaaagaagcgtcaccgtgtagctgcgttacaggctataagagtaaaatattaaggtggaaccgtgtagaagcacccttagatatgtcaaatgacatatcagggtgttttttatttccatacaaaaagaaggagagttgtaatatggtaaactttaaggaaaacgaagaattaaaaacattaaaccattcctgtgcacatctgatggcacaggcaatcaagcatctgtatccgcaggccaaattctgggtaggaccggttgtagccgaaggattttattatgatgtggatcttggagaggatgttatccgcgacgaggatatcgaaaagatcgaaaaagagatgaaaaaggttgcaaaatccggaaagaaaatcatgcgccgcgaagtttctaaggcagaggctatggaaatgttcaaggatgatgagtataagctggatctgatctccgatctggaggatggaaatatcactgtatacgatcagggcgatttcacggatctgtgccgtggaccgcatgtagataatgtaaagctttgcagaaacttcaagctgatccgtcactctggtgcatactggaaaggtgacagcaaaaacaaagtgctgcagagaatttatggtgtatgtttcccgaccgcagaggagctggaggcacaccttaagcttttagaggaagcaaaggaaagagatcacagaaaaatcggaaaggacatgaacctgtttatggttgatgatctggttggccgtggacttccgatgttccttccgaagggatatgtgatctggcaggagctggagaactatatcaagaacaaggaaagaaagctgggctatctgcatgttatgactccttgtgtcggtaccgtaaatctgtacaagacatccggtcactgggatcactacaaagaaaacatgttcccaccaatggagatggagggagagtctttcgttcttcgtccgatgaactgcccgcatcatatgatgatctatgcaaacagaagacattcctataaggatctgccgatccgtatcggtgagatcgcacatgatttccgttacgaatccagcggaacgttaaagggtatcgagcgaggcagacatttctgtcagaacgatgcgcatctgtttgtaacaccagagcagattgaggatgagtttaccaaggttgtagacttgattttcagtacctacaaggatttcggaattaccaattaccgttgtgtactgtctctgcgtgatccggcaaacaaagaaaagtatcatgatgatgatgctatgtggaacaaggcagaggatgcactccgcacggtattgaatgatctgaaaattgattatacagaggaaattggagaggctgctttctatggaccaaagctggatgtaaacgtacagcctgcagtcggcaatgagatcacactttctacctgccagcttgatttctgcctcccggcaaaattcaatctgtcttatgtagaccgcgatggcgagaagaagacaccggttgttctgcaccgtgcaattcttggttccctcgatcgtttcatggcatatattcttgaggagaccaagggaaatctgccgacatggctggctccggttcaggttcgtgtgatgccggttaagacagacaacgaggaactgactgcttatgcaaaggaaatctgcgatgccttagaggcaaaggatgtccgtgtagaactcgatgacagatccgagaagcttggctatcgtatgcgtgaaggacaggtgcagaaggtgccgtatcttctggttgtcggcttcaatgagaaagaagacagaaccgtatccttccgtctgcatggagaaaaagataccacagttcttccactggatgagtttgtggagaagcttgagaatgagatcaaaaataagctgagaactcatatcggggctgaaaaataaataaaagccgatttgaaacagtaaaaaatgcgcgcagcaaaaagtggtgcccccccttttgctgcgcgcttttttgcaggaaaatatatttttactttcatgttagaaagtcgttgtattctgttcagaaacttccaacttccggatcaactggaattcatgtataaccattgccagtccaactgcaaaagataacacatccgcaaccggactcgcataaagaattcccttaattccccagaaacgcgggaaaagcaaaagcagaggaagcaggaataaaatctgtcttgtcagagaaagaaacgttcccttatatgcttttccgatcgaactgaaaaacgtcgaggaaatcggctgcataaaattaagccatgtaaacagcaggaaaatccggaaatagtttacaccgaaatcaaaatattctttgcttccgctgccaaacagaccgaggatctgtcgcggaaaaatctgaaacagcagaaaggatacaatggatacaatggcaccgaccgtaatcgccagacgatacgattcctttacccggttgtactgtttcgcaccgtagttaaaactctggatcggctggctgccctgtgacaggccgataatcacggaaaagtaaagctggttgactttcatgacaattccggaacaggcaatcggaattgactctccgtaaacggactgtgcaccgtaatgctttagcaggttgttcatcgtaatctgcacgatcatcatggcaacctggttgatggcagaagccatgccaagtgagcagatctgtgccagatgggaagcattcggccggaaatgctcggagtgcagggttactgtgcggtagtgtgacagatagcagaccgcaataatcgcagagatgacctgaccgatcacggttgccgctgcagcaccgtacatgccccagtggaatcccagaacaaacacggcatccaatacaatgttgatgacggcaccggaaatatttacaaacatcgccatcttcgggctgccgtctgcacggattaagtgtccacttccgatcgtaagaattaaaaaaggaaaaccgatcgccgtcacacggacgtattgtcgggcaagcgggagaacatctgcaggggaaccaaatccgaccagcagaggattcaaaaataattcggttatggcaaaaagaaggatgccaacggtaagaagcattgtgatggcgtttccgacaaaatagggagctctttcttttttgccggcacccatgtgaaggttgaagcttgccgcaccgccgattccaaacagaagtccaagtcctgtgcacatcatggcaagtgggaatgcaatgttggtagcggcattgccgagtgtgccgaccgcatttccgataaaaagctggtctgcaatgttgtataccgcactgacaagcatggcgataatgctcggtacggaaaagcgcagaatcagcgaagaaattttgtccacggcaagtggattttgttgttctgaagtcatatgtttcgccctttcttatgttaatatctgtatttgcttttatatggcagacttatattattatagcttttttcctgttttttttcaatgaagccgggcagcagaaaaataaaatggaaatttttgtaattttgaaacttttatgcgtgatgaatggtctaatagatagaaacaaaaaacaaggaggaacataaaatgagtaaacttagtagtgtattaaaaaagacaggtattgcagtagctgctgcggcaatgctggtgacaatgggagcaggaacggtggttacacaggcaaaaacaagtctgccggtttataaagtatcgctggcaaagaagtataccgatcaccagaaagacaaacggatggaagccagcgtaaagattccgaaagtgaaaattacaggtacagacggaaaagtcatgaaaagcgaaagtgaaaaactgaatgctgcaatatccagttatcagaataaatttatcaaagattataaaaaagatgtggcagacgtaaagaagggggagaagggaaacgagagccttacttccggatataaggttgtaaccgacaacgacaagatgttttgcctgcggattgatacggtaattgctatgggcggctcccagagttatgcaaagattttcagtgtggataaaaaatccggaaaacaaatcactctgaaaaatctgttcaaaaaaggaagcggctatattgaccggatttccgacaatatcaaagaacagatgcgggcacagatgaaagagaatgcagatgttacctattttgtggacgatgaaaacaataagttcaatttcaagtccatcagcaataagacaaatttctatgtcaatgagaagggaaaacttacccttgtatttgacaagtatgaagtagcaccgggatatatgggaatggtcgaattttccattccgacaggtgagattgtagatatggttacaaacggatatctgaaataaaaggcatatagaaaaaatggctctgtgggcaaattccacagagtcattttttctatttggtgcaaatgaagaggatgcaatttctgatttttatggtatactgtctgtagaaaataaaatgacgtgagagtatacctatgaaaaacacgacaggccataggcttaaatatgttggaatatgcaggtgtaggggattgaagcatgcagttcgtgttgactaatttgtataacagctgataaaatgattgggaaaattacggcatctgattcattcatctgcagagcatttggtgaaaaagatacgacggtaattgtgttgaacaattttaatataaatgaataaaaactctgacggcaaggatgatccgagcaggaatagttaagaaataaggatttacagaaccatctttctgacagattgcccgaaagatggttttttgcgttgaaaataacaggaggatagcatgttaaaggtagcagtatacggaaagggcggtattggaaaatccacagtgacttccaatcttgcagcagcttttgcaaatatgggaaaacgtgtcattcagatcggatgcgatccgaaagcggattccaccattaatttacttggtggtgagccacttcgtccggtaatgaattatatgagggaagaggacgaggagccggatgagctggcgcagatttcaaaggaaggctatggaggaatcctctgcattgagacgggcggaccgacaccgggacttggctgtgcggggcgtggaattattgcgacttttcagcttcttgaagatatggaactattcgaacattataaacccgatgtggttttgtatgatgtattaggtgatgttgtgtgcggtggatttgcagcaccgattcgtgagggatatgcggataaggttctgatcgttacatccggtgaaaaaatggcactgtatgctgccaacaatatttccagtgcagtcagaaattttgaggatcgcagttatgcccgggtatttggcatcgtgttaaatcacagaaatgtggaaaatgagaaagaaaaagtacaggcattttcagaaaagatcggggtgccgattgtgggagaagtgccgcgaagtaatgaaattattcactgggaagagcagggaaagactgtgatcgaaggagatccggcatctgaaatcagcagatgtttctttgatcttgccacattgttatggaaagaagaggaaaacgcatgagacaggaagcatatttttgtacggtaaaagagctggatgagcttggaaaaaataacattcccagacagcttatttcccatacacatctgatctacagttcccctgcaacgctggcattcaattctccgggagcagaaggatttggtgtcaaacgtgcaggtctggcggttccggattctgttatgttgatcgtgtctccgggatgctgtggccgcaatacctcggtgcttagttcgatgcgggcctatcaggaccgtttttattatctgttgatggatgagacggatattgtgaccggaaggcacctgaaaaagatccctaaggcagtagtggaaatatgcgaaggacttaagaaaaagccgtctgttgtgatgatatgtattacctgtgtggatgcgctgcttggcacggatatggagcgtgtctgtcacaaggcagaggaatatgcaggggttccggtaaggccatgttatatgtatgcactgaccagagagggcagaaaaccaccgatggtgcatgtgcggcagtccgtttattcgttgctggaaccgaaaaagaaaaaaggaaacgtggtgaatttactgggatatttttcaccgcttacggatgactgtgagctgtatgatctgcttcatggggcaggagtaaaaacaatccatgagatttccaggtgcaaggattatgcacagtatcagaccatgtcggaagcaaattttaatctggtactgcatccggaagcgcgctttgcggcagaggattttcatgaccggctgaaaatcccatatatcgagctgcgcagattatatcagatcgataaaattgccagtcagtatcgtgctcttgccgctgcactgggtgtggaatttgaggatgaaataccgcgtaaggcagcagaggaggcggtagaaaaattcaggaaaatacatccggatgcagtatttgccgtcggagaatggatgaacggagatccgttcgaactggcacttgcattggtacactatggatttcgtgtgtcggagatttatggaacattatccggtgaaaactttgtctatgtaaaacaactggcaaaaatcagtccggatacgaaagttttttccaatctggaaccgaccatgctgtattatgacaaaagtcagtccggcgtcaatatgaccataggaaaagatgccggctattatcataaagaatgttccaatgtgctctggaatgaagaacggcagccatacggttatgccggtgtgcgcagactgtttgaggcattggcggaggtataacacaatgagaggactgagaaaatatctgacaccatttgcaccggatcagtcaggtgcggtgtctgtattatatgaatttggcggtattatcgtcatttgcgatgccggtggttgtaccggaaatatctgtggatttgatgagccgcggtggtttgagagcaaaagcgcactgtttagtgcagggcttcgcgatatggatgcaattctcggccgtgatgacaggctggtggtaaagcttgcagatgccgtgacaaaactggatgcaaagtttgcagcgattatcgggacgccggttccggccgttatcggaacggattaccatgccttaaagcgtatgacggagaaaaaagtggatctgccgattctgactgtggatacggatggaatggaattgtatgacaagggggaagaaaaagcctggaaggaactgtttttggtatttgcaggtgaaaaagaagacgtgattttgggcagaatcgggatacttggcatgacaccacaggatatcagtgatctgcgtgcagcagaccgtatccgggagcgttttgcggcagaaggaaaaactgctgtctgctttggaatgggaaatggacttgatgatgtaaaatcggtttccaatgtggaaaaaaatatcgtggtatcgccggccgctttagaggcagcgaaatatctggaacgaacatatggaacgccgtacgagacaggctatccgctggtggatgaactggtttacgatatggattatcatgggaaaaaggtacttattgtacagcagcaggtgatcggatctgcaatccgggaagagataaaaaaaaagcaaaggatgcacaggtgacagttgcaagctggtttatgataaagccagagctttgcagtgacacagatctgcatctgcgggatgaagaagattatataaggctggtggaaaacatggaatatgatgtgatttacgcggatccatgtatgaagcgtatgacaccggaatttgacggaatctttgtggatacgatacattttgcggtgtcggggcatcttgcagagatgagataacagttgccggttgtcttgtaagatgtgacccgcaataagggagtgtacgattggagaaaagtgtgtataagaatgagatgacctggcgcatccgggtatacggtatcgttcagggtgttggtttccggccaacggtaagccgccatgcgacaaaccatggaatttacggaactgtttgcaataaaggaccctatgtggaaatttatgcacaggggacaaaagaacagatcgaaggatttttaaacagtctgaaagaacatccaccgaagcgtgcggctgttttgaagataaatacagagaatatcactgcagatacaacagaacactttgaacattttgacattatcgaaagtgaaaaaacaaaaggggaaatctttatttccccggatattgcaatctgcgatgagtgcaaggcagaaatgtttgacccgaaagacagacggtatctgcatccgtttatcaactgcacctgctgtggaccaaggcttacgattctggatgctctgccgtatgacagggaacgcacaagtatgaaagagtttccgatgtgcccggactgtgcaaaagaatacacggatgagaaaaccaggcggtatgacgcgcagccggtgtgctgcaaccaatgtggaccacaggtgtatctgatcggcagacccgagcggggacgtgccgcaattacatatacacgccggcttattcgtgaaggcaaaattgtagcaatcaagggaatcggagggtttcatctgtgctgtgatgctacaaatgaagaagtggtctgccgtcttagaacattaaaaaaccgcccggccaagccctttgcagttatggcaaaagatgaatcggttgtaaaacgggaatgtgtggtgacgccggagcaggaggcgattcttaccggacatcagaaaccgattctgttactggacagacgaagcgatggcgggctggcatcttcggtggcaccgaacaatccaaaagttggtgtgatgcttccatatgcaccggtgcagttattgatttttcagtatgatgatggtatcgagatgccggatcttctggtgatgaccagtggaaatacttccggtgcaccgatctgtcgtgaggatgaggaagctgttgccgaattatcccatttgtgtgatgcgatgctgtcacataaccgcaaaatcaggatacgggcagatgatacggtgatggatttttacagaaatgaaccgtacatgatccggcgttccagaggctatgcaccgctgccgtttatgacaaaagcagactggaaaggacaggtgctcgcggttggcggggaattgaaaaataccttttgcataggtgtggacaacaggttttatccgtcaccatatgtgggagatctggaggacttaagaacggtaaaggcattgcaggagacaatacaccggtttcagacattgctggaagtaaagccacaggctgtggtctgtgatctgcacccaaaatacaattctacggttgtagcggaagaacttggatatccggtgataagagtgcagcatcattatgcacacatattatcgtgtatgacagaaaatgactgtcatgatccggtcatcggagtcgcttttgacggaaccggatatggaacggatggcacgatctggggcggagagatcctgctggcggattatgggaattttacaagattcggaagtattaccccgtttttacagatggggggcgatgcttctgcaaaagagggctggcgtattgcggtctctatgatttacggatatacgaaagatcgcaaaagggcatgggagatcatggaaacactgggtctttgcagcgaacaggaaagcagggtacagttcaccatggcagaccggaagatcaatgcggtggcttcaaccagtgcaggacggctttttgatgccgtcagtgcgatactcgggatcaggcgcaggtcaggatttgaaggggaagcatcgacggcattgcagtttgcagcagaggcatacgagcagcagaacctctcaaatatctcacaggagcaaaaggaaaataaggatatactgctgcatgaaacaaaagagcgtttcgttttaaatacacagatgttggtgcagcagattacagaagcaaaaatgcggggcgaagacaccgggatgctggcatatcggtttcatcaggtactggcagaaatgattacagctgcctgtatcaaagcaaaagaaagcagtggcagggataaagttgccttaagcggtggcgtattccaaaaccggttactgctgcgtctgacagaagaacgactgttacaggaaggattcgaagtgctgcggcaccgcatgattccgccgaatgacggaggaattgcaatcggacaggcagcatatgggatgtatcaattacagaaataggaggataaaaagatgtgtgtaggtttatcagctaaggtagtaaaaatcagtaatggcacggcggtcattgatgcaggcggtgccaaaagagaggtttcttcccagcttctggaagatctggagccgggagattatgttatggtgcatgcaggtgtagcaattgcaaaaatcaccgatgaggacgacagtgaaaccgagcagctcatggaggaatttttataatgaaaacagccagagagatcattgaaaattatgatggcccggatgtgcggatcatggaagtgtgcggtacgcacacacatgagattttccggctgggaatccgtaaactgctgccaaaacaggtagaattgatttccggaccgggatgtccggtatgtgtaacaccggttagttttatagatgaagctatttatctggcattggaaaaaggagttacaatctgtacatttggtgatctggtgcgagtgccgggaactaatatgagccttgcgggagccagagaacagggagcgaaaatccatgttgtgtattctccggcagatgccgaaaaatatgctggagaacatccggatgagcaggtgacatttctgtcggtcggatttgagacaacgacaccggcaggatgtctttccgtaaaggcggcaagagaagatggactggataattactctatattggtggcaaacaaaaccatgcctcaggcgtatgaggcattaaaggacagtgcagatgtatttttatatccgggacatgtcaatgccattacgggaacacgtctttgcgaagctctgaccgaagaaggggtcagcggtgttgtggcaggatttacggcaaaagaactgatgacagcactggcggttgcgctggtaaaattccaggaaggaaagccattttttgtaaactgctatccgcgagtggtgacacaggatggaagcagggaggcacagctgcttgtagatgagatgatggaagcctgtgactgcgaatggagagggctgggtgttattccgaaatccggcatgaaattaagacaggagtggcaggagttcgatgcacgtctcaaatatcagatgccgaaaattgaaggaaaaccaaatccggcctgccgctgtggcgatgtacttcaggggaaatgcaaaccatccgattgtaaagtattcggaaaaggctgtacaccgcagcatccgatcggcgcctgcatggtgtccggtgagggagcctgctctgcatattatcagtattcataagaaagaaggaaaaaacatcatggaaaataaaacagtaacgatggcacatggtgccggtggaaagcagacatccgaattgattgatcaggtgtttaaggcacattttgtaaacaatgatctgacggcagatgatgcagcggtattagttccgccggcaggaagaatggcagtatctacagatgggtttattgtatctccggcattttttccggggggaaatatcggcaaactgtctatctgcggaacggtaaatgatcttgcctgtatgggtgcaaaaccgctttatcttacctgcgcttttgtaattgaagagggatttccaatggaaaaactcgaagaaatcgcagctgccatggaaaaaacagcaaaagaggccggagtacatattgtatcgggagatacaaaggttgccggaaaaggacaggtggatggaatttttatcaccacgaccggaatgggggagatcgaagaaggagtgaccgtcggcggagaactggcaaagcccggagatgcaatcatcgtaaccggtgatatcggacggcacggatgtacgatcctgttagagcgggaagattttggcatcgatgcggatgtgaccagtgactgtgcacctttgtggaagaccgtaaaggcagtcatggataccacacataacctgcatgtgatacgtgatgcgaccagaggcggcgtcggaacagtcctgtatgagatcgcaggtcagagcagcgtaggcatccgtttaaatgcagaggctgttccggtacggccggaagtaaaaggagtctgcgggatgcttggacttgagcctttatatctggcatgcgaaggaagacttgtcatcatggcaccaaaggaagaggcagagggcattgtagaaacattgaaaaaatgtccatattccgcagatgcagctattattggtgaagtgatcgcagaggaaccgggaagagttataatggagacggaaatcggcacacaggcactgcttccacagccggggggagagcttttaccaagaatctgttaacaggaggagtcagggcatggaaaccagagtggcagttatttcaattattgtagaacaggaggatgccattgaagaattaaatatccttcttcatgaagcacgtcagtacattgtaggcagaatgggcataccataccgcgcaaaaggaatcagcatcataagcattgtcattgatgcaccacaggacacgatcagtgcactttctggaaaaatcggacatttaaaaggtgtattcgcaaagactgcatattcgaatgtcattactccggcagaagggggaacacaggattgatcaggatagcagtatatggaaaaggcggaatcggaaaatccactaccgtttcaaatgtagcggctgcattggcagaaatggggcttaaggtgatgcagatcggatgcgatccgaaagcagattctaccatattgctccgtcatggaaaggctgtgccggccgtgctcgacttatataatgagaaaaagcaggcgttgcagctggaggatatgatacgcattgggtataatggtgttatctgtgtggaggccggtggaccgacaccgggacttggctgtgccggccgtggtatcatcacggcactggaaaagttaaaagagcttggcgcatatgatgtatacaaaccggatgtggttttatatgatgtactcggagatgtggtatgcggtggattttccatgccgatgcggggcggttatgcggacaaaatatttattattacctccggggaaaacatggcaattcatgcagctgcaaatattgccatggcagtggaaaattttaaaaaccgtggatatgccgggcttggcggactcattttaaatcgcagggatgtcccgcgggaagaggaaaaagtggcagaactggcagacgattttcacacagctgttattggtacactatcacacagcgggcaggtggcactggcagaggagcagaaaaaaacattgatggagtgttatccaacaggtgaaatggcagacgaataccgtgcgcttgccatgcagatgtatcgcatatgcggtggcattctggaagcgaaaagcgataaggtaaggtctggatatatacaggaggaagcgtaatgttacgtcgtgtgggggaaactgttgattcgaaagatgctgtggtaaaaataaaagatgcctcatttccaacaccatttgtttcggcactggagtataattcgccggtgcatggcaactggaatattgtgcatacgggaatgcaggttccggaatctatccagatctatgtctgtgcggataactgtatgcgtggtgttgtactgactgcggcagaaatgaatgcagcagaccgtttttcttttgttcttgtggaggagcagaatctgctaagcggcaatttggaggatattaccatcgagggtgtgacggatgtgttgaataaacggaagaaccatcctgaggcggttctgctttttaccgtttgtctgcatcattttgtgggaagtaatctgaactatatttacagggaactggagcatcgttttcctgacatctgctttatccgctgttatatggacccgattatgcaaaaacatggactgacaccggaccagaagctgcggaaagcaatgtatgatcctcttttgggctgtgagccggacgctaaaacagtatctgtctttggcagtgattttgttctggatgagaacagtgatattaagcgtctgttaaaacgatatggttataaggtgctggaactgcccggatgtaaaacctggcaggaactgttggatatgagcaggggatgcctgtttatcgactgctatccggctggaaaatacgggatggaggcacaggcaggccgcctgggacgaaaatctctgtatctgcccggcagttttgactatgatgagatcagaaagcagttaaagcagctgaccgatgcactcggactgccggaactgacagaagatgagctggcccgcgagcaggagtcctgtgaggaggctctggcaaaagcaaaaaatctgatcggggatatgccggtcactctggattatctgtatcatccaagaccacttggactggcaaaactgcttctgacacatggcttttgtgtgaaagctgtttatctggacagtatcagtccagaagaaaaagcagattttttctggctgcaggagcatgcaccggaacttgagctgatcgcaacgattcaggtgaagatgcgtgtactgccaagaggtgcaagcggggaagtgctggcaatcggacagaaagcggcctattttggccgaagccgtcactttgtcaatctggtacagggagaaggtctgtatggatttgacggtattcgaagaaccgcagagctgatgatggatgcatatctcaatgaaaaggatacagaaaaacttgttgtacaaaaaggatgggggtgtgagtgctgtctatgagacaatcttatcgaatgataccggtttatacggccgatgtgtcaggagtctgttctgcactgtatgaacttggcggaatgacagttatgcatgatccttccggatgcaactctacttacaatacgcatgatgaaatccgctggtacgatcaggacagtcttatttttatctcgggacttacagaaattgacgcgatcatgggaaatgacagaaaatttattgatgatatcgagtatgcagcccgtgaactgcatcccaaatttatcgcgctggcaggttcgcctattccatttatgaatggtacggattttcctgcaattgcgcgtgtgattgagacagaaaccggaattccggcattttccgtgccgacgaacgggatgaatgattatgtgtatggagcgggcattgcactcgaagaaatcgcaaagcggtttgtcagagaaacggacaggcaggagaatagagatccctcttcgcgcacggtaaatctgttaggtgtgacaccacttgatttcggaccacagaaaaatgtagaaaccttaaaagagaatctgcagaaatacggatggcaggttatgtctgtgtgggcgatgggcgatgatttgaaaacgttgcaaagatcagcggaggcagacgttaatctggttgtctcggcagtaggactccgtgtggcaaagatactctgggagaagtacaaaataccatatgtgatcggaacaccaaacgagtggctggcagaagatatttcaaatgcactggagcgtgcagccacacggcaggcagagccggcggttgtatatttgcagaaccgcatgcagcaggaggcagatatcacgctggtcggagaacctgtcactatgggatcattagcagcagggattgaaaaaagatatggtcgtgccgcccgcgtactgtgtccgttaaaggaatgtgcggatttgctcggtgaaaaagataaaatggtgcttggagaggaagcaatggaagaggcacttaaaagtgcagggatcattgtggcagatcctctgtatcgtccgatctgtccgggggacagtattttttatgaattaccgcatgtggcattttcggggagaatatatttttgagaatactattgtcaggatgcaaattgcaatctgcgatgatgaaaaatctataggcttgatattagaagaaaaataaagaaattattaccggatgcagtgatagaaacatatttatcgggtgatgaactgattgcaagtggttgtaagccggatatgctctttttggatatccagatgccgggaaagaatgggatggaaacggcaaggattctgcgtcagaaggatgacgaagtggatgttgctgcataaaccagttgacagattcctttcggaagtataatataaagacaaatttcataggatataaaaaacaaagggcgatgttgttcagacactgcccttttttatttgaaaacaggagggatgaggttatggaaaagttaaatgatgtgattacagcaattgacgattttgtctggggaccggtcatgctgattctgcttgtggggaccggaattttccttacgatccgcacgcggtttctgacatggagaaatctcggttatgcactcaaaagtacgttaagcaaagaggcgcggacgaaaagccatggcgagggcgatgtgtctccgttttcggcactgaccacagcacttgccgccacaatcggaacgggcaacattgtgggggttgcgacggcgatggtttccggtggtccgggagctttggtctggatgtggatctctgctgcatttggtctgacgtcgaagttcagtgaatgtatgctggcgatcaaataccgtgagatcaatgccaaaggggagatgagcggcggcccgatgtacacgatgaaaaaggcactgaagaataaaagatttggagcggttcttgcgtggttatttgcactctttgctgtgattgcttcgtttggaatcggcaatatgacacagggaaattcgatttccggtgcattacatacgacatttcatgtgccgacccatctgaccggaattgtgattacggtgcttgccctgctgatcattgtcggcggtatcaaatccatttcaaaggtttcttcggtggtcgttccgttgatggcgattttttatgtgatctgtggagttattgtcattatcggaaatatttcgaatctgccggcaggcattttgatgatttttcagatggcattttcggtaaaagcggtaggcggcggtctgtgcggaacgattgtcgcttccatgatgaatgcaatgcgttatggtgtggccagaggtgtattttccaacgaagccggtatgggatctgcggcaattacggcagcggctgcaacgacggataacccggtgcgtcagggatatatcaatatgacgggaaccttctgggatacgattgttgtctgtacgattacgggacttgcgattgcctcttccggtgtccttggcatgaccgatgctgccgggaatatgctgaccggttcggatgttacaattgcagcatttgagacggttctgggatcagccgggggctggcttgtgacaatcgggattacattgtttgcgttttctacaatactcggctgggagtatcacggggaaaaagcatttgaatatctgctgggaacgcaccggtttaatatggtataccgccttgttttttcctttgttgtgtatttcggatgtacacagacactgaatctggtatggagtttctcggatattgccaatgcgctgatggcaatcccgaatctgatctgtatgctcctgctcagtggtgaaattgcaaaggatattcgggagtttcagaaagaaattcataaatataattaaaaaatgtaaggttattctttgctatcagcccgaagcgtagtataatgtagttatctgaattttatagacatggaggttaggaaattatgcagatggaacagctacgcaaagatatgatggcagcgatgaaagcgcgcgacaaggaacggaaggatgcaatttcgtctctggtttcggcagtgaagaaaaatgccattgatgccggatgcagagatgacattccggaggatatggtcaatgccacaatcatgaaggaattaaagaccgttcaggaacagatcgattcctgcccggcagaccgtaccgatttgctggaggagtacagaaaacgttatgacattatgaaagaatatgcaccgaagatgctttcgaaagaggaagtgactgcgattgttaaggaaaagtttgcagatgtgattgcaacgaagaacaagggacagatcatgaagacgattatgccggagctgaaaggaaaggcagacggaaaggtgatcaatgaagttgttacagagatgtgcaacgcataaaggagaagaaacatgagattgtatatgccgacgaaggtattttttggcagcggttgtgtttcggaaaacggtgcagagttaaaagcattaggaagcagagccatgattgtgacgggaaaacattccagccgcatcaatggttcgcttgcagcagttgaacaggcattgcaggcaaacgggcagacctatgtgatttttgatgagatcgaagagaatccttctgtggagaccgtggctgtggcagcgggcattgcggtaaaagaacaggtggatttctttgtggctgtgggaggcggttctccgatggatgcgtccaaggcgatttcgcttctggcagcgaatccatcggcaatcgatcatgcagaggggcgtctttatcatccggagccgatgcagggctatccggttgcagcagtcccgaccacatccggtacgggatcggaagtgacgccttatgcgattctgacacggtacgacttacataccaagcagtcaatcgcacacaaatggtttgcggatctggcatttgtggatgccggatatttaaagacttcttcttatgagaatatggtcagcacctgtgtggatgcgctggcacatctgattgagtcatatctgaatacaaatgcgaatgcatataaccggatatattcagcggaaggtcttcggatctggggcagtgcaaaggaatacctgctttcttccgagattaagattccggatgaaggatacgaaacattcatgcatgcatcggttgtggcaggtatggcgattgcacataccggtaccagtattccgcacggattaagttatccggttacatatgagcttggcattccgcatggaaaggcagtcggatttttcctgccgggatttttgcgtttttacaataatcagaagcgggtggcagaggtgcttgagctgcttgggtttgagaaccgggctgaatttatcgcctatctggacaagctgctgggcaaaccacagatcccggaggaactgtgggaggaggatgtgcagaaactgttgcagaatcctgccaagttaaagaactatccgtttgagatgacggaagaaattctgaaaaaatatctaaacaaatgagaacccgtttgaggaggaaacttatatgatacaaaagttgattgaaaagttaaataagaagagattaaaagaacgaatttcttctgcaattgtgatggtggccctgattgtcagcatttccggtgttgtgggagccgtttccggaattattgtcagcaaccgctataattatgcattgaaaaattacggtttttcacagggggatatcggcaagatgatgattacgtttgccgatacgagaagttatctgcgtgctgcgatcggatatcaggatgaaaaccttgtgaacagctgcgcagaaaattatgagaagaagaaggaatcctgtcagcagtataccaaagaggtaaaaaatacggtttcatctgcggatgaggagaaaatttataatagtatcacagaaaaactgaacgattattttgacacctgtgatgctgtactggaaaaaggaaagaatacacaggatattgatgcgcgccatgaagcacagcagatggcacaggatcaggtggcaccgatctatgaggagatttatcaggatatggtgaaactgatggatgcaaataccgagcatggagataagttagagaaaattcttacaatggtagaattgatcacacttattgcaattattgcggttattgcacttgcaatttttgcagcccgccggatcggcagagtgcttgcacagaatattgttgatcctttggatcagctgggtgctcgttttgatacatttgcaaagggggatctctccagtgaattcccggagatgacatcagaggatgaaatttctgagatggtaattgttgcgcgcgagatggcaaagaatctggccgccgttattcaggatgtcaaccaccgtatggatctgatggctcacaacgattataccggtgtatccaaaatcccggagaaatatatgggtgagtttgcggcaatgaatgatgcaatccatgtcatgaacaccgatatgaatgagacgatgcaccggattgaggaggctgcttcccaggtatctgcaggttctaccaatctggcagagggatcacagacactggcagagggatctaccgatcaggcaggtgcagtggaagaacttctggcatcctttgccaatatcacagaaggggttgagcacacacatgagagtgcacaggcttcttacgaattatctgtaaaatatgctcaggaagcagataagacacagaaggaaatgaatgcagttaccgaagcaatgaagagaatcagcgatatgtccaagcagattgagacaatcatcggacagatcgaggagatcgcggagcagaccaatctgcttgcactgaatgcatctattgaggctgcacgtgcaggagaagccggcaagggctttgccgtagttgcatcccagatcggaaaacttgcggatgagagtgcacagtctgcggtaaatacccgtgagctgattatgaactctatttaggaaatcgaaaacggcaaccaggcagttgatgtgacttcccagacgattatttctcttgtagagggaatcaatgaagtggcaaagaaatcccaggaactcgcacagctttccgagacacaggcagagcagatcaagcaggcagaatccggtgtaaaccagatttccgaggttgtacagagcaacgcggcaatcgcagaggaatcttccgcaaccagtcaggagctttctgcagagtctgattctctgaatgatctggtgcagcagttcaagttaaaatagttatataaaataaaggcataagagaggaataatctggaaaatggatacgtcgatttttatcggaacatggtggtcactggtgccgcctcttctggcaatcatactggcacttgtcaccaaggaagtatacagttccctgtttattggagtggcggtcggagcactgttatataccggatttcatccgtggaatgcattcaatgccctgttttcgattatgaaagacagcatgaatctgaatattctgatttttgatgtgctgcttggaatgattattgtattgatgtcaaaatcaggaggctcagctgcttatggaagatgggccggcagcaagatcaagtccaagaagagcgcaatgctggcaaccacaggacttggaatactgatttttgtggatgattatttcaattgcctgaccgtcggatctgtgatgcgtccggtaactgaccgctacaaagtatcccgcgcaaaactggcatatatcattgatgcgaccgctgcgccggtctgcatcattgcgccgatttccagctgggcggcagccgtcaattcgtatgttccgaaagatgccgggattacgggatttcagctgtttctgcgaacaattccgtacaatctctatgcgattctgacgcttgtcatggtattttttgtgattattgcaggttttgatttcggactcatgaaaaaacatgaggagaatgctgcaaaaggagatctgtttaccagcggcggggaagagtttgaaaaggttaagaaagaagatatttcttccaacggaaaagtgattgatctgcttcttccggtgattgttctgattggttctgcaattggtgccatgatctataccggatttctgggcggtgcgaccgatgtggtcagtgcatttgcaggatgtgatgcggagaccagcctgatttttgcaaccatggtcacggtctttgtcatgctgtttttgtatcttccgcgaaaggtggttacgtttaaaggattcatggagagttttgtggaaggctttaagctgatgattccggcgatcggaatactgatatttgcctggaccttaaagggaatgggagatgctctgcagattggtacatttgtggaatccatcgttggaacgagtgcttctgcaagcctgttccttccggctgttttgtttgttgttgcagtgttccttgcgttttctaccggaacaagctggggaacatttgcgattcttgttccgattgcaatcgccatgtttccgggggcagatcatctggaaatgatgatcattgcggtttccgcagtgctggcaggtgccgtctgcggggatcatatttcaccgatttcggatacaacggttatgtcttcggccggcgcgcagagtaaccatatcaaccatgtgacaacacagatgcagtacgcagcggttgttgctgtggtatgtatcattggctatatcattgcaggactggtacagatctggtgggtagcactgggcatcagccttgtgcttctgcttgccgttcttactttcataaaaaagaggtctgagagtaacagcaaaaagacggcagacatataaagatcaaatgcaacctgttcaaatgtgaaagttgaaagaggagaagttatgtgggaaatagtgatttgcgattcggataagagctttgcgtcaaagcttgaggaccatgtgcgcaatttctatcaggaccggaagcttgagacgaatgtacggatttatacggagggtgcatcgttttgcagggacctggatgacagaaaaatggatctgatttttctgaacacgagattggctgatgtacatgggtatgagcttgccagagaaattcggaatcgggaggagaaaaaggaaacttctctgatttttctgagtgaccatgatgaggatgtatttgaggcattttcttatcaaccggttgcgtatatgcggaaaatgcgttcggaacaggaactggaaaagcttttatgccgtttgtgggccataaagcatgcagggcggagtattacggtccggcatcagcgttctcataagctgatccggatacaggatattatgtatctggagagccaggggcattacctttccattcattgtgcagatggagaaaactatcgttttcgtggcagaatggcagtgtacgaagagatgcttcagggctgtttttttgtacattcggcaaaaagttatctgatcaattgtgcttatatcgagcaaattggagaagaagtaaagcttaaggaagagatttcagtgccatgcagcaaggcaaggcggtcggatgtgagaaagatgcgtgatctttatctgcaggatgttgcctgcatgctgtaatatcatgaaaatacaaacagaagtccgaaaaacaaagaaaggagcaggcgaggaaacctgctccttcttagttacttaaaggaaattgagtaactgagtagttaattagataattgtttaataaaattgaactacatactcatttgcgtacgtgcatgctatatttaaataacaccattcaatacttacattataccgtgttattcggattttgcaatacctattttgaaatttttggaattaatcctttattttcgctattccgaaagcggaaggaagtccggctttctgccggtaaagactgtaaagtaccggaagcctgcatgccgcagaatctgagggagacggtcaaacgcatatgcaacgtgctccggcacatgggcatcggctccgagtgtcagaatctctcccccgagttcgtgatagcgtaaaagaacagcttcggtcgggtttggatgtcccagcccgtatttgaatcctgccgtgttgacttcgatcccttttcccatggaaatgagtttacgcagaatctcatcaatgatatcggcataggcctcatatgtatagaaacggttgcggtccggaccgtagcggacaacataatcgagatgaccgtatacatcgaagtcggaataggtgttcaggttttccagaatggattcgaagtactcgcggtaagcagttttttcggagcgtccttcatagtatttcgggtaatagggatcgattccgtgaacaacgtgggaggaaccgatgacaaaatcaaacggatgtccggtcaccgctttgcggttgatttccgtgatgtggggctgcagaccgacttcgattccgagacgaatggaaagacggtcacggcaggtgtcctgaaaactgcggacttcttttatataggaatcaaaatccagaagaaacagattgggatcatccgggtaatcataatcaaaatgatcggtaaaacagatgccatccaggttctgccgtacagcggcctggatcatgtcaggcatcaatgcgtcactgtctccgctgtgatgcgtgtgcatatgtgtatcccaaagcataagagcctccttttttctgtgtggttggttttggaaaaagtcttttcgtaagattatactatatttcaggggaaatagatacctttagtgaaaaaattaacaaagacggagaaaagacttgaactttcggaaataattgggtaaaataaaggaagcttgggacgcaagtcccatgagactatttatttacaattctaggaggaattaagaatggcagtaagagtagcaatcaacggattcggccgtatcggtcgtcttgctttcagacagatgttcggagcagaaggatacgaagtagtagcaatcaacgacttaacaagcccaaagatgttagcacacttattaaagtatgatagctcacagggtaagtacgagcatgcagatgaagtttctgcaagcgatgattctatcacagtatgtggtaaggaaatcaagatctacgctttcccagatgcaaacaattgcccatggggtgagttaaaggttgacgttgtattagagtgctctggattctatacaagcaaggagaaggctcaggctcatatcaatgccggagctcgtaaggtagttatctctgcaccagcaggaaacgaccttcctacaatcgtttacaatacaaaccacgagacattaaaggcttctgacacaatcatttctgcagcttcttgtacaacaaactgcttagctccaatggcagatgctcttaacaagtttgctccaatccagtctggtatcatggtaacaatccatgcttacactggtgatcagatgactcttgatggaccacagcgtaagggtgatttaagaagatcccgtgcagctgcagttaatatcgttccaaacagcacaggtgctgcaaaggctatcggtcttgtaatcccagagctgaacggaaagttaatcggatctgcacagcgtgtaccaacccctacaggatctactacaattcttacagcagttgttaagaaggctggcgttactaaggaagacatcaacgcagctatgaaggcagcagctaatgagtccttcggatacaatgaggacgagatcgtatcttctgatatcgttggtatgagattcggttctttattcgatgctactcagacaatggttaacccaatcggtgatgatctgtatgaggttcaggttgtttcttggtatgataacgagaacagctacacatctcagatggttcgtacaatcaagtacttctctgagttagcataatctatcttagtttatgtgaaagggtccggcctgtagggccggaccttttttcattatgacgaataagaagaaaaggaaagggttccgctgttttatgcagctgcggagtatgaaacaaccggctggaaagtcatttccttttcttcgggtttaaaattgccgaaaaggcagaacggagaataaaaacatggcattaaataagaaaactgttgatgatatcaacgcaaagggcaagagagtccttgtaagatgtgacttcaatgtaccactgaaagctggcgagatcacagatgatacccgtatcaaagctgctcttcctacaattaagaagttattaaacgatggtggaaaggtaatcctttgctcccatcttggaaaagtaaagaacggaccaaacgaaggagagtcccttgcaccggttgccaagagacttgaggagcttctcggacagaaagtaaacttcgtatctgattacaacgtaacaggcgaggcagctacaaaggctgttgaggaaatgaaagagggagaagttgtattacttcagaatacccgttttcgtggcgctgaggagacaaagaacggtgagcagttctctaaggaacttgccgatcttgcagacatctatgtatgtgatgcattcggttcctcccacagagcacacgcttctgtagccggtgttacaaagttcatcactgcaaagggtggacagaatgttgttggttacctgatggagaaggagatcgccttcttaggaaatgctgttgagaatccggtacgtccattcgtagcaatcctcggtggtgctaaggtagcagacaaactcaacgttatcaacaacctgcttgagaagtgtgatacccttatcatcggtggtggtatggcttacacattcatcaaggctcagggatatgagatcggactttctctctgcgatgatgagaagcttgattactgtaaggaaatgatggctaaggctgagaagatgggcaagaagatccttcttcctgtagatgctgttaccatcaaggatttcccggatccaatcgacggacctgtagagacagaagtatgtgatatcacagctatgccggcagaccgtgagggatgcgatatcggacctaagtccgcagagatgtttgcagatgctgttaagacagctaagactgttgtatggaacggaccgatgggtgtattcgagaacccgacacttgcagctggtacacttgcagtagctaaggctcttgcagagaccgatgcaacaacaatcatcggtggtggagattccgctgcagctgtaaaccagatgggttatgctgataagatgagccatatttctaccggtggtggagcttcccttgaattcttagagggtaaggaactgccaggcgtagtagcagcagacgataaataaaagacagttaaattatttacagattaggagaaataaaaatcatggcaagaaagaaaatcgtagccggcaactggaaaatgaacatgactccaagccaggctgtaaagttagtagaagagttaaagccattagtagtatctgacagcgtagatgttgtttactgtgtacctgcaatcgatatcgtaccggttgtagaggctgtgaaaggaaccaacgtacaggttggtgccgagaacatgtacttcgaagagaagggtgcatacacaggtgagatctccgcagagatgctggtagacgctggtgttaagtacgttgtaatcggacattccgagagacgtgactacttcaaagaggatgatgttctcttaaataagaaggttaagaaggcaatcgaggcaggacttactccaatcctttgctgtggagagactttagagcagagagagatgggtgtaacacttgactggatcagacttcagatcaaatctgatcttgcaggcgttgcagcagcagacgttgcaaacatggtaatcgcttatgagccaatctgggcaatcggaacaggcaagactgctacatccgatcaggcacaggaagtctgtggcgcaatccgtgcatgtgtagctgaaatctatgatcaggctactgctgattctgttcgtatccagtacggcggatctgtaaatgcaggaaatgcagcagagctgttcgcaaagccggacatcgatggtggtctggttggcggagcatccctgaaagctgatttcggtaagattgtaaactactagaatctgattttgtatggttatagggctattcatctgaatttcaggtgaatagcctttgaaattttacacatgaagaaaaaatgtctggaatgtgtcgttctcttgttgtttatttttgctttgacacatggcatcatccaaaatacacagccgctgaaagagactaaggaagtacaaactgaatatgaggaaaaaacctcccaggtcacggagaaatcacaggaaaccgagccggaagtacaggatctggaaaaccagattttaaggactgcctccggaaagttttttcagaaatatccggtggatgaagcctttatgggatggattgaaacgaagtatgggagcggtgtgctgcagagtctgtatacacagctggaaaacggaaatcaggacccggatctgtggtatcggtttaccggaaacagtatgcatgttctgtggcttatgtattgcaggcagcaacagtatatgtcgtattcgtatgaggatgtgatctggaaagaagcatccgatccggcatgcatccgtctggattttgtcggggatatctgtctggatgagaattggtgtacggggaagacggcaaagaatcacatggcggattatttttccgatgaagtaaaaaaggaactgatttcggcagattttacgatggcaaacaatgagtttgcttatacaacacggggacagcggcaggttggcaaagcatactgttttcgggcagatcccaaagatgccggattcctgcgcacactgggaatagatatggtctctgtggcaaataatcatgtgtttgattatggtgagcagggatttttagatacgctggatgcattgcatgcagcgggaattccgtacagtggtggtggcagaaatctgacagaggcaagcgctgtgcgttatgtggtcacaggtggacgaaagattgcgattgtatctgcaacggaaatcgaaaggttttatcattttacacagaaagcccagaaggagaaaccgggagtattaaagacccagcaggaagaggtatggaagaaagaactgaagcgtgcgaagaagaacagtgattatgtgatcgcgtatgttcactggggaacagaaggaaagatccattatgggcaggatcagacagagattgcagacctttgtgtaaaagctggtgcagacgccgtgattggtggacatccgcaccgtctgcagggcgttgagtttataaaaaatgtgccggtggcatacagcgtgggaaatttctggttttctaccggaaaactttacacaacgattgcacagattcagattgatgattccggcagtctgaaattgcggatgattccgtgcatacaggattcgcttacgccttcgattctgacagaaaaaaaacagatcaaagcattttatcattatctggcagacatctccaatcatgtgggaattgatgaggacggattcttttatccgtataaaaatgtcgaaaaaccgggagtttctccttatgcctatacgtccggaaggcgttatggacagtattttgatgatgtggatctggatttaaaatcgatagatatcgtgggaaatttgcagtgaacacttgcaatcccgttcaaattatgtaatataataagtgtttgtgtaacaataatgaagtaccatagtataggattgttacaatggaaagagaggatgaattatgagcaaaaaacctgttgttttaatggttcttgacggttatggtctgaatgaccgtacagagggaaatgccattgcgctggcaaataccccggtgatggataaattaatgaaggaatgtccttttgtaaaaggacaggcttccggtctggcagtaggacttccggacggacagatgggtaactctgaggttggacatatgaatatcggtgccggtcgcattatttaccaggatctgaccagaattactaaggcaatcgaagacggtgactttttcgagaataaggcactgcttgcagccatggataattgtaagaaaaatgattcggacctgcatctgtggggacttctttccgatggtggtgtgcacagtcatattacacatctttacggactgcttgagatggcaaagaagcagggactgagcaaggtatatgttcatgcattcttagacggacgtgatacacctcctgcatccggaaaagaatttatcgaagaactggaaaagaagatgaaagagatcggtgttggaaagattgcttctttatccggacgttactatgcaatggatcgtgataataactgggatcgtgtacagaaagcctatgattccctgacaaagggtgagggcgtacaggcagaagatgcggttaaggcaatggaagattcctatgcaaaggatgtaacagacgagttcgtacttcctaccgtaattacagagaatggaaaaccggtctctgttgtaaaagagaatgattccgtgatcttctttaacttccgtccggaccgtgcccgtgaaatgacacgtgcattctgtgatgacaagtttaccggatttgaccgtccgttcattaagacaacatttgtctgctttaaggactatgatgagacgatcccgaacaagctgatcgcatttgaaaaagagcatattgtaaatacattcggtgagtacctggcaaagtgcggaaagacacagcttcgtctggccgagacagagaagtatgcacatgttacattcttctttaatggcggagtggaagagccaaacgttgatgaggcacgtctgctggtaaattccccgaaggatgttgcaacatatgatctgaagccggaaatgagtgctccggaggttggtatggatcttgttgaggctattaagtcagacaagtatgatgtgatcgttatcaactttgcaaacccggatatggtcggacacaccggtgtgattccggcagccatcaaggcagtcgagcgtgtggacggactggtaggagatgcagtccaggcggtgaaggatatggatggtgttctgtttatctgtgcagatcacggaaatgcagagaaaatgattgactacgaaacaggtgagccacatactgcccatacaaccaatccggtaccgtttattctcgtaaatgcggatccgaagtatacactgcgtgagggcggatgcctggcagatattgccccgaccctgcttcagattatgggattagagcagccgaaagagatgaccggaaagagtttgttaatcgaaaaataaaagaataaggagagcgaaaatgaaggaatttaaaccattcaaagaaggaaaagtaagagaagtctatgataacggagacagcctgatcattgtagctactgaccgtatttccgcatttgacaacattttaaagaacaggattacggacaagggcgcaattctgacccagatgtcaaagttctggtttgattttacaaaggatgttgttccgaatcatatgatttctgtagatgtcagggatatgccggaatttttccaacaggagcgttttgacggaaacagcatgatgtgcaagaagcttgagatgctcccaatcgagtgcatcgttcgtggctatatcacaggaagcggctgggcaagctacaaagaaaacggcacggtgtgtggcattaagcttccagaaggactggtagagtctgataagcttccggagccgatttatacaccgagtaccaaggcagatttgggcgatcatgatgagaatatttccttcgagcagtctgtagatgtgttggagaaaatttatcctggaaaaggacttgattacgcaacacagatcaaggattgcaccatcgctctctacaagaaatgtgcagagtatgcactttccaaaggaattatcattgcagataccaagtttgagttcggtctggacgagaacggtaaagtcgttctcggtgatgagatgcttacaccggacagctccagattctggccactggaagggtacaagccgggacagggacagccttctttcgacaagcagtatgtcagagactggctcaaggcaaatccggacaatgatttccttcttccggaagaagttgttacaaagaccgttgataagtacaaagaagcatatgagcttctgacaggtaagccttttacaagatagatataggagatcacaatgattcagaataacagttatgatgcggatacacttcatgaggagtgtggcgtcttcggaatgtatgattttgacggtgcagatgtagcatcgacaatatattatggactgtttgccctgcagcaccgtggccaggagagctgcggtattgcagtcagcgataccagcggtcctaagggcaaggttctttcctacaagggaatgggacttgtaaatgaagtgttcgcaccggaaaatcttgagcagatgaagggggacatcggagtcggacatgtacgttactcaacggccggttcttctacccgcgaaaatgcccagccactcgtgttaaattatgtcaaaggtacattggcacttgcccacaacggcaatctgatcaatgcaccacagcttcgcaaggagctggaatatacgggagcaattttccagaccaccattgattctgaggtgattgcctactatatcgcaagggagcggttgaattcccagtcagcagaagaagctgtgcgccgtgcgtgccagcgtcttaagggagcttacgcactggttgtggcaagtccgcgtaaattgatcggggcgcgtgacccatacggctttaagccgctttgtatcggaaagcgtgacaattcttatattatcacatcggaaacctgtgcacttgacaccattggtgcaacatttgtgcgtgatgtgctgccgggagaagttgtgaccatttctccggaaaaaggtattgagtccgatatgaccatggcacttccgaaagaaaaggaagcacgctgtatttttgagtacatctattttgcaagaccggacagtcatattgacggggtgagtgtatatgcaagccggatcaaggccggaaagtttctggcacaggattcgccggtagaggcagatctggtgacaggtgtgccggagtccggaaatgctgcagcacttggctattctctggcatccgggattccgtatggtacagcctttgtcaagaacggctatgtgggacgtacgtttatcaagccaaagcagagcagcagggaatccagcgtacaggtgaagctgaatgtgctgcgtgaggcagtggcagggaaacgtgtcattatgatcgatgattcgattgtaagaggtacgacatcggatcgtattgtgcgcatgttaagggatgcaggagcaaccgaggtgcatgtacgcatcagttctccgccatttttatggccttgttatttcggaaccgatattccggcgcgtgagcagttgattgcctacaaccgtacgattgaagagatccgccagattatcggagcagattcccttggttatctcggaatcgaccgtctgaaagaaatggcggaaggacttccgatctgtaccggctgttttacgggcaaatacccgatggaaccgccgaaacaggacattcgcggagagtattatgacaaagagattgatcttgagcgcaagatgagccgataagttgttaccaatgtaatcaaataaaaggagaagaacatgagcacagacagatatacaagccctctttctgagcgttatgccagcaaggaaatgcagtacattttttcccaggatatgaaattttccacatggagaaaactctggatcgcactggctgagacagagatggaacttggactttccgagaatggaaagccggtcatcacacaggatatgattgatgagatgaaagaacatgtcaatgacattaattatgacgtagcagttgcacgtgagaaactggtgcgtcatgatgtcatgagccatgtgtatgcttatggacagcagtgcccgaaggcagccggtatcattcatctgggggctacttcctgctatgttggagataatacagacatcattattatgaatgaggcattaaagctcgtacataaaaaactggtcagcgtgattgctgaactgtctaattttgcagaaaaatataaggatcagccgacccttgcatttacgcatttccagccggcacagccgacaacagtcggaaagcgggcaacactctggacacaggagtttctgatggatctggaggatctggagtatgtacagagtacgttaaaactgctcggatcgaaaggaacgaccggtacacaggcaagtttcctggaactttttgatggggatcaggagacgatcgataagattgatccgatgatcgcagagaaaatgggatttaagtcctgttatccggtttccggacagacctattcccgtaaagtggatacccgtgttttaaatgttttagcagggattgctgccagtgcgcataagatgtctaacgatatccgtcttctgcagcatttaaaagaagtagaggagccatttgaaaagaaccagatcggatcttctgcgatggcatacaagcgtaatccgatgcggagtgagcgtattgcatctctttcccgctatgtgatggtagatgcattaaatccggccattacttctgcaacacagtggtttgaacgtacacttgatgattctgccaacaagcgtctgtcggttccggaaggattccttgcaatcgatggtatcctggatctgtgcttaaatgttgtagatggcctggtggtatatccgaaggtaatttacaagcactttatggcagagattccattcatggcaaccgaaaatattatgatggatgccgtaaaagagggtggaaaccgtcaggaactgcacgagaaaatccgtcagctgtccatgcaggcaggaaagaccgtcaaggaagagggtaaggataacaatctggtagatctgattgcagcagatccggcttttggtctgacaaaagaacagatcgaggcaaacttaaaaccagagctgtatgtgggtcgtgcaccgcgtcaggtggaagtattcctgcgtgatgtggttcgtccagtgctggatgcacacaaagaggaactcggcgttactgcagaaattaacgtataaatgaacctataaacagaccggtcggttatgctaagagacctcccataacatgggaggtctttctttttctttggatttgaataaatttctttctttttcacacaataatgaaaaaaggaggacaataggaatgggtctgatgatcaaaattattgaaattcatggaagggaaattctggattcaagaggaaatcctacggttgaggtggaagtgaccgcgcagacagagacaacgggaaagaagactacgggcagggaatctgtgccatccggagccagtaccggaagatttgaggcgattgagctgcgggatggacaggaacgttattttgggcttggagtacagcgcgttgtggatcacatcaacacaaagatccgcagggagctgttgggaatgaatgtgctggaacaggtacagattgaccgcaaacttgtggaactggatgggacagacaacaaaggaaatctgggggccaatgctttacttggtgtttctttagcctgtgcgcgctgcgcagcggcagcactggatatgccgctgtaccgttatctgg

SEQ ID NO: 1045 - DNA, 3753 bp, Unknown
  gut microbiota DNA sequence
gaagattattatttacagacttttcttcatagtctttaaattttagttgtgcacattttaatgcgcgaagtttgagtcaataatttacaaaagaagggaaaacgattatggaaaagatcaaaaagcgtatagctaacttaaaggttgaaggaaaattaaaagtatatcaaatgacagtgcttgttatgacattatttttagtgttggtggcactgatctcgacagtagtgatccgttcaaatatagagaagatcacgaaggtctggtctccgtcattggaatatctgcaggatttagagacaatgactgcgaaatacagaatcaaacagtatcagcatctggtagaatcagatgcagcagtcatgaactcctgcgaagaagaaatcacgaagctggagagtcagatccaggataccgatgcgaagctggaggcaatcatgtctgcaaacagcaaagctcaaaaaggacaggacgattacgaagtagcaaacgctgcatgggaaaaatacaggggtgcttcagatgaaatcctgcagttgagccgtgagggtaaacagcaggaagcatcgaaactgatgaccggagaggtgtatgaagactataagtcattttctaagaaattaactatattatgtggcaagttccaggtagaattagatcaggcaaagaccatggctaatgtatgcacggtaatcatatttattgtgatcgtggcagcgggtcttgcgattgctgtagtgacgacaatgatcggaaggatcattaccaattccattaccgagccggtaaaacagatagatgcagcagttgccagcctgcgtaagggcgaactgtctaatgtagaaatgcttacctatgagtctgaggatgagtttggcgatactatcaggaatctgaaagaagccatgggtattctggcagattatgtcagagagatctctgtggaggtaaaggcaatcgcgcagggtgacctgaccagaaatggtgatgatattacagatttcctgggcgatttctcggaattgaagacatcactgctgtatattctgaaacggtttaacagtaccctgaccgagatcagcaatctggcagaacaggtatcatcgaattcatccgaggtggaaaatgcatcaaaatccctggcggatggtgcaacagagcaggcaggagtcatcgaggaactgaatgccaccattgatacggttgtggatatggctgaagatacagcgaaagaaacacagaacgcatcggcacgtgtaaaagcctctgcaaacaaagcgaacgaagaaaaagaaaagatgaacgagctgctcacggaaatggagcacattacagaaatctccaaggagatcggtaatattatcacagatatcgaggatattgcttcccagaccaacctgttatccctgaatgcttccattgaagctgccagagcaggagaagcaggaaaaggctttgcggtggttgcagatcagatcggcaagctggcagcagacagtgcaaaatctgctgtaaatacaagagatctgatcgataagaccttagtggaaatcgaaaagggcaatacgattacaagaacaacagcagacgcattcaatcagatcattacagatatggagtcctttgcagagcttgcagagaacaccatggagaaagccaactcccaggcagagtccttggagcagatcggccagggaattgaacagctgtccggcgtggtacagggtaatgcagcatcctcagaagagaataccgcgatcagtattaatctggcagagggagcagccaagatgcatgaccgcgtgaatatctttaagctattctagaaaaatggcaggaatagagtgaagctgtcggaaggaaggttcttgttgtgattaatgatatatttaaagtgtttggagagcagacaggagaaatcttatttgagatcattaaagattgtatggatgattacctgtatatatttgatctgcagaatgatacctttgagatttcacagtcagctgtggaacggtttaatatgtcgaaaaatgttctgacagatgctgcaaatgaagttatgaaggtagtatatgaggaagaccgcaggatgcttgcaaagcatcttgcggatatatgcgaaggaagagaaaatgtacataatcttcattacaggtggcttgataaagaaggtatgccggtctggattaacagccgtggtatcgtgatcattgatcagcagggaaaggcagagtatctggtcgggtgtctgaatgagaccggcaacaggagaagagccgataatgtcacaggactgcttggcggtccggaattccttgcttacctgcgtggacaaaaagaacccattaccaagggattttttatgcatgtaggaattgatgattttggagcgatcaatagctccaggggagctggttatggtaattatatcctgagaagcgtagccggctgtatgaaggaatgcctttcagacaagcagagaatttaccatctggtagcggatcagtatgtgatcgtggatctggaagcttcctccgcagaagacgctgtggcactgaaagaaaagattacagataaacttcgtaatttcatagtagccgaaaattatgaagctatattttctatttctattggtgttatagatgcagcaacattttgtgagggaaccgaagaatgccgcaaaaagtttgaatttgccttgaaacaggcaaaaagcatgggtaaaaatggattctatatttttgaccaggatgactatgaggtctttttacgaaaaggaagaatcatagcaacacttcgtaatgctattgtaaaccattatgatggctttgaagtatactaccagccgatcgtggactgtcagtccaaacagatcattggagcagaggcactgatgcgtttttccatgataacggaagaagggcgggagtttgtttcaccgatggagtttatcccattattggaagagaccggattgatcattcccgctggaagatatattttgaacgaagctgcagcaatgtgctgtgaaatgcagaaatatattcctgacttccggatgaatgtaaatgtatcctatgttcagatcctgcaaggcaatgtggagcgggatattctggatgcaattcaaaaatattcattacagccggaatgtttatgtgttgaaatgacagaaagcggatttatggatatgacaccttcgttctgtaaattccgtaaaactctggacaagaacgggattccctttgtgatcgatgattttggaacaggatattcgaatcttcattgtattcgtgatatgaatccaagttacgtgaaaatggatagggattttactgccaaggcgatgaacagtaacagggattatgaattatataaaaatatcatccccatggtacattgtattaacgtcaggatatgcgcagaaggcatcgaggaaaaagaatggcttctgaaaatgaaagaaatgaaggttgattatctgcagggatattattttggaagaccatgtggaaagaaacagtttctgcagcaatatgccagtggcatcaacattaaataaagagagtagggcagactcagctatgtggggctgccttattttatggtcttatcagaaggatggattcataacggcttctttcagtttttccaggtcattggcatcagggtgagacaatgcacagtcaaaattctggatcaatacatcaagatttgccggatgatcaggattttccgaaaatagatatc

SEQ ID NO: 1046 - DNA, 2897 bp, Unknown
  gut microbiota DNA sequence
gccagttattctggaaagtgatgatgggatggaagttatggattttatgtgcggtgttgtttgcaattttacttccgggagtgaagtatgcaaaggacgtgcgggcatatcatgcggcacagcagccgaaggatgagaagcaggaaccgacagttgttcttacggatgacgagcagcagcagatcgatgatgtaaagagcttaaaacttttaattgaaaaaaacagcaattatatgcagaattcgattttgatgaacattgatccctatcaggagcacagaatggaattacagtattacatagattctgattttgtgatgaattacacgaaggacagcaagaaagattatacatctgcgattgcaaatgcttatgtggattatgccaataacggcatggatcagaaaacgatatggaaagatgtttctgcaaagtcggaagataagtatctggcagaacttgtgtctgcatataataactcagataatacattttctgtaattattaagtatacagataaaaaggggctggaaagtgcagcaaagcagatacagagtgaactggaaaagaagcagccggaattcagtaaacgtataggcggacataagctcgtattagtatcagaaaattatcagatatgtaccgattcggatcttgcaacttctcagggcaatgtttcgaatctgatcaaatcctacagggatcagattactactcttaagtctgctatgtcagaggatcagttgagtgaactggagcgagaggaaaatttggagtcggatgacaaggaagagtctgcagcggtacaggttgctgctccggctttgagcaagaaatatgtggtacttggttttgtgatgggagtatttcttgccgcattgtatttggtttgtattgctgtattatcaaacaagctgcaggcagcagaggaattggtgcgatactataagatgcgtcagtttggtattatcaccagggagcagcgcacaaagggaattactggatttttactgcgcatcaagtatcggaatcagaagatgctttctccggaggcatccctgcagatggcttcttcaaatattgaactgtattgtaagaatgaaggaattacaaagcttttcctgacaggttcagagattgagcgaatgaagaaagaatggatcacaaagctgaccgaacatctgaaagcaagtggtattcaggtggtatatggggagaatatctgttatgattctgcagcgatgcgtgaagcttcggaagctggccatgtcgtgttagtggagattacggatacatcgatctatcaggagattgaaaaggaacttcgcatgttaaaagactggaatgttgatgtcattggatgtgtaggagtggaataaagaacaatgggaaaatattttggaacagacggttttcgcggggaggcaaacaaagtactgaccgcggatcatgcatataaaattggacgttacctgggctggtattacaaccagaatcacaggggacggatcattatcggaaaggacacacgtcgcagcagctacatgtttgagtatgcgctggttgctggtattacggcatccggggctgatgcattcttgctgcatgttaccaccacgccaagtgtggcatatgtagtccgtacagaaaatttcgactgtggcattatggtttctgccagtcacaatccgtattatgacaatggaatcaaggtcatggatggaaacggacacaagatttcggcagaggtggaagctgcactggagaaatacatagatggggagatgggagaactgccttttgcattgcgtgacaaggttggtgtggcgcgggattatgcgatcggacggaaccgttacatcggctatctgatttctctggctaccagatcttacgatgggatgcgcgtggggctggattgttccaacggaagtacgtttaatattgcaaagagtgtgtttgatgcgcttggtgccaaaacatatgtggttggcaatgagccggacggtaccaacattaatatgggatgtggatcgacacatatcgaaaatctgcagagacttgtccgggagaagaatctggattgcggatttgcgtttgacggagatgctgaccggtgtattgccgtggatgagaacggtatggaagtgcacggggattatatcctgtatgtctgcgggaagtatctgaaggaatgtggtcgtctgcagaataatacggtggttgccacgatcatgtccaacatgggattgttcaaagcgatgaagcgcgagggcattggggtatgtgtgaccacggttggcgataagtatgtcaatgaggcgatggttgccaacggatatgtgctcggcggagagcagtccggacatatcattttcagtaagcatgcgacgaccggagatggaatccttacggcattgatgctgatggaggtgatcctggagaagaagcagagcctcggcacgctgtgcagggggatgcagatgtacccacagcttttgaagaatgtgaaggttgaggacaaggctgcggttaccggcaatgtgcatgtgcaggcggaaaaggagcggatcagcgttgctttgggcgaggatggaagaatccttctgcgtgagagcggtacggagccggtgattcgtgtgatggttgaggcacagagtgatgagttgtgcgcgaagtatgtggatgagatggtgcaggtgatccgggaagaggggcttgcagtggagtagaatgaatagaatagtgagatggtaaggggagccggcgctggtgcgccggcttgtttgttatatgtttttcttgttatgttatgtttttgtggaattgaaacgcgaattgtcatttatataaaaaccacttgataaacgatgaaaaagagaatattatggaaatgt

SEQ ID NO: 1047 - DNA, 490 bp, Unknown
  gut microbiota DNA sequence
tgtaaaggagatatacaacatgaagaaagtctgcttagcggttttgccagctttaacaatagtgttagaattattacccttgggagcagtttgtatttttgcaacatctccaacagaaagagtaaaagaaacattctcatactttagccttacaccgtttggctatgcaaattttgctccacttattacagccacacttactgttgccatcttcttactttcattgttttcattgaagaagaaaggtgttctcaaagcattgtttgtcctttccattattacggtagttatttctcttttgccattgatgtatggcttaaactactatacccttgtaggagcctttataacagtaacacttgtaatagaaagtattttggctaagatacaataaaagtaaagcgataactttcaggttgtcggattgtaaaggcagagccttacgcaaggtgcaggagaaagactccgctcgggttaagggcgaagcgcc

SEQ ID NO: 1048 - DNA, 285 bp, Unknown
  gut microbiota DNA sequence
tcagatgccaacgagaaaaacactacagaacacagcaccatttttgatgatgtgttccggacaattgcacaaaagatgccacagcttcttattccgctgatcaatgaagttttccacacttcctacagtgaggaggaaccctttgaacagctgcggaatgaacattatgaaaaattcggaaccgtggtcacggactccattatccggatcggcagccacatttatcatctggagtgccagtccaccaaagatgaaacgatggtcatccgtatgtttgagtacgat

SEQ ID NO: 1049 - DNA, 743 bp, Unknown
  gut microbiota DNA sequence
tgattcattaagttttccataaaagactgtatatctggcaaaatttttctcgtgtcatttaatacattttttttcccataagcaagttctttaaaattaatctctgttattgttttatataattcttcacaattcattttatttcctctagcagaaaagggagtcgcaatcgactccctttttgttttagtattacaataagtacaactttgtttattactgtaataaggataatacaccctgtgtagactgatttgcctgagcaagcattgactgaccagcctgagccagaatattgttcttgctgtaggtaaccatctcatcagccatatctgtatcacgaatacgagactctgcagactgtgtattctcagatacgttatccaagtttgcaattgtatgctctaatctgttctgtaatgcaccaagtgctgatctctgtgtagaaacctgattgatagcattctgaacagcagataatgttgcattagctgtatcataatcgcttacgctaggttttccaacctgaacagccttacttgttgtagcttttgtagatgtagttgtaacataatccttgaaattatcagtaatatcattggatgcctgtttcttgttgaaacttacagtattctttcttgcagtacttgccttatcgtatctagtagtagtaccactagcatttaatccattgtaatatacgcttcctgtcttagaatcatactgtgctgcaaaatcactat

SEQ ID NO: 1050 - DNA, 1188 bp, Unknown
  gut microbiota DNA sequence
atcattaatcgaatactccctttcccattgaaaaatatcgtgctaaaatatatctggaagtaagaaaagaggatttcatttatgcacgataacacacagcatttatataacaatttggacttacgaaagctgctgatcccgattattgtggaacaactgctttcttctttaatggggaccgccgataccatgatggtcagcaatgtcggctctgccgcaatttctgccgtttccctggtggattccatcaatattcttgtcattcaggcactgtctgccttatctgccgggggcgcgatcctgtgctcccagtatctcggcagccagaacaaaaaagatgccaaccgttctgctcggcaggttttgtttgtcatggtcattctgtctgtaactttatccgttttctgtctgatattccgtgatccgctgcttcatgtaatctttggaaaagtagaacgcgatgtcatgaccaattcccggatttatttcttctttactctgttatcgtttccgtttatcggactgtacgatgccggtgcttcgattatgcgctcccagaacaacagccgcaatccgatgatcatctcggttatttccaattttatgaacattggcggaaatgcgattttgatctttgtacttggcatgggcgtcgaaggtgcggcgatatccactctggtatcacgtattttctgtgccatcgtcgttatctggcagctgcgcaatgacaatgccccgatctgtatccgcaattatttttccatccgccccgactggtatctgattaaaaaaattctgtttatcggaattccgtccggtattgaaaacagtatgtttcagttcggtaaacttgccatccagtctacggtttccacacttggaaccgtagcgattgccgcgcaggcaatgaccaatattctggaaaacttaaacggtattgctgccataggtatcggaatcggactgatgaccgtggtcggtcagtgcctgggtgcagggcgcaaagatgaggccatctattatattaagaaattgtcctggctgtcagaggcagtcatcatcgcaagctgcctgctcgtttttgcactgaccaaaccgattaccatgcttgccggaatggaacctgccagcgcaaaactgtgctttttcatgataagcttcatcacgatcgtaaagccagtttcctgg

SEQ ID NO: 1051 - DNA, 1004 bp, Unknown
  gut microbiota DNA sequence
atgtcttcaaaaaagattccgtataaatccctggctgtctcaaatcgtctttcctttgttttaatctttaacttgctcattgtagtctccttttttacattccaagagttttgatcactgcctgtatatgcaataacatagattatgataactcaaatgatcttaatgcagcatttccgttaccgcgataggtcaggtaaagcgcctgtattccatccggaatcgtaaccggtgcggtatacttttcccagacattggtatattgaacctctaatgtcgccagtacctctccatcccatgctgtctttacttcaaaagtgccatctgcatagccccgaatccaaatactgatttcacgaatatcatggcagtcaaaatatttgaagccgatggtagttgaatctgtaatattggcaatatatccaacttcttcgtctccatccctgccgtcctgcattactcgtggaaaattcccttcgcccacataaactgatggagtatcggtaaacagattacatgcaagataagcggggtattcgcctttaccctcaagcggacctccatttaaaccgcaggaggtaatttttacctgtggaatactgccgtccggcataatctgcagcttttcagcacatccctgtctgctgtagtaggtattattggtatgcctgtgataaaaaatgtaccagtcctctccgatctgcacaatacttccgtgattattggcaccgtaagctgttggcatatctgccggcttgtaggtatcgatgtgcagatcacaattgctgacaataactccgccatagacaaagtccctagtaggattcttgctggtggcataacataattcgtgcattaatatggatgaatagacaaaataataggtgtcacctactttacggatggaaggtgcctcaaaaaactcatgtccctcaaatccggtaccggcaccatattcacagccgggagccacaaataccggagcttccctgatcgtcagcata

SEQ ID NO: 1052 - DNA, 1331 bp, Unknown
  gut microbiota DNA sequence
gtggatacagggattcgaaccctgggcctccagagccacaatctggcgcgctaaccaactgcgctatacccaccatagagatgttatcgtaccatttagagcgctaacatcgctcgcaggaacgcgcatgtgctcgaagggattcgaacccccgacccacggcttagaaggccgttgctctatccagctgagctacgaacactcatcaatatcgctttcgcaatatcagagcgggtgatgggaatcgaacccacgtatccagcttggaaggctggtgttctaccattgaactacacccgcatgtagtcggggtgacaggattcgaacctgcgacctcctggtcccaaaccaggcgctctagccaagctgagccacaccccgaaggctatgttgttgcgtccgtgttgtttgtgtctcatccgtgacgcaagatagattatagtatagcctggcaataaagtcaacaacttttttgaatttttcaaatatttttttcaatttcctcaataagccccagaaactcggcttttttcaatgcctgcgtggcagatacagagaaagaatatgtgccgtccgaccaggttgcaagcatataactgcctttttcctgtcctttgaaagtgacagaatattttcccacaacaatcaatttttcttctgcatagtgcgtatagtcaccagaattatcctcctgcccctgtgactgccggaaacagatactttgtgaatcccagcgatatgtgatctctgccagtccatccccatatgtcacataggaacgatccgttgctttttctttcagcgaagcaatatccctgacaggaaagcccaccgcatccgtcagtttttcggccgatgctacctcctgtggcgcatatacgccctctaccgccggtttttcttctcccggcttttgcggtttttgcggaattttctgccggatctgcggaactgcaagccccgccacaacaatcactacacatgcagcaaacggaagaatacgacgtgccagccgcatcggaacaatattatttttccgggagcgcgcgtactgcctcccacacaaaacgcagatcttctcgcttttctgcaacgagcgtttcctccagctcatcggtctgccggatacgattgtaatcaatccggtttttgctcaggttggcagccactttcagaagccatgccttctcatgggccgggttctccagaacaggcgctgtctgcagatattgtatcagagtctcctgcaggatgtcctctgcatcgctcatgttatgtaaataagcatatgccatccgcaaaatactgtttccgtaatctttcagaagctc

SEQ ID NO: 1053 - DNA, 52932 bp, Unknown
  gut microbiota DNA sequence
acaagaataacattctctagttttgatctgtcaatcattgttgcacatgctctaaactcgttgtaatccgctgctgtttgcactaaaacatcggtgtatatacgattcaaaacatcataaaaggcatttagatgtagtttattaacaattgaaccatgctgattacgttcccaaaaagtttctggatccttttgattggttgcaatggtcaagttacttccatcacatgcaattaaacgataaccatgataattattagtagttggaaggttgtcatccgtaaaagatttaaacaaatattcaaaagcctctggaagtacttttgaacgttgttgcgtaaatgctgacacagacggagtatttttgttaaaatcaaagaaatcaagtagttctttactcatagtagctccacccgaattcatcatgattcctataaaagttttgaaatcaattttccgttttcgagagaaatcgacattggggtttcgaagaaataaacatggattgttagctaattccgaaatatgattctttagagaatctgaaacttgattaatataattgctcatatgcgttacctccttgcaatcaagatgttcttaattacaagggccgctttcgctacctcattatcattcaatagcgaaagcggccgcacatttcgaatcatatgtcaagcatttattacaaaataaaaagaccctagcatcatttctgatgctaagatcttgattggtcatcttaacttaatgacattgctccaaagagtcccttttgatgtgtaatgaccatatttactgtaacagagaaagtacaccctggttagactgattagcctgtgcgagcatagactgtccagcctgtgcaagaatgttgttcttgctgtagtttaccatctcttttgccatatctgtatcacggatacgagactcagcagaagatgtattctcggaaatgttatccaagttgtcgatggtgtgctctaatctgttctgtacagcaccgagtgcggatctctgggaagaaaccttagagattgcatcggaaatagcatcgattgcgtaggttgctgcagaaccgttcttgtcagttacatttaatcccttgattccaaggtttgcagaattcatagtatcgatatcgacagtaattttatttgtcatatccgcatctgcacctacatgaaggctgaagcttaatgtgttggcaacttttgcctgaccaacattaatcttaaatgtaccattaccagcattaaatgctaaacctgtaccatcaccattcgttacagatgcatgtccttctgtatcaccgatctggtttgcagcaagcaattcctttcctgcaagttcatatgctttctgctttgtgataacggaagtatcattatcatcaacaccatctgctccggctgctccagatgcatcttttgcatccgtcaaaacagtcatggttgttgttccatcgcttactttaacaccaccctttacatagtcttttaaattagcgactgtaactgctgtatttgcggtatctgtattagcattatttttgaaagtactatctgttgtgagttcttttgatgtatcaaatgcttctgctgccgttgctccacctgctgtctttacatataatttatttccatctttatcacatacatcgccattagcctttactttaaaggttttatccccaatagtaaatgttttatctgggtcaccatttgctggtgcttcaatcagagccttagcatcagcttctttagaaccaattgtataattctttccaccaatacttacagtatcgccatcatttaactctttcatcgtaaatgtagcagttccatcgccattatcggtcaaggttccctttaatcctgcatcgtgtgcattcatgttgacagtcttctcaccgtcatcaccctttaacaggtaaatctcattgaatttggttgtctcagcaacacggtcgatctctgtatttaactggtcgatctcatcctgaatagccttacggtctgtatccttggagtttgtaccgtttgctgcctgaactgcaagctcattcatacgctgtaacatgctgtgaacttctgttaaagcaccttcagcggtctgtacagaagatacaccgtcctgtgcatttgaagaagccttatccagtccacggatctgctttctcatcttctcggaaatagtaagtcctgctgcgtcatctgctgcacggttgattttgtaaccagaagataacttctcggttgacttagcctgtgctccggatgtgataccaagcattctgtttgcgtttgctgcctgcatgttgtgttgtactaccatactcataattgaatcctccttgaactcccgctatgcggggtattatgttttttcctctggaaatccttttcctaaggtgttcttattgcgtcacttcatagtagcgcgtcacaagcatctgtgatgctttgcaaccttgtatatttagccatacacctttcgatgtaccgcaataagcgaagcgtcccgggtgtgccccgcctattaccagaatttaaaactgatcaggagttaaatttatctttcaaactctctgcatctttctttgcctctgccttcatccgctcgttccacagaatcctcttaatttcctgctgtgcctccctggaaatacccggctctgcataataggtttctctctttcgtgccggattttcttccgtggtacttctggcaatattaagttccctcggagcatcaatgagcagccttgcgtgatttcctgaaccacctacatagaccacacggatgttatcaccaatgtttacatattgcccctgtttcaatgaaagtttcagcattttgttacctccatgtatgtattccataccctgtttcctcgggtatgtcctgcgcattttcttacgcatctgcatttttataaaatgcttcttttctttttatttcaaaaatgcgacaatgttttatagaatgttgcattttatgtcacaaaagcactttatttttggcttgaaaggagtaatttttatgggaacaacacaaccgatccgaaaccgacaggaactgcagaatttcagttcatactacaagcagataaaaccgcatctgcgtaattatactttagttgtattgggattaaacactgcactgagaatcagcgatctattaaatcttcgctggagaagtgtctatgattttaaaaagaactgttttcgggatcatcttttggtatgggaacataaaacaggaaaaagaaattatattgcgataaaccagaacgcgaaaaatgccctgtatctatattttatggaaagaacccccgatccggaggaatatgttttctccaaacggacaaacccttataaaccgctcagccgttcacaggcttaccgcattattaaagaagatgcctcacatacaaccagtgaggaggcaatcagctgtcattctctccggaaaacctttggctattatgcatggcaggaaggcgtccagccagcacttttaatgaatgtttttaaccattcttcgtttcatatcacgaaacgttaccttggaattgaacaagacgaaaaggatcttgtctatctgaatattaatctgtaaaacgttcggggaatgctttgttgcgataccatgtacaaagcgttcaacaaagcgttctctttcataaaatgtttgactttaatcataaaatgcgttattctgttttcaataaatatctatattccaaatctgatgccaggccgttgttaccaaaaaggcagcacgcagcaatcatggggagcatttcgctcatatatcacaattggaattaaaatttcataaacgtgtcatagcagaactgtttcttattatttcatattgtaaaaacagacgtttatgatatatactaaaagaaaggcaggataccacatggagaaatctgacattctgacagcttcactgccagatgccaacgatgaaacagccgatcacagcaccatttttgatgatgttttccgaacaattgctcagaaaatgccacagcttctgattcctctgatcaatgaagtattccacacttcttacagtgaagaagaacattttgaacagctgcggaacgaacattatgaaaaatatggcactgtgattacagattctattatccggattggcaatcacatttatcatctggaatgccagtcctcgaaagacaaaacgatggttatacgaatgttcgagtatgatatttcgattgcgattgagcacgcttcttatgaaaatgacgaaatctgggaaattgaatttccacagtcctgcgttctctatatccgtaaccaccgcgatttcccggactatcacgaagcggtcgtgaagtttgcggatggacaaaaagtgcgctaccgtgttccaattttacaggcaaaaaagtataccgttgaccgcatttttgagaaacggctactgattttgctaccgtatcatattttacggtatgagcactttttgaagcacaacgggacggataccagaaagttacaacaattgttagctgatttccgtgaaattaaccgaagacttgaagaaacagctgaaaaagaaaataaatcacatctttatatggatatgattgttctgattgaacagattgcagattatatcattccaaaaaacaataccattaggaaaggattgggtgatgttatgggtggcaagattttaaaattacggtcggaggaattgctggaactaggcgaagctcgtggcgaagcccgtggggaagctcgtggaaaagcaaaaggcagacttgaaggcaaacgcgaagaaagactcgatgcaattcaaaatatgatggatcttggattgacaaaagaacaaattttaagaaaatattctctggaggaatatgaggcagcattgcgttctatgccagcaaaagtataaccgaaaagaaaatttaaaatattttcttttcaggggttaaggaatgcttccatcgtccgatatattatgtgtaaataaaaatgcaacattctataaaagaatgttgcatttttatttctatattttactcaaacacgatcctatttatactacttactttttatggtatcttcaaacgctttccgcacatcatcattatggcttgtgataataaggactgcatactgccctttcgtaaaaaccaacccatcctgaatccggctgacctgcttcggttcataggactgcagcaaattataccgatcctgctgatgctttgtcaggctttcttttgcctcatccacatctgccttatctttcacggcaatcactacaatttcatctgctttgtgtccatccgaagaatagcttacaaaataactgtccacttttttatagtccatgtcagaaatatgggaaaacttatcttctgcatctttttctgcgctgctggcattaagcatctccggcagatccggatccgctgcttccatcgccgtgcgcaggtcatacatactgacagaaccggacgtgtttttcttcgcaccacatcccacacacatcaccagcatggtcagaaccagcagaagtttccaacccgttttttgttttttcatctgttatctggcctcgacagtttcttccgtactgaacgttgccccattttgtgccgcattatccatggtcatatccttatttccgatatcagcacttgcgccatccatcatcatgccatctccgtttgcaggttccagtccctgaaatgctttctggacagccttgtcgatttttttctgttctttttcgctgatattctggcttgtattgtccgtgttatatcccggcatggcaacattaaacaaatatccttttccatccggatcctgaatccagttgtaagttcccagactgtatggcatatccttatagtttccggacatcaggaaattgtcaatggaagaagctatggcatttgccacctgcgctttttcctctgtaatatcctctttaaacgcaaccatgaccccgccaagctttttgtccatagcagcacgcaatgttttcggcagatcatatatactgtccacggttttcttattctggtatgccatattgtactttaatgagttagctgccgggaagtaatcgcgatcccagctctgggactgtccatacatggcatccgtcacattaaagttcgcataatttccatttcctgcatcggaataaatatcggtaatgtaccagtctccgtcaatttttaccacatcccagctatggaatttttctgtattatgttccactttacattcaattcccatcatctgcatgaacatgcggaatgtcgtcgcataaccgacgcatacggcattgtggtattttaacacaccgtatggattatcacagtcttcctgtgtactcggaataacggtcagtgccccggaatcctgctggagctttttggtcatccagtcatacaccgccttttccttttcaaaatcagacatgctgtccgtaatcttcatatctttgatcgctttttttgccatatcaagggtttctttttctttgtctgtcagctttgaagtatcgccggatttgtaggcatccgaaatatttgtggtaggtttgatctcataattatctgcgatctttacgtaatcctcggtagtctcaggattttcttcctttttctgctctgcaatataggattttaaagtcaccagattaaacgcagaaatcgtggtacttcccacaacgcctgccgcaagaatcaccgctacaatccctttccatgcaccgccttttttcttttctttctgctccggctgcaccggattactttttacgctttcataagtttccatatgtatttacctcatattttaattgatgtattttttctactgcacctttattatagcagtttcatatccaaaaaaggctatctttaaagaaacttaaataaatattaagatccgtctgtacgaaaaaaggacatccaccgcgaatgtccttttctcccatatggtatcatccttatattacatcttcctcaatatgctccctgccctgtgcaatgattgaccggacgtggtcatctgccagggaataaaaaacagattttccctccctgcggcatttgactaacttattctgttttaaaatccgaagctggtgggaaattgcagactgtgtcattgacaatgccgctgcaagatcacagacacacacctctgcttcaaacaggacaaacaggatgcggatacgggtggaatctccaaacactttaaataattctgcaagatcatacagttccgtttcttccggcatcgtgtcattcacgatctttagcagatccggatgtacctgattttcactacagcattcaatcttttctttttccatgaagttcctcctctccaccggaacatttccggcagaattataccctataatttttttacaaaaagtgcgcggattgcattcagcacagcaatcaccataacaccgacatctgcaaaaattcccatccacatatttgcaatacctatcgttaccaaaaacaggcagagcagtttaatcccgattgcaaaacagatattttcatatacaatccgcaggcactttcttgcgatacggattgctttcgcaatcttaagcggatcatcatccatcagtaccacatctgctgcctcaatcgccgcatccgatccaagtgctcccatagcgattccaacatcaacacgggaaagcacaggtgcatcattgatgccatccccgacaaaggcaacggtactcttttcttccctggtccgcaacagtttttccacttcggaaactttatctgccggaagcagctgggaatgtacttccgtgattccaacctcccctgctacctgctgtgctacacggtcatcatcacccgtcagcattaccagccggtgcacaccggaattttttagtgcctgcatggcagccgccgcattcggcttaatcatatctgaaatcagtatatgaccggcatagacaccatcgactgccagatgtacgattgtaccggtacagctgcagttgcggtacgcaattttttcttttttcatgagtttgtcatttcctgctgcaaccctgtgtccgtctaccgttgcgatcacaccgtgtccaccgatttcctgtacatctgtgacccggtccacatccagtttcctgccataagctttctgcaggctgacactgatcggatgtgtgctgtggcactctgccagtgccgcgtattccagcagctgttcttcctccttcgtatataccggatgtccagacacaaccggacagctgccggatgcacagtttgttccatgaattccgcagacttcaaataccccctgcgtaattgttcctgtcttgtcaaagacaaccgtgcgcgttcccgcaagtgcttccagatagttggaaccctttaccagaacaccctctgcactggcacctccgattcctgcaaaaaagctgagtggaatactgatgaccagcgcacacgggcagctgataaccagaaatgtcagtgcacggtaaatccagatgccccagtctgccggaagtcccataaacagcatgcggacaagcggtggcagtattgccagtgccagcgcgccgtaacagactgccggtgtataataatgtgcaaatctggaaataaaattctcggaacgtgatttcttggaacttgcattctccaccagatcaagaatcttagaaaccgtagactctccaaactcttttgtggtgcggatctttaacagtccggaaatattgatacatccactgataatttcctctcccacagcgacttcccgcggaacactctctcccgtcagtgcactggtattcagggaagaatgtccttccacaaccacaccatcgattggaactttttcgcccggctgtacaataatcaccgtgccgatctccacctcatccgggtctactttttccatctgaccgtctgtttcaatatttgcataatccggccggatatccatcagatcactgatattccggcggctcttaccgactgcataactctggaacagctctccgatctgataaaacagcataactgcaacgccttctttgtaatcgctgagggcaatcgctccgatggttgccactgccatcaggaaattttcatcaaacatctgcctgttacagattcccttccaggctttccgcagaatatcatagccgatcacaaaatacggaaccagatagaaaagaaactccagccactttggtatggaaacaacgcttcctgcaatcccgatgataaccagaagcactgctgccacaataattcgtttcaatacttttttctgctttttattcatggtgccctccaatctgactgatacctatggaaaaagccggatttaaagaaagatctcacaatcatcttccactttcttacagttctttaacacatcctgcataaccgcttttgcatctgcaccctcttcaaattctacgttcatcttcagtgtcatgaaatttacagttgcatcctttactccggtagtagcttttgcagcttcctccattttatttgcacagtttgcacaatccacatcaattttgtaagttttcttcatcgtcggtttcctccatactttcctttttcattttatcattctttcatatgagcatttgttcatatgtttgattctattatagcgtaaagttcgtaaatgtcaatatatttttaatacgctggtattgtttcggaattgaattttccagaccattttttaacaaacagatttgcatgtgtttgttaagaaaatcaagtgttctatcactttccaaattgatagtggacatatagaaaataaaagattgattatgtcccacttgcatcgtgtgttgggacatatatgatatatttttccaactatgtcccacttatcaccgccatcgggacatatgttctccttgtgaaatctgtaagatttattacaggatttataataaacgggttatgtaagatatactatccggtttctgtaatccttttgtaaaaacaaaaagagtggatgctttgggacatccactccacatgccggctatgccatgccgtttacggttttatatttatagagcatctccgcgtggttttgttcttccacctggatatctgccagaagtttgcgcacatcggaatccccgaatgcaaacacatcggtattatacgttccggacaccattttttcggaaccgatactgtccgtggcaaggaaattgtcgtttttcttgtcttctggattggtcatggaatcataggttgccttcggcgcatattcttttccctctctgtcattgacgttgcaggacgggacactgcctttcatgacctgttccagagactccacatgcctttgctcctttttttccagatcggcaaacaaatcccgaagcaccgggtcctttgcttcctgtccgtaacgtttgtacttctccacgcaggaaagttcctgtgtgtgcagatcctcaattgtagccatctctttttctgttaaaaccatggtttaaccctctttctttccataagataatcttgttgattgcagaacatgaacactccgcaaccttctcctctagtatctgtaaaaaaatacaacacatacctggtaaaatttcgtcaaaaagggttgaaacttctcacaacagattgtataatttcgtttgtattttatacaatgtttacaaaaaggtggattattttatggaagaacgagaaaaattaaaatcccgtctgggattcattctcctgtcagccggatgtgcgatcggaatcggaaacgtatggaaatttccatacactgccggacagggcggaggcggtgcctttgtgctgttttatctgttgtttctgattattctcggactcccgatcatgacgatggaatttgcggttgggcgtgccagccagaaaagtccggtcaaagcctaccaggcactggaaaaacccggacagaaatggcatatccacgggattatcacattgatcggctgctatcttcttatgatgttttatacaacggtcaccggctggatgcttcattatttttatatgacggtcaccggacagtttcagggactggatgccgacggtgtatccggacagtttaccacaatgctgagcaaacctctgaccatgggcttctggatggtggtagttgtttgcgccggcgtatttgtctgctcccgtggactgcagaacggtctggaaaaagtaacaaaggtcatgatgacttctttgcttatcatcatgatcattctggcggtcaacagcttttttatggatggtgcaaaagaaggccttgccttttatctgatcccggactttgaacggatgaaacagatcggtattgcaaaaaccattacgggtgccatgaaccaggcatttttcacgttaagccttggaatcggcgcgatggcaattttgggaagttatatcggaaaggaacgctctctgcttggtgaatcggtaaatattgccattctggatacgtttgttgctatcacctccggacttatcatttttccggcatgctttacgttccatgttgaccagacttccggaccaagcctgatttttatcaccctgccgaatatttttaaccatattccgcttggcagactctggggaagcctgttctttttgtttatgttttttgcagcgttttccacaatcctggcagtatttgagaacatcatctcctgcggtatggaactgaccggatgcagccgccagaaatcctgtgccgttaatctggtactgatcattgtactctccctgccatgtgtactcggatacaatgtatggaactggaaaggtttttcaatctttggtgggtctgtgcttgacctggaagattttctggtaagcaacctgttcctgcctctcggttccctggtatatctgctgttttgcacaagccactacggctggggctggaaaaactacacaaccgaagccaataccggaaaaggattaaaaattaaaaactggatgcgcggctacattacctatattctgccgctgattgtgctttttatctttggatttggcatttatgataaattttttacaaactaaggaggatttcttatgtatcacgcaaatgaatcacgttacgaaaccatgaaataccaccgctgcggcgacagcggactgatgctgccggaagtatctttgggcttctggcacaatttcggagataccggtgtttatgaaaatatgagacagatgtgctttacggcatttgaccacgggatcacacattttgatctggcaaacaactatggaccgcagccgggcagtgcggaggaaaatctcgggaagatccttcgggaagagctttcttcctaccgcgatgaactgatcatcagttccaaagccggttttgacatgtggccgggaccttatggaaactggggcagccgcaagtacctgattgccagccttgaccagagcttaaaacggctcggtctggactatgtggatattttctatcaccaccgcatggatccggatacaccgctggaggaaaccatgggtgcactcgaccagatcgtgcgaagcggaaaagcactgtatgtcggtctgtccaactacgacggggaaacgatgaaacgcgcggctgccatcttagaagatctgcactgcccgtttattatcaaccagaattcctacaatatctttaaccgtaccattgaagaaaacggtttaaaacaggccgcagcagatgggaagaaaggaattatttctttcagcccgctcgcgcagggtatgctgaccgaccgctatctaaacggtattccaaaagacagccgtgtcaacacggacggacgtttcctgcatgcggatcagtttgatgaaaagcggatggcaagtatccggagcctgaatgagattgcggctgcccgtggtgaaagcctcgcacagatggcactcaaatgggtcatccgtgacggtgtggtcacttccgttctgatcggagcttcccgcccggcacagattcttgaaaatctgaaagtgttaaactctgctccgtttacggaggaggaactgaaaaaaattgatcagtgtgcactttctctctaggtaaaacaaaaaccccggatatttatttccggggttttgtcttttcctgcatctgctatttgactttgacttttaattttaaaactttggtctttccattgtttaaggttactgtcacgcgaatggacgcagttccttttttgttcgattttatggtacccttcttatttacagatgcaatttttttgttattgctctgataagaaatgctttttacattgtccatatttaaggtggctgccagagaaaccttcttttgttttcccttcttcacctgaacggttttattcttcaatgtaaccgtttttaatattttcgttgtgacctgatccatatctttctgatccataaggacataatccttattggaatctgctgaaaaattcacatttccggcttttgtaaccgtataactcttgtcgtttacaaggacataggcacctgtcttttgatcttttgcacacacatacagcttgtttccggtctgtatgtctgctgtatttacggtcagtgtatagcttacgttgccagccggatcggtgacccggatcgtcacatctgtgtgttttccattgttttcttccatggtttgttttatcagatcagcggtcaccgttgttttgatggctttatttttccgggttccggtaacggtcacggttggtgtattttgtccggccgcgtttccatcggacggtgtttctgtaccagctgtatttccgttagacggtgtttctgcatcggttttatttccgttggatggtgttccccctccggcagtgccaccacccgaagtatttccgccaccggaacttcctccggaagatgagccgcctccggtcgttccaccgcctccggtagatgagccgcctccggttgttccacttcctccggtagatgagccgcctccggtcgttccacttcctccggaagatgagccgcctccggttgttccacttcctccggtggaactgtcctctttgattgtaacggtcacggcttcacttgtcactgtttcgtaataagtctgtccatccttatcatccggctcatatactgccttaaactgataagaaccgccacgttttaagcctgatacaaccgtatcggcttccccatatacgagtttttcctgtgcctttattatggttccgtcctgataaaaagaaatcgaaccaagcggaatactgccatttcggactccatctacctttgcatacagatgtacggaattaccgttttctgtctctgccgtaaggcgaatcgatggtttcgccgctgtaatggtaaaggttccgactttttcctctatcacatcgtactggtttccatccactttaaaccagacatcataactgcccggctgcaccggaacaacatttttcccatcctgccgatagaaaacttcaggctttacctgcgaatctaccgtctttccgttgtcctttcggactacatttaccgtggaaacaaagcagctctgtttcagccctgtgtatgcagctgtctgctggatggtatcatactgcatctttacggcaattggatttaccgtcacggtttcgtttgcctgggaaggaagtgccctgtagtttccattggctgctcctgcataagaaactgtaattgcattttctcccatatgaaatccgtttgcctctgaaaccggaatctttatggctgccactccgttttgaagcgtgatgccggatacttcataaggggtctggttaatgtataccgaaaaaccagcagatggcacgtgtccctgtaagctgctatctgtatagaccgtctgcacggtaagattcagttcatcctgcatggacacggccgttggtaatccatttatcgtagtggttgtttcctttgaagtagccgtcgaaccggatgtatccggatctttgtttacaatcagaactaccttctgctcaatttgttcatctgctgaaaatggacggattgtgatgtagtaggttcccggttctggcagtttcagttcgccactcgtagcatcttcataaatttccggtgtaattgtatgtaccccgtccggatctgtctccggatgaaatgccagtctaagatccgaaacattggcatttccatcatcaccaaccgttgaataatatatatgattattgaactctacttcgtatgtaagtggaacctgatataaagttttcccattttcgggtgtcccttcctgccattccacatccagataatacgatttatcactactcataatatttgaaacattcgccaaaagtacaggattttttactgtaacattttttaccgcaaccggtttatcccctgacaactcactggttttccagatttctccgtttccagacgatgtccgttccagtgtcattcccgcctgtccgtctgtcggtgtaaaagaaaccgccgtatccgcagcccttccaagttccagataggtgtgaccatactccgcaattccggattttccatttcttccattcagggtttcaaatgtaagtgcacccgtaatggtatctgtaacattcagcttctgttcttttcctaagatcagtcggtttcctactgaatccgcactcacaatcgaatgtacctgtggagtttccatctgggaaagatcaatcgcacttgccccttccagcctgaccgtacagctgtccaacgctgccggtgcaaatgttccacctccctttactgtgaggtttcctactttgcctatacctggaattccggtataggactggtcggtatctatggtcagaaatgtcttccctgcgtgattttcagatactccgtacacctgtttcgtatcggaaccggtaagtgaaatttccacatcgccggaaaccgtatattgtccatccgctgccggtggatccggctcctgcgtggaaaaccagtcatcctgatttacatatggttcaatggcaccggatgcatagatttccccattttgcgtaccggaaacgtgcgcaagcacgatctgtgtcttaccgtcatatgttccgttcatggaaccggcataaatattccccagattggtaccaccacccgtaatcagaatctgtgcctctgatcccggatgattccccatattctttccattctcataaagggatccgccaaagatatctacatagcggaatccgctgtcgcacgtaacattctcaagaacaagtttatgcccatttgcaaaaattgcatcgtgcagacgattggaaaaccgcagcgtaatgtttttaaatgtcacatccgtattcaggataaatccccccttacggttggaaaaagtatttccatttccgttgacggtcacgcttttatcaaaaataaacggttccgcagcctcggcatttaaaaaagcaccacttcccaaaattaagatttcatccccattgccggcagccgcataggcatcctcaaataaattgtagggatttccatagcttccatctccggaatgggtagaatttccatctttaaattccgtatagatcgttcttgccgctgtctgcacagcctcctgcgcctttaccggcacgacaggctgcacggtaatacacatggtgagcacgataaaaaatgcccatagacgttttgctgcattgtctggtttcatctgattgttctttttcatccatttctcctgataataagaacagggggatgagtcaaaaactcattcccctgtcacttcattgatagtctctaccatcatcctaacatggtttccaatcatcgtcaacaaatttatgacctgtttttatacctatatcatctgctgattttatattttattatttctatctgttctatctgtgtgatatcaatcttctgattgaaaatataacgagccccacaatatttcatttcacttgcagatgcatagccatctccaagctcttcaagatctgtaccatccatgaaagaatgtttctttttttcagttccttttctgtcatcggtaagaggtaactctcctatggaatattgctttccgtcttttgttgttgcaactacatgataaaaacaccctttttctctccagtcattgacgggacaaatactaaccgtataaggtgtaatttcaacagggattgttttttttgttttcttaacatccgcttttaacatcttctccttcattggaacaacttttcccttaaccaaaacattttttaatggcgtatttgaattatccggtgattgaaatcccttatatactttcggatttttccacgcagtatcatcggaataaaagccgcatacattgatctgaataccatcacctgtatctattacatccaccttactggtagtatctaacccacctaaccaataatttgttcctcccaaagattttgcgttcggaaggaacacctttgcacgcataaccttcgtatttgaagcaacctgaattgatgatatgattatcttttgttcttttctgccatcatcttctctactgtttgattttgcatcaaaattttttccacacgcacacagacaatatagcattgtaaaaattaataagtacagactgattctcttcattcataatcctccaatttctttttctttaaaacactaaggattaatatgcttcctatcactataattccaatgccagccacatatttcatcgaacttctgctctgtactccagctcctgtacttacctcagaatccatatgtcttttccattttaaaaggaatgacccatacataatttgcactttccagagcacttgtgagttttttcgtatctgccgtctgcaattttataagattacaatccacatatacttttaatgccttgtcataatcgatggttgcatccggctcttcttttttcatttcatcctgtaaattactgatttctgtccaatcgctgctcgttattaactgatcctgatcggaaaccggtatttccgcggcatagacagcagaacctgctatcgtaaaaattgcaatcatcataagcattatttttaaaatatttttcatagccattccccctctcttgtgtatactatacctcatttttcccattattctttctgcatgttaaaattggtttgattttcgtcaaaatctgcattaaaaatcccatagcatacaccatgggattttttcaaagatataacacaatctgaacctcaaatatattttcatcgatatttatagatttccatcccccgtatttgtctacaacatccgaaatattctgcataccgattccatgcaatgcctgttgtttcttccttgtcagtaaacgttctccctgtttattgacttttccatcaaacgtatttttcacctgtatacccagaattcccctgtcatattgtatccgaatctccaaaaaacgatcttttatctgctccattgcctcaattgcattgtccaacagatttccaaacaaaacattccaatcatatccatccactggcaactggcacggaatcacaatctgcgactgaatctgacaggacattgcctccgcttttgccagtttatgattcaaaatcatatccagttccagattccccgtattcacatacttatgctccgtctgcaaatgctcactcattttatttacatattcctgtgccttatcataccttccttcattaagatatgtctgcagaagatacatatggtttttcatgtcatgccgcaaagaatccagctttttctgattctgctgcatgatatgcatctgctcctgataggccatcatatgttcctttaaaagccgttgctgcattttatcctgataagcttctcccaaacggtcatacaaatagaacattccaagatctacaacgatcataatagccagtgataatactgtttttggcgaattttcgccggatacactctcaagagcatatatccagacaatatttccggctaatacaagaatcataaagtaatagttctgtgtttccataacccttcgccgacatatcacctgtcttattcccattgctatgagcagattgaccattgcacctgtgatggttcccattgcccgcccttcggaaaacaaagaaaaatctcccagataataatacatgataaattctatggtaagccccagcaatactgtaaaacaacctgccattattttctgcagtatacttccttcatacaatataccttctgccgcccagagaagcagtaccatactcaccgtagttcccatggcatttcgaaaaccaaatgcaacaactgtattaataagccatacgagcacataaacaatatttgccatccgtggcagttttcttttcttttccagaaaaacatccgtcactttaaaacttacatacacacttaatatgttacataccgcttcaaatattctttctatgttattcacccgccacacctcatcttttccataattgcatgatcaaggttatttttcatagaccgactgaccggaatgtcatccccattgatcatgtgtacgctgtctttctgaaaagattctgcataccgcagattaatgacataagatttatgtaccacgcagaataaatgcggattcaacgcaggaataacctccgaaagttttccataaacacataatgtatcatttgctgttaccacttgaatttttctggcaaggctctgcaaataaaaaacagaatgttcttctatccgtatcgaatttcttcctttcccaatttctataatatgtggctgaaactgatacagcctttcatattcatctaatatataatctactcgttcctgttgtatgggtttcacgaggaaattcattggacgcagatcaaaaagctgcatggcatacatttctattgccgatacaaaaacaatctgcatggattcatattggatctgggatcgaatccagtttccaacgataatccccgagctgtcccctaattcaatatccaaaaataacaaatcatacctttcgctttgctgcagtttttgaataaattctgctccacttgtataaccgtcaacatccacttttattcttttcatttctgcaaaccgaaaaatactttgttccaatttataaataaattgtatatcatcatcacatattgctacttttatcattgtatatcctgtaatttattttcctctctatttcaggatttcctgcagccgcgcatctgtatgcaggagttccttcgcgcgatccctatattgctgctcatgcagatacgtatagcggaacggtttgatcgacggtgccagatcaactgctttctcaaaatcctcccgccgaagatccagtgtttttacataatcccagaaccccgtctgcataaaaattgtgtctaccctccggtaacgatgatcctgcacaacactcatcagataggttgcaatgccaacctgaataccatgaagctgcggatgctcaagcatcttgtccagcgcatgggaaatcagatgttcgctgccgctcgttggcgcactgctgcccgcaatctcatttgcaattccgctcattgcaagagaatccagaagttcctttaaaaacagatcatcctgtatcgaagtaaacggtgtgcgcacaaaactgttgactgctttctttgcaatcatgacagcaaaatcattgacttttccgtacccatgttcttcctcaaaaatccagtcatacagtgccgtaatttttgataccatatcgccgattccggaatataaaaatttctccggtgcactgcggataatccttgtatccaccacaatcccatatgcaagttttgccggaacggacttgcggcgtccttccaccagaagggaagcactggcacttgaaaagccatcgctcgatgccgatgtcgggatgctgataaacggcagatttcgcagaaatccacaatatttcgcaccatcaatcacttttccgccaccgatgccgatgactgcctgcgtcttcgccggcatggaaaatgcaagactggtcagatcttccaaccgcacggtatcaagttcctgatattctaaaatatcaatgtcctcctgctgcaatgcttccataacggtagaaccaaacatttctacaagaccgtttccaaacaatacaactactttctgtaactgtaactcttttaagtaaatccccagattgtccaatgcacccgcaccgatctttaaaagtgccggaatggaaatgtgttttcctgccataataaatgttctccttctcattctcttttctattgattttagtataaacaaaggttcctgaaattacaatcaattcccccgaaaaaacacacacgcttctctttacaattatgggtaagaaaaaagacgatttcctgcgaaaccgtctttttcttattaaaattttgacgaaactcctgtaaatttactttgtcactttgatcgtcatctttacagtctttgtctttccgttctttaaagtgacttttactttcacaactgctttgccagctttctttgcgacaattgtaccatttttattcacggttacaaccgactttttggaagatgtataagtgatcttctttacattttccatgttcaggttcttatcaaaagtaacttttgccttctttccgtttgcaaccgttttcttggtatcctttaatgcaatactctttaagattttactgctcagggcttttgcatccttctcattcagcagtacataatcaccggcatctttggtatccgctgtcacagttccgtctttggaaaccttataagtcctgctgctgatcaggactttttctcctgtctttttatcaacttttacaagtgtcagctttttgcctgcctgcagatccttcgcattgacagatacgctgttcatcactttgccggaagcgttctttgttgtctgggtaatcgtgatgtcgctggttcctgcctcttggactaattttgcaaccacatctgctgaaattgtagtcttctttgtctcggaagcattctttactgttttgtccagctgtgcccgggcatctgtcacttctcccttatcgttcttttcaacggtaagtgtcgcatttgtatcttttgcaatattctcaaatgttttgtccgttttccgggtttccgatggttttgtatccggtgttgttgtgctgccggaatttccaccagaggtgctgctgccggaggaagaatttccgccattatttccactctggctgatctgttttaccgcaatcaggccatcggcatctgcttttgcagcttctgcatcactgatcgttgttcctttgaatgcatcaaagtaaagtaccgattccacatctaccgcggaacctgccgggttggaattacaccagagtccgaatgcctgcacatcttttaaagcatccccactaagttttccacccgtcttccctttaaaagctgagaatggaacggttacttcataggcatcttctgtcttcgcaagattggtcagatatacttcatactcttctcctcctgccttgatctgtacaacaaccttctgcccttttccatcaagttttgtccagaatttcaatgcattataggctgaaaaatctgtattgcccagacttgcatttaccagacccgtccagacttccgaaccggttgtttttaatttgtaactaaatgcagcaccatatgtaccgtctgccttatgctcctgatccagcgtaaaggacgaactgcatccagcggcagaatttccaccgtaagctgcatccagaagtccattactcccgacatagtagtcaaaattttccagcacacctgccggagctttgtccttttcttttccgatactcagatttgtgatcgtggacagttcttttccatctgcaacgagtgtaatggatgcaacatctgtttctccgatctgatccatttccttttgtgtcagctgcgccgtatagaatctgtcggagccttttgcagccggcaatgtcaactgtttgccttttgccgtatcctttacaacaaacgatacttcaccggcattggaaacacttgcctttaatgcagttggctttaaaatcgtatccatatcaaacggtgctaccatgtatccgctgacatctttgtaattatccgtctttactcctgcgtacttatcgatatttccatagaaattcgtaccgtttccaaatactgaatccgcgttgttgtagtaatcaataaactcattgaccatttcctgacccatggtatcactgtatttatacggcacatagaaattggtatcgctgaaatttgcccataccatataatatggcatgtcgtttttctttgcgatatcattcactttctgataccagttcacacccgactttgcctcactgaccggattattttttacaagaagcccttcgttatcacttccatcctttttcatcacacgtacaccggtctccgaaatcgcagccagcttgttatgctgttttgcaagtgatgatacaacctgacaggtctgatccagatgatcaaagaatgaagtatcactctctgccggataagtattaaagtcgttgtaataatcaaatgccagaatgtctacacaggcatctcccggataccgcgacatatactctgcctcggtctccagcggtccgtttggcgaatacacataaagcatattgtgcacgcctttgaattccagataatctctggtatatgcatacagactcctgtaactttctgcggtgtttgcactgccccaccagaaccagccgccggtatcctcatggaatggccggaaaatcaccgggatattctcttgttccaatgcattggcatagactgcaatcgtatcaagatatgccttaaatacctcattcttctctccaccaggcaaaatcttctttaacgaatcaccggataaatcttttgcttcattaaaatcacagttatagaaatcgtaggttccatctgcattctttttaatttttgcgttggtgaaattcggcatatgggtggataaggtaacgattgcaccgtttttggccgcctttttgctgtagtcaatggaactctgcagtgcagatgccgcatccgtaccaccagcctcgcttccaaacaatgccagggagtcaatgccgaaaataccgctgacggaaccggtcacatcttttacatctcccagatcgttgtttcctacggaatggctcacatcattctgatgtccaaacagtacctgatcactttcggtcagtccctgcagatatgcatacaatgcctttgcgctattgctggcatccggatctgtcatggtcagggttttatctgttgcttctggttttgcctgtgttgcgtctgtattcggtgttgcggtaattgtcacaaaatcaccactggcatccttctgggaaagtatcagattatccagataaacatcccctgcaaaggaactgttggctccgataagtccgattgtcagatcatccattggtgtggcagatggagaaaatcctaaagtaactgtaactttcttatatccttttcctgcatctgttgcctcggacgaatctatgctggtatctttattgattccgctgttggagaaaaattttatcttggaaatattactgctttccggataaatcaaatccacactcacctgattataattgctgatatcagccggtgtcttcggtgtgaatttcacttttgcctcactccatgattcgccggagttggctgtataattcaggcttacttttaatcttccgtccccgccatttgcgtcataggaaagttccggagcagcattttttgttccaccgtggaaatactgatatccggtttcacctgcccacagatttacctgggattcattatttaaatcagaaagaacggttggctcctgtttggtcagttcctgtttatcgcttgataaatttgtgagaactacatttgaaaatgtcacagttcccttaaatccggttcccacaagaacgaattcaacatccatcaatgtatccggtgttattcctgaaaactttactttcagatcagctgaataattctccccaactttcataaaagaatccttctgcagccactggcaatccgtactgttgttccatccccattttgatcccagttttgttacaccctggatattcagatgcgctttatctgcatccagcgactgataggatgtttcatccagtgttacctttgcagttaattcatactcttcattcacatttcccaacgagccattgatggattcatcatatgcaaaagtaatttttccttcaccattccagtcatcttctttcaattctgaaaaatcaatggtttttgttgtttttgcgccctcatttttgtacagttctgtacgtgttactgttggtgctgacgcttcatttgtctccgccgcatacaccacctcattttgtaaaaatgtgcatgcctccggtgtcagtgaccccatcattgccgctgccagcgtgatggcaacaatctgttttcctacccttctcatgtttttgctctacctttcctttcttctccatttcttgtaaaaaccttccagtgccctccatctatccggtttcacttaataaaaaagcaattgcacgctgcttcccatatttcagggagagggtactgcatacttggggagtgcagtaaaaatatgggaaccagtgtgcaattgctttatttatttgataaattcagtatatcataaagtaattttaagtcaatatttagttaatagaaaattaaacatttgtaaagtattacttaatttaaagttttttagtctttttttagtcttttaattagacattttcacaagaggcgaaagtaccagttccttattaattgaaaaaagcacctgtaaaacagattatgttctgctctacaggtgctaatatcgtgctagttcttttaagctgccttccaaagaataaccccctctttttgtacattcttataaaatggaagcacttccccccactttttcatattttcttctttaatatcaatgatagaaaaaatcttatcataacgtaccattttttctgcacctattccatattttctttttcataagattccaccagtcaaagaacaattcaaaaattaaggggacgatcaaaaccatccccttaaaaattttaaatataattaatcaatttttcttaacattgccaagtcaaggttacaccagtcatttgctcctgctacagaataaaccccgatctccaacgtatgatttgtaacaacaatcttgtctatactaaaaatattccaattaatgtcacttgtttcaatcgtggtatcaagctcacttcctccataattttttgcataaagttgtaaaacatcctgtttcccatttgtctttgcccaaattgagaatttatatgttccattcggaatatttgtatacgttttatatacagaacacgaatactctttatcatcccaaaatgttaatttgtaatctccatcatatgcatcaccatattctgttcttacagtattttcatctgacgaatcacttgtccatacattccatccactcggtgaagtagttatcccattctgttcaaaactgatatttgtcaataaattttcacacggtttattaagcaccttaatagaatctaatgcatttccctgaaaattaaacaacgtcatgttatcccatgtattacttggcgttacggtatcatttttatacgcaacccctgcagatgtagcatatgttccgccttctacaggtatccattctggttcccaataaaaatatccaatacctttgtcatctggtacatttaaaatgattgattccagatcattcataaattcaaattgtccttctactgttgcaggatatcctccaacttcttcatctccactaatgaatacatttccttcaccatcaccatcttccgttgtccatgcatacgcagtttctacaacacacacttctttattataggtggtcgccaagtaattcaaattatactgaagcccctccatggttccatgccacattggataataagataatccaaatacatcaaaatccaagtttggtgactctttcaataatccaccaaaataccaggtatacaactgattttttccaccctgatccagatgaagcataattttggtacttgatgcagcagaagcacgtactccagaaattgcagattctaaaagacccgctaatccggaaaaatcctcattcgtccctattttgccatcttcatgaagaatccccgatgatatttcattttatccttttacccctccggcaaccaatccattctgaataaatcgctgtaagcacataaagatgatcatgatcggcagggatgaaatcactgctgctgcagcaaacaaagtccagtgcgcagcaaactgatcactgataaaggactgcagtccgagtgcaagcgtcatttttcccggtgtctgcaaaaagattgaggtaatcacatattcactgtatgttgcaataaacgaaaacaggaagatcacggcaagctgtggcattgcaagcgggatgatgatcttataaaaaacctggaattcatttgctccatccaccattgcagcttcatccaattccaccggaagtccatcgatataagatttaagtaaccagatattgtaagcacttccacctgcaagcacaagaatgagtgcaaagctgttgtccaccagcccgaacttataaattaaaatatagtatccggcaactgccatgctgtttggaaacacctgtaatatcaaaagtgccatcagtccatattttcttcccacaaaccgcagtcttgcaaacgcatacgctgcaagtgaagtaagcacaagttgtatgattgctacaataaagcaaaactttagggaattaaaaacccagattccaaaatccgtttcccgaaacagttccacataatgttcaatgctgaatttttcagggaacaatgaggacaggaaaaagctgtcacccgcggaaaaagaggacataacaatccatatgaccggaaacagcaccacgatcattgtgatccatatgaccactctgcttccccacagtgtccgttgttctgaggcggatattttctttttatttttcatttaatcaacctccttaaatgagccggacagccgcatattaatcagcgtaaatgttccgacaatgataaagatcagcacactgaacgttgcagacagttcataccggttcgaccatgtggtcatcttataggtggtactggcaaggatatccgtataacccgcaaactggttatccactctcgctggtccaccttgtgtaatcatatatatatttccaaaattgttaaaattagccgcaaacgaggaaattacaagaggaatggaaagttttgtcaccatcggcaatgtaatgctcttaaagcactgaaattttgatgccccatccattttagccgcctcatagtattcaccagaaatcgcctgtagtccaccaagacagacattcatcatatagggaaatcccagccacacattcacgataatcaacccaacccttgcccagaatggattggtcagccacggtacattccaggcaataccgattgtatgcagtaaattattgattccaccatactgctcatttagcagtccctgccatgcgaggattgcaatcgtagatggcaatgcccacggaacaattagcactgcacggtaaatttttgattctttcatatgcggattgtttaacaaaatggcaagaatcagtcccattgcataggaacctgccgtacttaacagcgcaaaacaaatcgtccacccaagtaccgggaaaaacacatttttaatgcttccggaaaatacggtcagataattttccagacccacaaacgtgtaatctgtcagatgatacatgttgtaattagtaaaagataaaatcaccgtataaataattggcagacatgtcaccaacagaatcgagatcagtgccggtgccagataagtatacccaagcgcattctttttctttctcatgccatcactactttcctgaattcatcaattcaatcgcttctttcaactgcgtaaccatatttttggcagcttcctctggtgtttgctccccagaccacatcgaacggatattgtttgtgtggatactccagagctgtcccatttctgatacggtcggcatcggctctccatcattgatctgctcgacaaatgcctgtgtgtatgcattactctggatctcatcaagttcctgatctgccaattttgccggtatacggtcacccgcctcatacatgccaagtgcaccgttttccagcagataggaaataaaatcccatgctgcatcctgatttttactgctgttgctcacaaaacttacctgtgtacccaccggggtcacaaacggctgtccgtggaaagttggcatttttgctacagcaaatttagttcctgcagaggtaaaaccgtcaatgtcccatggtccaccaatataataagcacattttccgttttggaaattacttcttgcgatatcggctgtcacatctgccgtgatcagtttatatttattgcacaggtcattgataaaggcataggcatccacactgccctcattatcaagaccgatgtctgccgtgtcatatgccccatcctgatatttaaaaatataacctccgcaggctctcacaaaaccaagatcgtagtatatgcttgttgcatcaaactgtacacctccgtctgcggctgcctgatcgaccagttcttcccatgtttttgggacttccgatacaagatctgtgttgtaaaacagtgcagtagtctctacggaaagtggtgctgcatatcgttttccatctacataacatgcctggatggctgcatcggaaaaatcctgatccgcatacagatcctgtggcacttctgcagtaagatctgcgtttacataatctgcaagctggtcattgggaatacccaccacagcatccggtccggaagcactttttactgcctgtgcaaactgctggacagatggagactggtgaatgacttctacctttcgtccgttcttttctccccattcatctgcatatttctgaatggtatccacttccacgttcatgttcgtccaaatcacgagtttttccccggaagcttccttttttccggttccacttccacagccagtcaacattcccactgccattgttacagccagcacagctgttattatttttttcatatgattatcctccctttacattgttttcatgtttatcagcgcgctgtttgcgtttccattttcgtcaaacaatgccatatttgccatggcatttcctgctgtcatcttgtctttcatgtacttgctgccactcttacttgcccacgtacagtccggtattggcagccatgccggttcccagtaaaacacaccgatgcctcttttattgtttacacttcttaccgttgcaaacaaatcccgcaagaaggcttcctgtccctgctgtgttgccgggtatccagtgattttttcatgctccttcgaataaacgattccgttacagccaaatgtttccgtagtataaccaattgaagtctctgcaacaagcacatctttgtcataccggctgctgatatcattcatattatccagaagaagtgaaagacttccgttccagtgcggataatacgacattccaataatatcaaaatccagcgcatacgatgaaacctgatcaaaccactgtcgatacattttattatccgttccgaaatccagatgcaatacgatccttgcatccggacactcctcgcgcacccccttaatccctgccttcagaagatgtgccatattttcggtctgttcgatgtaaccatccggccacaacagcccttttgtaatctcatttccaacctgcaccatagtcggcacaagcttgtggtttttcaatgcctttaacgtatctacagtatgcagatacaccgccgtttccagtgcctctccgcttaattctttccaggctttcggttttacctgtttggccgggtctgcccagaaatcactataatggaaatcaagcataaaatccataccgctttgtacagttctttctgcgatctcaatggtggtctccagatcatttccacctcccccgtaagaatttccgttttcatcgtagggatccgtccaaatccgaatccttacgttattggttccgcatgtctttaaaattgcaaacagatcttcttttttcccgttcagccgataggacgcaccatattgttccagttctttcaccatggaaatatccatacccttaataaatttcataactactccttcacaagtgtaatatcatcaatggttccccagccgcccggtgctgttgccacgtgtgctcctactgtgattgctccgtccgttggtgtaatgcccgggatttccaccgtataccagttaacatacccctgcaatttgccatctgcttttacctcttcgccatccacgagcgcataaaaatatacggtcggattttcatccccggctgcatcaccctgaatatgagcggttagtttgtaggtgccatcctcaagtccactcactgtctgtttcatggaaaaatccaccggattgtttcctgaataaaaatgcagtgactgtgcacctgcaaaacagtctgtctcacgatcataaacatctaactcctctgtaacatcattgttgtttgtcaccgtccatccggaaaaatctggttcttcaaaacttccgttgatcagataatttccgttttcatctggcgtacctgttgtattttccttctgttctgcggcagcaacttctgtgcctctctcctcttcaatattctctgtttctgtagctttttgtgttttctccgcatcagcattaataccagatgtgtttccacatcctgacaatgctactgccatgctcgctacaaggactgcatgtaataacttccttttcataaatgttcccccttttctaaaattaaatctttactaatattcaagtaaattatttacttattaagaatgtatcatctaagcctaataatgtcaatactcacaaatacacttttcactatattgccaatttttatttttgtattttatgcaatatatacaaaaaaggcacaaaaaaagatgttcgcaatcgaacatcttttttcaacaactcttccggaaaactggaattccatttacaaacaccagcttggttacgcgtccgccatatagtaccctgtttcgcaacagatcaagcgcggtttcacagatacatggaatatcaatatgaatagtagtaaggggtggtgataaatactttgcaatattcacatcattgatgctaaaaaccgccacctgctccggaatctgtatattgccttcatttaaagcctgtagcacacccaccgccagtgtgtcacttgccacacaaagtgctgttggcagtatctcttttttaagcagttcttttcccatgcggtagccatcatccaccgtaaatctctcggaaatgaaaatgtactcctcattgagatacccatagtatgcagcgctctgtcgaaatgaccactcccggatatccatggaaggttttccggtgtcaatatttctatcactgcccccgataaatccaatccgtttatgtcctttttccacaaagtaatcaaccatctgtgtcacaaacgaatccatattgggcttcacggcatcaaaaagtttttcatccggggatgtgccgataaacacgccccttttgcaccgtttatacaaagcattgatttcttttctggtgagccatccaatcgcaataaaggcacttaaatctttcggaacatgatccatgccgtcttttcggtcatagatgctgagctgaatattcatctttttcgcctgctttattatctcatcctttaccccgtggtaaaagacatcttcgagttcatcctcgtggtcaacaaaatacagcaatgccacattttcgatcttgggatagattactctctttttgtatccgattttctctgctgtggcaaagatcgcctctcttgtctcatcactaacagagattccctcatcataattgagtacccgtgaaactgctgagctcgaaacccctacgatttctgcaatttctttaattgttgccatacgattcctccaatgttttcatggatttctttattgataaattctgttataattattttacataaatattttactttgtcaaacaaagttttacacataaaaaaggcatacattcctcaaaggatcatgtatgcctttacaaaccgttacccagtcttatttcgtagaaaccgtagaagctaccagctccagatttccttctatctcgacattaccgtatccacaaggaagaataaaatgatcccccttcttgacactggtatgattcaaaagaccattgccctcgactacgctgacgatcaggaacggataagactgctcaaactcagccttcccatccactttcatgtggaatacctgataatacttacactcgatgagtttctgcagtttgttggtctccgctgccccagtctcgatcatgcactcggacatcggtgctgccggcactttgatgacatcgagactctgctgtacatgaagctgccgcggtttgccgttggaaagacggtcatagtcatagacacgataggtaatatcactgttctgctgtgtctcaagaattgtaattccacccttgattgcatgtaccgttcccggatcaatctggatgaaatcacctttctttaccggaacctcacggatcaattcactccagcgtccgttgtgtaccatgtcttccagttcctcgtgtgtctttgcattgtgtccgataacaagcttggaatccggctcacaatctaagatataccagcactccatcttaccgagagaaccattttcatgctctgcggcataggtatcatccggatgtacctgaatacttaaatctgcctttgcatcaataatcttgatcagcagtgggaatactttcccctgtgtatttccaaagagttctctgtgttcctcccacagatcggataatttctttcccttatacgcaccgtctgcaattgtacaggtgccgtttggatgtgctgcgataccccagcattctccaatgtcatcgccctcgatcgcatagccaaactcctcacgcagcttggtgccgccccagatgttgtgggtaaataccggattcataaacaaaatttctttacatggctggttacagcttaaattttctccattcattttcattacctctctgtaccagtaggcagaatcttttgcaattctacgttgggttgtgtagtctacataaacaagtccaaaacgctctttgtagccttctgcccactcaaaattgtccagaaatgtccacaggaaatatccgatcaccggcattccctcattgaccgcacgctgcacagcacccagatatgcatccaaaaatgtgattctttcgctgtcatgcacctgtccgtccgcggaaatattatccagatcggacattccgttttctgtaatataaagcggcagatggtaacgctccgtcaaaaaacggattccgtaatacaatgcctccggtgtcactggccagcctgtgcctgtcttagctgccccaggggcgcggtttacatattccggttttccatcttttccacaacggatcatataaccgttatatatattttgtcccataaaatcgagcggctgatgaatgagttccatatcttctttcgtaatctccggaagatatggtgcaaatttttccagtccttcttttggatactctcctaaaaagaccggatcggaaaaccatgccacattccaggtccagttatccattgggttgtcaaaaccaaaatataccttttttgcagcctctatatcctttgtaccctccgatgccggatatgccacaccacaggtcggtgcatagccgacacgtatcttctgctttgcatatttacgcagattaatcactgcctgaccatgtgctttcatcagattgtgtgccatctgaaaggtctctggaacagaatactgcattcccggtgcatgtaccccgcttaagtgtcccagtccaatcgcacactgcggctcattgattgtgataaaatcggtacacagatcagagaaattttctgcaacgacttttgcatattctccaaaccactccaccacatcttcattgagccatccgccttttttaaacagctcatatggaaactcccaatgaaacatggtgataaacggacgaattccgttttctttcatgcaaagaatcatatcgcgatacatctgtacagctttcccattcaccttcccggttcccgccggaaggattcttgaccagctgagtgaaaaacgataatttttgattccaagtaaccgcatcaaagcaaaatcttctttataacggtgcatatgatcgcaggaaacatctgcagtctgttgttcatacaccctgccggaacgcacaaactcatcccacacattctttccacggccatcgtcaggatcggttccttccacctgataagcactgcttgccactccccagacaaaatcttttggaaacatatttttcttcctctctctatttttcagaaacaattacagagatcagttcaaatgcactcggcatggtagaatctccggaaatcagccgtatttccaccgtatgtgccccttcttttccatgcaccagaaccggagtcagcgtcagggaatccccccaatcctcatcaaagtttgcatccaatgtcaccgcatgtgcttcatccccatccacaatggccagtgccaccggtgccggtttcgttacacaacgcttatactgtgctgcaatctcacttccatttacagcaaacgttaacgatgctcctttttcttttgcggaccatccatttttgaagcaatctttgacttcttcctgtactctggtatctttgacaaatccctggttttcaggttcataattacgattatccagacgcactgctttttcatagcaattgtctgtcagtggttctgggaattctggttttgcatcctttgtctgtgttatatggattttctctaaggcataagtgatcacggatgccaccagttcatgtcctttgtcatttggatgcagatcatcctctgttatcctgcggtttggaatccgccccgcaacgacttccggataaatactgctctgcatgctgaccgccggaagattgtagtgtctggctatctgtgcatgcataatctgtgcattaccaccgttgttataatagacattgtgcaccagcatcacggccggctcttttttatcctgccatacgcggcgcaccagtccctcataggtctcgcggaaaaattctgtagaatcatcattgacagaaaattctataatgacaaaatccggctcatgagaaagcagatcggactctgcacgggcggttccaaaatgcgatgtcgttccaccgattccggcattgatataatgaaactctgcctgcggaaatgttttttcccaccactgaaatacgcggtaagcataacacagctccggtgcggatgcaagacatccctgcgtgatcgaaccaccaaggaaaccaatgtttaatgtttccccggcctctgcccttgccattaattttttcatccggtacagattgcccggattggaaatacctctttcatattcaatctgcattgttatactccttatatcatgtaatcaatttttttaaaaattgattacatatcccaaatctcctctccaaggctttcgatgaatgcggtaagttccttactcatctgctctgcctctggaatccggatatgtcccggtgtaccttttccattttgtgaatacaggaaatggtgtacccgtggactatttattgttttgcacacttcctcaatggaaatgtcccagttttcgttatgttccaatattgtagtagttaatataaaggttgccttcggatatacttccatgagatgctccaaaaatctgcggtaatgctgccgccaattctcagaacgtgcactgttataatcctccgccatataatcgtccgggtgattgtcgttttgtccaaatgccaaaatgacaacattcggtgtatagcgggaaaaatcccatggttttacttcactgagttccggttgatattcaattttatcataacaggattctattcccagataatccggcgccataaaccagccggttttgtcaagaagggcgataccaccctgtgaactgtcatgcagctgtgcatgcagatttcgcgcggtcatccacgcataagaataccagctgtttgaatattccccatcgtgctccggatccggttttcctacataatccacagcttctgatacctcaccgcaggaaacgctgtccccgaaaacttcgattttacgggacggaagcggtgccggagtaagtacctcggcatcgcttcccaattcaaatcccagtaatgtgacgatatggcaggaatccattcttttaaaaagagtgagggtatgctctgtaggctcaagaccttctgcaatcacatacgtttttgcatcggaatctgaggtgagtaagaactgtccctgctttccgtctaatatatatcccatccggctcgaccagtaagcacgcttgtttgccagtgtcacggaaatttctgttccggtaaaacgaatctgtacaaaacttgccgcatagacaagcaccggtgctttcggatcatcaaaatcaattcttccacaatattgtaatctcttgtcgtccggtgaaatatgcatagttatctccttccgatttcagtgtctgcaggtgttacaacactgtttgtttttatgtaatctacaatctcatccagttttgtaaatgccaggccaacgtagctgtctgccgcaccataatagatcgcgatctttccggatgcactgtcgtgaatggttgcacatgggaagcatacgttcggaacgaaacctctctcctcataccactcttccggagtcagaaggaaattctcacagcggtacttcacgatggaaggattatcaatgtcaaggattgccccaccgatggagtaaacatatccgttacatgtaccggataccccatgatagaataagagccatccttcggaagtctcgattggagcagcaccaccgccgatctttaaggactcccaccattcgcttcctttgcccatgacatgtctgtgtttgccccagtataccagatccgggctttcacttaagaaaatgtcaccaaacggtgtatgaccactgtctgaaggacgggaaagcatcatgaagtttccattgatctttctagggaacagcacggcattgcggttgaatgggaggaacggattctcaatccgtgtaaacgtcttgaaatctgttgtttttgccatgccgattgctgctccgtagaaatcctgacaccagatgatataataggtgtcttctacttttacaagtcttggatcgtatgcatagattggcataaatggctcgccgttttcatctacgaatggaatcttgttttcttcaaaatcccagtggatggcatctttgctgtgtccaagataaatatatggaataccattggtctgctctccacggaacacaccgatgaaagcatcaccatatggcataaccgcactgttaaaaattcttgcaacaccctttaacggatttcttccgataatcgggttttcactgtatctccagatcggggctccgttctgaggtccttgtggtctctcctgccatggtacatttggtaccggagctgtcagcatctttacttcactcataatcaacactcctcttatttatgattttttaaatactctaagttcttcttaatcaggtcgcatctctgctgtacacacagtacacttcttcccggatcctgtggtgtattaaatacataatcaatcagacggtcaatcgttgtagtcgccacatgcattcttgtatcagaagaagcatagtaaataaatacttcgttcttatcgtttacgattgcaccgttggtaaatacaacattggatacatctccgacacgctcctcacctcttggtccgattaacagtccggatggctctgcaattaccttggacggatcatttaaatccgtggcaaatgcatagatcacatagcgcagacctgctgcagtatttcttacaccgtgtgcaatgtgaatccagccgcggtcagtcttgatcggagtcgcacctgcaccgttctttgcctcggtaatggtatggtacttgcggatgctggtcatcttttcttcgtcaatgactgcatgtgtgatgtcctcgcaaagaccgaatccaataccgcttccgcttccggtatcaatgaagtcatccatcggacgggtatagaatgcatactttccatccacaaattccggatgcagcacgacatttctctgctgcggggaacgaagggtctttaagttttccagacgctcccagtgctttaaatcttttgtgcggacaattcctgctgctgcaacggctgcagacaaatcgttcacgctggtatctttgctctcagaacagaatactccgtaaatgtatccgtcctcatgctgtgtcagtctcatatcatagacgtttgtctcctccggacatacatcatccagaaggatcgggtaatcccagaaacggaaattatcaattccgttatcactctctgccacgccgaagaaggactttctgtcatttccctcaatacgggcaaccagataatactttccgtttaaataaattgctccggaattcatgactgcattgattccaagacgttccataaagaatggattggtctcctcgtttaagtcatatctccaggtgagcggaatcatatctcttgtaagaacgggattcacataacggtcaaatacaccattataaaagtcacttttttcatttttacgtgaaagcagcttttcctgctttgccagttctacataatatctttcatgcattgtttaaagtctccttattacttccatacacattcttccgttatgatacggacatttccaaggttctacgattggacggtccgcaatcggactgccgtccggatgtacttcccagaaccactcggaaccggttctcttatcaatgacgtgttctttgataaattcccattcagcctccgatgcctccagaaacttcgttttctgcggatgcttctggtattcattcaggaatccgatcacagtctctgcctgtacccaccagatccggtggtcattcacttcccctttgcagcattcatttgccagagaatgaccgtcaaacgcaacctcgtagacattttctgcaagagtctcggtaatcggtgacattttttctttgtaatgatcatccccaagcacttccacaccgcggtccatcagccatgctgtctcaatatcatgaccataagaatacagatcaatgatggtgttgtagttcttgtcaaagaatacttcctgtctcttaagtttcggattgtataccttatctgcaaatacatccataatccactttaaccgctctcccacctcttcatcatgggaaacccggtaaaactcggtataagcctcaaacacatgaagcagtgtgttcatggttttttcggcaagcacaccattttccgatagcttctcattggattccggctggaagtctttggtaaatgcttccagatatccaacctcatccgtacatttgctttcaataagaagctgcagttctttggcaagctttaatgcttcttcatccccggatgcatcgtaataggaagaaagagcatagatgcagaatgcctgattgtaggtatgctttgttgtgtcaagtggctttccgtcataagtcatggaccagaagattccaccattttctttgtcgatgcagtgatcacgcaggaactcataaccgtgtcttgcctcgtccagcaaggtttcatctttcagcagtatgtaggcattcgcaaaaaaccaggtgattctgctgtttaaaatacatcccttttctgctgttttgtctacgtttaaattgtagtccatatatccataatatccaccgtaagtatcgtcccttaatgctttccagaaaggaatgatattttccgtcaaatgctttgtgacttcttctttcatcatgctcttattcatcccgatacctcttattttccaaaatcattaaccctttaccgcacctgctgtaattccactgtaaatctgtttctggcagcagacaaatacgatcagcgccggaagcagggagataataacacctgcacagatcagattgtacttgcttcccattggtcctacgaatgtgtagagggaaagtgccatggtacggatttcttttctcatcaggtaaaggtttgctgcgtagtattcgttgtacacaccaacaccctttaaaatacaggatgtaacgattgccggttttaacagtggaagcataatcttccagtaaatctgccagtaatttgcgccatcgataattgccgactcatccagtgaaagcggaatattttccataaactgaatgaaaatatacatggaaataacatcggtaccacagctcataatgatgtaaccgcccagactgtttacaagatgtaaatctgacataatctggtatacggtaacctgcattgctactgccggaagcagtgcggcaattgtataaaggttacggataaacccattgcccgggaacttgaaacggttcaatacgtaagcaagctgggaacctacaataacggatacggtaagcacaaccaccataactatgacagagtttaaaaatgcacgtcccatatttgctgtcttaaatgcatttacaaagttgtcaaaattcaaccagcttcccgggaatgccataacattggtattctggtactcggcatctgtcttaaatgccgttgtgatacaggaaacaatcggaatgattgcacagaatccgaaaaagatcagcgatgcatattccacaataatccagataatgcttcctacggaataatgtttcatgtttttacgttttactgctgctgtactactcattatttcgccgctcctttcttcattttctcctgttttttgatctgcttaatcacctgtttttccgccttcagccgggctttctttgccttataggattcatcctccgacgcggcatccctgaacacatatttaaagaacacattctgtaagatcgtacagataaagatgatcatcagcagaacaacagacattgccgatgccagacctactttctggctggtatgtgcgatcttgttcataattacgaaatacgttcctgttccgtttgcaccggtggtgattacgaaaggcgcctcaaacgcacttaaggaaccggtgatggaaaggataacatttaatgtaataattgtcttgatactcgggaggataatgtgtttaaactgctcccatttatttgcaccatccagggacgctgcttcgtagagttcgctatccacagacatcatggcaccaataaacagtaccatattctgtccggtataccgccatacggaagtcgccgtcagggaccagttgtttacactctgatcctttaaccagtatggaagattttctaattgaaacccacaccactgcaggattgtatcaaatacgaatcctctggtgaagaagaatttaaagataaaaccaatggcaataccactgatgaggtaagggaaaaacatcagccctttgaaaagatttccaccctttaccttaaagcttaaaattgttgcaagatacagtgcaagcacaagctggaccaatgcaccgaccatatagaataaactaagtttcaacgccccgaaacaatcgtttcttctgaatacatcaagatagttgtcccatccgacaaattcgcgcctgtctatcggcgttgtatatttcatcttataaaaactgaatttgatcatttccgcaaatggaaaataagtaaataaaaagagtaagagcaatgggataatcataaaaccgatacagataaatacctgctggccggctctgctctttgcccatttttttaaattaaatgattttgatttcatactacgttcctcccatatgaaacaggcaatcatgccaccgggccgaaaacagtttttcggcccggcaactggatgatgtacctttatgcagcgtggaactactctgtaatttctacgccctcagattcctgagcatctgtccatttctggttccactcgttcataatatcatcaaagctctcatcgccatttgcggcatgctcaatgattgcctgaatcttatcattaccgccattgttaacatttaactctgaatcagcatttaatgcatttaaaagatcctcttcgccttctacagccggttcatcctcaaggaatgttacaccagagaaatcaagctttgtatcagaagatgactttgcaaccggaagtccatcctcgttgtaagaaaatccagacttttcagtcatccacttaacaaagattaaagctgcctgcttctcatcatcagaagcgtttacgttgataccataagagtaatctgctccggctgatgcatactgctcaccgtttacagaaatcgggaatggcatatatccgatgtcatctgcgttctcaccggctgcttccatctgtgggtaagcccatgatccaagtaccatacatccgatctgtccgttgtttaacatgctcttagagccttcccagtcagttgtagaatagtcatcctcggtaagtccgccagcaactgcatcgtaaaggatcttgtatactgcatatggatgtgtgccatcgccataatccttgaatggatcctttgtatgaaggagtttctggttgaaatatgtattgtcaccagttgcattatttccgatataagcatcccatgcacccattgtccagcctgctgcatagtttgtgtaaagcggaattgcatccgtcttgtccttgatcttctttaatgcatcaatgaactcgtccggagtctttggagtatcggtcacaccggcatcctcaaacactttcttgttgtaaacgataccctgtgtcgttgctgtggaaggaacaccgtatacatcatttccatagagccatgtgtttgcgtagttgatctgctggctcatctcatcaagtgtaccgtatgacatataatatgtactgaggtctgccttatctactgccggaatcatggtaatggtttcgtactgtccggactgtaaatgtgtcagtgcatcatcggcatagtttgtatctgtagtgatttcaaccttgatattcggatactctttgttgaagtcttccagataagatttccagttctttccgccgtaatcatcggtatccatatctgttctgtggttgaacattgtaattgttgcgcttaagtcttttcctgtttctcccaatacaatgtctgaatagcttacaagaccatctgatgaagcgctgtctgccttctgtgttccgtcagcagagtcacttcccttagaaccgcatcctgcgaataatgttgcggtcattgcagctacaagaccaagtgccataaactttttaaatttcatgttgttctcctccttaaacatgtgaattattaagttaatttaagtatacattttttgttaatttaatcatcactctttattgcttttaatcataccatattgcattttcaaacacattccctataatgcacaattttgcatttacttttttgtatattatgcctatatatttttgtccaaaaagtaattttaagttatattttattttaaattattgctttttacctttcatccaattatacttaattaaaaactggttatgattgaaagaggatgattttatggaacaattacagcatcatgggattacaggaacggtgccaaagcatgtattatctgacaacatgaaaaactttacggcttttccgctgtccgcaccagcggatgacggctttattcatctgctcggaaaaggcatctgttcctttccgaacaattgttccatgacattccgtatcaacgcgccttatcattttttttatgtatatgaaggcactctttctgtaacggatgaacatcatacgtgtcggctggcagaccggcacgcagcacttcttccgatttccggtgccctcacgatcgaaattttaaaaggccgctgccactatttccatatgtatatttccggtcttgccctcttgcagtttcacacactgctcccatcacctcttgcctatccggcagagagttcttctatgtttacgctgttccatacgatggagcatttacagaatctgcagaaagacacttttaatgatcctctgtccgtctgccggatctccatgtggattaccaatattcttacggaaatggcagtctattcctgccatcctgccacacaccgggatacgatcccggattatctgcgggaaattcatcatttatttgacacacaatacggagaaaattattcactggacgaactggaaaatacgtattccgtcagcaaataccggatctgccgcgagttttctaaatactatggggcttctcctgttcagtacttaaaccataagcggattgaagaggctaaaaaactgcttctgactaccaacgacaccatacacgaaatcggaagcaaggtaggaattcataataccaatcattttatcaatctgtttaaacgggaaaccggggcaaccccacttgcatttaagcaggatgccccggtttctatatccgagctacactatctttaaataccacatgtccatctacaatgaacacaccggctgtatagttttcatttgcaattttgcggacaatcttatgaatggctctgcgtgccatctccgatatatccacctcatatgttgtaattccgatatcgcacagccccggataaaggaaattatcaaatcccacgacggaaacatcttccggaatccggtagccttcattttcaagtttccggatcagatacgaagctgcaagatcgcagttacagacaaatgccgtcggcatatctttcggaaatttataatatttttccagatccatccgcccggttttggtatcccggtcatccattacataatcttttggcacatccatgccgtgttccatcattgatttcagataaccaaggtaacggtctgtaatactgttcgtcataccaacggttcccacataggcaatttttttatgccccatggaaaacagataattggtcagcgcataggttccataaaaactgttggaaatcacggtgtcaagaccaacggcatcgttataaaaatccagacagaccactggcacgccgccctctttttcaatctgttcaatgtacggctttgtcatatctccgagaataatcagaccatccacctttttttcctgaagcagaagcggcatctggttttccagcacactctcccttgaaatactttcgagcagcgtaaaacacccacgggaaactgccttcttgtttacttcctgatacattttccagtaaaaggaatcgtatttgtccagatatacttcctgtatcaggactccgatattatattgtttttccgcagactgccgtttcgtctctgaaggactgcggtatccaagttcttctgcaagattctttattttctcccgcatttcctcgctgacacctttttgtccggacaaagcttttgaaacagttacggtgctgacaccaacctgttccgcaatatctgcaagttttactgcttttgccataattccctcgatatttttatactcattcatttatgcagccacataaaccggctaatttaagttaattttacattcttttttttcttctgtcaattaatctgccacaaaatggtacagataacttcggtaatccccctgctcagaaggaaccagcataccggcattcataagcagatctccaccgtatacgcattcgttctccatctcaccttccagacgataatccagattcggattcagtccctgcaggcgtacttttaaactgtggtaattcgggcgtgcgtgtacggtcacgaaagtaaccagtgcctcttttttatctttggatactaccatataacaatcgtagaaatgattttcccggtaagaagcgatacggtaataatccccctcccttaccagatcgttatacttgtgatacatagctgtctgctgtggaatctgttcctgctcttcctttgcaatctttgtgatatccagctcataaccaaaggttcctgccagggcaacttcccctcttgtcttaaatggggtatttctgcccacggtatggttcgggcagtccgaaacatgtgctcccattgcggacagtggataaatcagtgccgtaccttcctgaatgccaagcctctcgattgcatccgtatcatccgagcaccagatctgtgggctgtaataaagcatacccggatcaaaacgtgctccaccaccggaacagttctccagcaggagatccgggaaatcctgtgtcagacgttcctgcatctcatagacaccgagcacgtagcgatggcttaactcgccctgacggtctgctggaagtgccagacttcccagatccgtaagctgacggttcatgtcccacttgacatattcgatatttgcactgtttaaaatcgcacggatcttctcatagatacagtcgcgcacatcttttctgctgaaatccaggacatactgatttcttgaaagcgttcctgtacgtcccttgacagcgatcgcccagtccggatgctctttgtacaattcggaatccggagaaatcatttccggctccatccagatgccgaatttcagaccaagcttatttacttcatccacaagatatttcagtccgcccggcagtttcttttcattgacaaaccagtctccaagactcgtactatcatcgttgcggtgtccaaaccagccatcatccataaccaacatctcaataccgtactgggatgcaagttttgcaatgtcgagaagtttttgcgtattaaaatcaaaataagtggcttcccagttgttaatcagaatcgggcgcttctggttgcggtatttgctgcggatcagatgctggcgatagaaatcatggaaatttctcgtcatttttccaagtccctctgcggagaaggtaagtgccacttccggtgtataaaaggcttcttcgctttccagtttccaggaaaaatctgccggatgaattcccatcaccgcgcggatactgtcaaactggctcttttccagctgcgcaataaaattgccggaataaataaaatgcatggcatatacttcgccggcggtctgtgtactggatgatttcatccatgccataaacgggtgctcctgatgggaagactccccgcggatacttcccacgctggtctttccataaccaatcggacgacgatccatctggcgctctctcccccaggaaccgtgaagtgtcagcatctcgtattcatcgtcatccatatcaaggcatgcggagtatgctttcgtaagataaacagcctctttgctgtgattacagatacgcacgcttcttgtaatcatatcattttcttcaaacacggtataatacagatccacatccagctgtaacacttcatccctgcagtgaagaatcagtgtctgtgcggtattctcccggtcaaaagcagacggcagtcccggaagttctggtttctgatctgtaatttcataagagacataggtcggcataaccgcatgctgtccagcctgtgtgcgcacagcaatgctgctttcccgataatctcccactccgtttccggaatactccgatggaaatgtatcataaaaagagcagcgctctctttcattctccgatggaacaaacggtgcctctccggtacgaagcagatagcgcagatcctgcctgcgcacacgcctgccataatatacatgacctacaaaggtccggtggtctgcaagacctatgatatagctggtattggccgtctccagacaaaacagatccagattttcatcaaatacaatactcatgttactcctccagtattttttcttctataaacttcacggccaggtctttgttttttaaaccatctgccaggcctaccacacaggtatccggataccagccggtttccttcacccaggcatttttttctaactttatgccaatcggatattttttccctgtttcggtactttttacatacaccagatcgtccttatatttttccagcaattcttctggcaaatattcccggatgtctgccagatagtcaaactctcccagtgaataaaagaaatcataatccgcaaaaaagacatctaccgactgtgtcataaaacggctttggatcatctgaatgctctctgcagatgccccgtcattttcattggtcgaagccccaaaattactgctgaccagcacttcatttttttcggggtctaccccattattttccaaaaaatctttgtaatagtccgagttatccaccggattactggctgattgctgtgcattcacagccataatttcaagtgctgtgtttttttgcgtaaagtagtggatgaccagaaaactgagcgtccctatgatggcaagtgcaaccatcgcctgtaatccataataatgaaccagataccacactttgtcttttccatgcagttcctttaacttctctttttccgttttgggttcttctttttgataaaggacactgtccaccccggcttttgagaaatccggtcttatatttttctgatcatccataaattttattctcctgcgtatgcaagcatcgcggtgcgcagctcatccagtttcttttccgaatctttgatatctgctccgacaacaccaaaatagaatttgatctttggttctgttccggatggacgtacacagcaccatgcattgtcacttaactcatagtaaagtacgttgctctccggcagacctgtcggtgtcactttgccgcttgcgatttctgttcttgtatctttcttgtaatcccgaagtgccagaacatcccatgcaccgatctttttcggcggattgctgcgcatctcgttcatcatgctctgaatcttttctgctccatccataccctttaaggtcatagtctcaaggccttctttgtaataaccgtaagtctcatacagggaaaccatggcatcccagagggtgattccgttggatttgcaccatgctgccacttcgcagagcatcatgactgccacacaggcatccttatctcttgcataagtacctgccagacatccgtagctttcttccagtccaaagacgtactcataactgttctgctgctcaaaaaatttgatctgctcaccgatatacttaaatccggtcagtacctcgatcagttttactccgtaagcttttgcgattgcctttgccatgtcggtggttacgatagtctcaaccagtgcaccgtttgccgggagtgttccggttgcttttctctcacgcagaatgtactctgcaatcagcataccggacatatttccagtgaaacttacatactctcctgtcttggtatcctttgcataaacacccagacgatcggcatccggatcggttgccagaacgatatccgcatctacttcttttgccagtttcagcgcaagctcaaatgcctttggcgactctggattcggataggaaacggtcgggaaatttccatccggaagttcctgctcttttactacatagacattttcaaatcccagttcttttaatacacggcgtaccgggagatttcctgttccatgtaacggagtgtaaacgatcttgatatcttttgccatcgctttgatgatttccgggtggatcgactgttttttcagttcttccatatagcggtcatccatttcttttccgatggtatgataaagtcctgcagcttcggcctcagatttcatcatagtctttacctgtgaaaaatcagtgacttttgccacttctgcaagaatatttttatcgtgtggcggtgtgatctgtgcaccatcctcccagtatactttgtatccgttatactcgcgtggattatggcttgccgtaattacaatacctgcaatacatccaagttcccgaacagaaaaggacagctccggtgtcggacgcagggattcaaaacggtaggttttgataccatttgcattcaggcagagcgctgcctcatcggaaaactccggggacatgatacgggaatcataagcgatcgcaactcccttgtcctgtccgttctgcgaaatgatatagtttgccagtccctgggttgcctgacgaaccgtataaatattcatacggtttgttcctgcgccgattaccccgcgcagaccaccagtaccaaactccagctgacggtaaaaacgatcctcgatctctgcatcatttccttgtagtgccagcagttcttttttggtatcctcatcaaaataattgtctgtgcaccatttcttgtatgtatccatataactcatttcggatcccccttctattctgctttttatttaagtataccataatttaagtttgtgtaaatatatttttaatcggaatttaagctaaatttttattccaaaacttgtgaatatttccgataaatcacttcgagtgcttcttttccatacacttcataatcgtttcttttgactggttttgtgccgtctccatgccatgcagcccattcccagatgccaaatccgcctacccagtctctcttttcgcaggcatcaaacatcgcctgaaaccagtctgcctgtcctttttcatcatagtccccacgcacgccccagtcattcggcacctgattggaacctttcacagacatacagccggcttccgcaaagaaaaacggcttgtcaaacttctttaccacctgttcaatacgatccagctgattgtcccaatcgtcaatcggataatacccgctggatgaaatcacatctaccgcatcccaccatttcacattgtgttcctggtacttatccgtattgtaggaaaccagtccatcatacttccggcggattgccgcaatcacttcccgccattccgcatcgcggcgctcggtctgcaccatctcgcagcctgcaataaacagatccactccgcactgctgcgcaagtccggcatagtgttcctgaaatgcccggtaagaggcaaaccaattgccccacttcggttcacacacgacatcttcatcaaaaaaattgatatgtgcccgccaggttccatccgcgcagtttgcggtcggtttcaaggcaacgttaagccccagttctttggcatagccgatcatggcgatcagttcttcatcggtcacattccggtctgtccgataatcaatctcctcggaaaatgcggtcttttgcataccgttcggtgcaaaaatgacataatttgcccccgtcttttctttcatgagctttaagctctgtctggtttcttctttttcaaatgtacctcttgcgcaaaatggtgcaaaggtgactgcattgattctctccatgttttcctccattgtgttttccagaaatttacttcaatatagcatatttttttcgggaggggaattggttttggcctatgttttcttaaataatgcgacggaagaagggagtcattctctttttcctgtgtgtt

SEQ ID NO: 1054 - DNA, 19691 bp, Unknown
  gut microbiota DNA sequence
ataaggatcacaaatccatttgcttctgttttggcacgtggtataataaatttgcttacacataacagaaagttacggagaatataggatgatgaatatagatgaaaaaaagaaactggcactggaagtgattgcgcgactgaagcaggcatacccggatgcggcctgcagcttagattacaatgaggcctggaagctgctcgtcagtgtgcggctggcggcacagtgtacggatgcccgcgtgaatatgatcgtacccaaactatatgaaaaattcccggatgtcaatgctttagcagatgctcctgtggaagaaatcgaagaaattgtgcgtccctgtggactgggaaaaagcaaggcaagggatatcagtgcctgcatgcggatgctgcgggatgtgtatggtggaaatgttccaaacgattttaatgccctgttaaagctgccgggtgtcgggcgtaaaagtgccaacctgattatgggagatgtctttggaaaaccggccatcgtgacggacacgcactgcatccgtctgtgtaaccggattggtctggtcgaccatatcaaagagccaaaaaaggtggaaatggaattgtggaaaatcattccgccggaagaagggaatgatttatgtcaccgctttgtgctgcacggacgtgacatctgcagcgcacgcacgactccgcactgtgagcactgctgcctgcaggatatctgtgcacagcgcatataatccacatctgtgcatgtttccctgttatgattacacagaaggcaatgtttcttctgatatcagcctttgcatatccggtggcagcggagccgtaaactccatcggctcccctgtcatgggatggaaaaatgaaagtttccaggcatgcagtgcctgacggccaatatcatattgccctctctcacaggaaaaagtctttccgcaggaaaaatgtctctccccggaattttcatcgtcccgacggtcaatctgattttccccgtatgccggattataaagaaaatctcccaccagcggatgtcccagatatgccatatgcacgcggatctggtgggttctcccggtctccagctgaagtttcaccagacttcggaacttctgtgcatttccggtctgccatccggtcagaacccggtaatgcgtcaccgcccggtctccccgcttaaaatccaccacgcgtcgcagacagcgatcctcttttcttgcaatcggggcatccatgacaccagaaaccggcataacctttccctccacaatcgcaagatacgtccggtgaatcccgggtgcttttagtccctgctcggcttttgcccgcaccatctgcccgaggatcgccgcagaaaccgcatgttttgccacaatggtaagcccggaggtatcccggtccagccggttgatacagcggaacacaaagggaacgccctgctctttaaaataccatgccagtgcattaccgagagaattctccggatttccacgggatggatgaaccggcattcctgccggtttgttgatcacaagcagatcctcatcctcataaacgatgacaaacggcagttttaccggacggatctgtccggaattatccgtttcccgaatccatacggtcagaacatctccttctgcaagcatgtggttcatatgtacatacgttccgttcaggcagattgcctgttcatctttgcgcaaatccacaagattctgccgggaataccctttttcttttaaaaatccactgattttctgtggtttctccagaccgttaatctgatatgatatgcttctgtccataatggtcatcattgatctctttcccaggtaaatgtccccctgtatgtaagattctccggtctggaatctttgatacgttctgacggatacactgtctccgctaccacaaaccagccaatcaccgcaatcatcagaagataaaataaaagtacttcctttttattccccatatactttttcatctttcagtttctcaccctgtcctttatactttatattttgcattcatatgttttcttttaattattccataactataccggaaatgcaagcaccacgttcctgttcactcagcactgcgccatatcacgcaaaaaagggattaccacccatttcgtggtaatcccctggaaagaaaactcagattgttccggttacggtaagtgtgcctgcgcccggtgtcactgtccactcgccggttgtggcatcctgcgtaaaggttgctgccggtacggtaatctgcccttcctgcgtcgcaaaagtaccggtcgtggcattgtaggaataatttgccggatccgaccatgccgttccattatacgataccgcaagattcgaaagtaccggatcgaatgtatctgtcaccactgcgccggttgccgccagtgccgcagtatttccagtattctggataaggaacgtataggtcagtgttccattttccgtaaccggaaccggactgacggatttggtgattgtcagcttcggaccactttccgcgatgacggtttcctttgcggtaaccggtgtaattccccctccggaaacggtcaccgtgttggtaatctccgattctgccaaaagaggtgcaaacgcattggtttctgcctcatatacaatggtcacgtttccccccgccggtacgctgatcccggaaacggaaaggggtggtcctgccgtgactgccggtgttgtctgtaagattccattgctgtaataacgcacggtatctgccacatacgtcagtggcaccagtgtgtctgtgccaaatgcatatgcccccagatcatctgcaaccgtcagtcctgtcatggctgtatttccggaattcactatgctcacaacataggtgacacggtcattctgcccgtatgttttgcgtaccgcagttttggttgcggcaagtacctcaaggatttctcccactgcaacgttggaattggctacagcgtttccatagcggagctgtgcctgattggtaaatattgccatttttttgcatcctttcattttattcaggtatgctttatcatatgacagaaattttccatatgtacagccgcgccgtcattattctttcaaatatatttccggtcttctgtcccggaacagcccccagcttcttctttcttcttctatttcatccagatcaaacgtatgcaggataaagccttctgataccctgtccatctcttctgtcacttcccctgttgcgtctgtgataaaagaggaaccgtaaaacgtgagggctgagctctgctgtccattttccgcgcacggttccacggtttctgtcccgatcctgtttgcagcaatgaccggcataagattacatgccgcatgccccatcatgcaccgtctccaatgcggcatgctgtcgcagccaagtatcggctcgcttccgattgcagttggatagaaaaggagttccgccccttttagtgccatgcctcttgcagtctccggaaaccactgatcccagcagattccaacaccaatcgtcccatatctggttttaaatgcccgaaaccctgtatcaccgggcgtaaaataaaatttttcctgataataatggtcgtccggaatatgtgttttcctgtaaatgccgcgcacacttccatcggcatcaatgactgccacggaattgaacatctgtctgtgatccccggcttcataaaagctcaccggaatcaccgtttccagctcttttgccagttttttcatatggatgacagcatcatcttcctccagcgttcttgcatatccataatattcataccttctctcctgacagaaatacggtctttcgaaaagttcaggaggaagaatgacctgcgccccctgtgcagcggcctccctgatcagttccgatgctttttctatattttcttttacatcgctgccgcagcccatctgtatggcagccactgtggtttttctcatatcatgctcctcccatcctcccggaatcagccggtatctgctgtgtaatacaatgaatgttcccaccaccgacaataatatcacgtgcgtaaaccgggtatactttccttccgggaaaaagcccccctatgatgttcacagcctctgcatccatctcatcaccaaactggggaatcagtactcctccatttgtaatataaaaattaacataacttgctgcaagccgctcccctgcttttcgctgctcctccccctcttcaaaggaaaaaccggcaagttcatattccgttatacaaaccggcttccccggaaccgggactttgtggactatgagcttccgccccctggcatctgtctctttttccaatattgcaagatctgcagatgacaagggatactgcggatctttgggatcctccgtccacgcaagcaccacatgtccgggagcggtaaatgcacagacattgtctatgtgtccgtttgtctcatcgttgtagattccatatggaatccagatgattttttctgccccaagataatcctttaacttctgtccgatcttttcttttgaaagttccggattcctgcctttgctgagcagacagctttctgtcacaaggatggttccctctccatcggtatggattgccccgccttctaacacaaacggatgcgcatcatacagatcatatcctgtcttccggcaaaaagaggacgctactttatcatccttttcccagtctgcatacaatccgtcacagattccaccccatgcattaaaacaccagtcaattccccgtacctgcccctgcccattgacaacaaaggtcggtccgacatccctcgcccatgcatcatccgatgcaatttccatataatggaccggataatttttctgatagtttttttctttccggacagcttcaatgatcatttgtgcatgatccagctcccctgcttccaccagcagatataccgtctcggattccgcagtggcacatatgacatccgcaaaagcctctcttgccttttttgcaccatatatccaggaacccggccgtttcggccatataagtattgtccctttatgcggttcatactccgctggcatatgaaatccatcctggctaggacagccttcctttaaaatcttcatatccaaatctcctgattaccctgcattctttatccgcccccataaccgcgatatccggaagcggcataccgttaaacgtattatttttgaccatggaataaattgccatgtcacagaatgtaagcctgtcacccacttttatcgctttatcaaatgagtaatcaccgatcacatcacctgccagacaggtacaggaagaaagccggtatgtatatgctttctcccctgcttttccactgtccttaagcggcggacggtacggcatttcgagtacatccggcatatggcatgccgccgaagtgtccagaaccagtatctttatcccattgttttcgacaatatcgagcacggttgtctcaagatagcctgcattcagggctactgcctcccccggttcaagataaatttcaaggtcatatgtttcctgcatgcgccggatacagttctccagtttttccatgtcgtaaccggcttttgtaatatgatgtccgccacccatattaagccatttccgtccgtacagcagatctccaaactttttttccacggcatcaagtgtcgtttcgagggcatccgaattctgttcacagagcgtatggaagtgaaacccatctatctgcgacaggtcaaaaccgttttgtatggctttgtcaagctctgccctcgttataccaagccttgaacctgtaccgcacggatcataaatctcatgcccttcctgtgtagaacactccgggttaattctaagtcctgtacttacccctgcggctgcttctttgattttttccttatgaatcagaaactgggaaacggaattaaaaacaatatggtcacatatttttaccagttcgtccatttcttccggcagatatgccggacagaagacatggttttcttttcccatctcttcctgtgccagacgtgcttcatacagcccgcttgccgtcgtcccacttaaatattttccaatcaggggatattcacaaaatgcgctgaatgctttctgtgcaagaaggatctttgcgcccgttctctgcattacatgatgcaaaatcttcaggttttctgtcagttttccctcatctatcacgtagcagggagttttcagttcattaatcttcatccttccctccggctcaatccatatgaacagaagggtctgctgtcttgtaacaatccacggataccggattttcaactaccttccatggaagaccaaatttattcagtgcctccatatacggatccggatccatctcctcaagattgaataccccaggctttttccagagtcctgtcacaaccatcatggaacctatcattgccggtactcctgttgtataggaaactgcctgtgattccacttctttgtaacattcctgatggtcacatacattataaatataaatagatttcttttttccgtcctttatcccattaaaaatgcatccgatatttgtcttccctactgtccgtggtccaagtgatgccggatctggaagcagttcttttaacacctgtaacggcaccacttcttttccgtctaccataatcggatctgtccggagcattcccacatcctcaaggcatttcatgtgtgtaagataactctgtccaaacgtcatgaaaaaccggattcttttcacacccggaacatttttggcaagggattctatttcctcatggtggagaagatacatatctttttctccgacctggtcaaaattatactgtgcccgccactccatcggctcggtttctacccagtgcccatccgtccagtaggaaccgttagcggatacctcccgaagatttatctccggattaaagtttgtggcaaacggatatccatgatctccgccattacagtcaagtatatcaatggtgtagatttcatcaaaataatgtttctgcgcatatgccgtaaataccgatgtgacaccagggtcaaatccgcttccaagaattgcggtaagtcctgcctccttgaatttttcctgataagcccactgccaggaataatcaaagtaagcggtaaatcccagttttttgcaccgcttctcataaatttccctccactgtggatcttgcgtatcctcgcactcgtagtttgcggtatcaatatagtcaactccacaggcaagacatgcatccataatcgtaagatcctgataagggagtgccacattgagcactgcatccggccggtacgaacggatcagtgtttttaattcttccacgttgtccgcgtcaactcttgccgtctcaattctggaagctgttttcccttcaagttttgcctttaaatcgtcacattttgacagggtacggcttgcaatcatgatgtccgtgaaaacttcactgttctgacagcattttctgattgccacctgtgcaacaccgccacatccaataataagtaatctgctcatttttattcctcctgtatcatttattttaccgggtttcttcctcttcgagtaagtcctctacatattttggaagcataaatgccccccggtgtaaatttgtagtatagtaccatgttttcattccaagtgcatcccatctttctgcatcaagatcattcagcggatgatactttttagaagcgaatccgaataaccagtatccggaaggacaggtcgggatatgtgcctggtatacccggctgatcgggaatgacttgtagacttttctgtgcattttccggcattcagcctcatcctcgtcataaaacgggcttccatgctgatacaccatgattccgtcctcccggagagctttataacagcttccgtaaaattcttttgtaaaaagaccttccgtatgccccaatggatctgttgaatcgttgatgatcagatcgtattcatcatttttcccacgcaggaatctaagcccatcatcatagtacattgaaattctgggatcctctaacccacatgccacctccgggaaaaattttctgcatacatccacaaacattttatcggtttctaccacgtcaatcttttcaacaaacgggtattttatgagttctttcgccacacccccatccccgccaccgataatcagaattttctttgcattgggatggactgccatcggcacatgggtcaccatttcatcatatataaattcatctgcatcggaaaaaacaatttcaccatccaatgccgccatttttccaaattcataggatttaaatacatctatcttctgatattcacttttccccgaaaaaagctgctcctctatccggacatccagttttacattaactgtatgatattccgaaaaccacatttgcatatctttacctcctgttgccactcatgccagtacctgaagatattccactgccggatcttcggttccctgcatggagcatcctttttcttttgcatacagaatatattccgcaatctcttttgtaatccgttctcccggggcaaggatcggaattcccggtgggtagcacatgacaaactctccactgatgcatcccacggaatcttttatgcttagcgattttttttctgcataaaaagctttctgcggagataccgccacctccggattgatatattccccggacaaaagccctgtcctgtccctgctgtataacctcttgatatcctgcaatgcccctacgagtctctcaatatcctgaattctgtcaccaatggaaatatacgcaaggatattacagatatcaccgaattcgatctgtatgtcatattcatcccggagcaggtcatatacttctattccggcaagcccgatatccagtgtataaacggacagcttggtgacatcgtaatcgtatatgctggttccatttaccagatcacgcccataggcatagtaaccgccaatagaattgatttcatttctggcatattctgccatttttgcaactctggcaaaagattctcttccccgcaacgcaagatttcttcttgaaatatcaagactcgataaaaggagatacgatgcactggttgtctgtgtcagattgataatctgcctgacatgatctgcttttaccgctttcccggtaagaaggatggagctttgtgtaaggcttcccccggatttgtgcatggagatggcagacatgtctgcgcctgctgccataccacataccggaaggttttccccaaaatacagatgcgtcccatgtgcttcatctgtaagcaccttgattcctctggaatgagcaagttttacgattgcccggagatctgaacatatcccgtaatacgtcggattgtttaccagaaccgcttttgcatccgggttgtcctcaatcgccctggcaacctggtctatttccattccgagagaaatcccaagtttcgcattcatctccggattcacataaaccggaactgccccacaaagcaccagtgcattaagtgcacttttatggacatttctcggtaatataattttatcgcccgccttacaggttgacaatatcattgcctgcactgccgatgtcgttcccccaaccatgaggaatgcattttctgcgccaaatgcatctgccgtcagttcttctgcttcgcggataacagaaaccggatggcacaaattatccagtggtttcatggaatttacgtccagttccacgcacttttgtccaagcagctgtaccagttccgggtttcccctgcctcttttgtgcccaggcacgtcaaatggaaccactcttctttttttaaattcctcaagtgcctcataaattggagctttctgctgtctattaatatccatttactactcctaactccttactgaaaaataacaggagcctccaagtcattttaactcaaaggctctttttcttacataactttatgcaagtgcaggttcttttcctgcaataatcgctttcacttcatttttcaattctgtattcactggtctttctcctttttgtaacagatatcgtcatccccaaaaaggcatctgaccacgcctatattataacttacccatttcttttatacaatcaattttttgcattatctgcaccataagctgtaaagaactgagtacatccgccgcctttcttccaaatcggccgaatctgctccgcaactggaaaaaagaattcctcgacaatgcttctgctgtatttgatgacaagcgtgaggattcctgatccgttgtatcaacggtcgctccaattctattctgaataccttcaaggacattgtatcacagattgtttgtttcgaaaattattctcctctgaaaatgggcagaagaaaacctccaaatctttggaagacttggaggcttgattccgaccacttacttttatcatctataatttgaaaaatgatagatattttttttttgcaatatattgcgccaattcataatatccttcaaaatacgaagaacatatactgtctgattctcgtcgcttatgatataaaacaataaatatgactgatatatctttttatgtattatatatcctctatattttatccctgaatcagcaaattttaaagggaagtcacccatgttattgacttccctatttaaattcgtatataacttatttgcagcatctggattacataaatcaacctgaatatacttaaccaaattgaatacatcatccgttgcttcatctgtgattagtactctataattcatttttcatcctatctctgataatctgaaatgcatcatcaacggtatgaagccgccctgcttccatatcatcaattcctctatcgagataagaaaataatgtttccattgctgttctatcttctacaacattcatatcctttactacagcttccatgtaaaacatctcctttcctttaacctcaactctattataaccatctttcatgtaaaagtataggtcattcgtaaaatatttttctgtcctaaaatggaatttaaaatttcattttaggtaaggatattgttattattccttacgaattctttcaactacactttcctgactcacctttttaaactgatactttggaatcgcatatgcaattccacttaatatcggaaccataagcaggcacggcacgattgtaagatgcagttgaaagaaaaatgccgtaccaagcgtatttattaaaatctgctttgctccaaccacaactaacaatactgcaatcataaatgcgcctcccaaatataggaatccctcagccactagcattttcgatatctgttttttcgtcattccaacaacttccaaaagtgccagttctttttttctgctaattacagaagttgctgttgtattaaagaaattcataatgccaataaaggctaaaataacgacaagaaaactaccgatcatataatatttactgacaaaccgcctaaagctcgccttcatatccaatacagaaaaaacattgatcatatcattttctttcaaaacatttttatcaatgtattcttttacttgcttatcctctcccttcttggcatcaatagcagcatacattgctgattgattttctgtctgggtgatatactcttcttctgggaccattactgtaatataaacagaatctgcatacggataatccagggaatatggcatcatagcttctccgatcaccccataatctttctgctttccgtttccgtactccattttaaaagtttcgccagactgataataagaaactggttgttctgtatatttattactatagtccacaatcacatactccccacttttaaacgtattccaggaacatttttcccctttccattctaacatatcaaacaccgcttcactaattccgaggaaatgaacctttaccgtattatccgcttttgtttcctcccagatttgcttttcataatctgtccagttttctttgtttttttctgccaatgtctcccacgttttcaaaagtgccggttccatcttatgtctttcttccgaataatacacatatcctgttttctcactttgcggacacttattcagaatctctttgatttcaggtgtaataccgttgaaattcgtatttgacaaacttcccgtcatctgatccagttgaaaatcggaagctaaaaacacttttcggaaagaatcaaaatcatatccctgcaccaacatcacgatacagttgacaaccaccatagaaagagcgatagaaagcataacaatcaatccctttttccaatttcgtaacacattttgaactgccatcccccaccaggttacagaagtattcttttttattttcctatgtgactgctctccttctgccaaacgcagagcttccacaggcgaaactctttccaccattttacaagcctgcagactggagagatacaccgttaaaagcgttaaaagtatcgctgcaaggaaaatcaaaggattggctgatactactgtctgagctgtttttcctgcctgtgcactaatttcagcatctgcagtcaaggacggagccatacaaagacctgcaagataaccacaaagcaatccgattggaatgccaatagctgataatctccacgcctgcatacgtacaattttcttcaactgctttcccgttgtccccacattctttaacaatccgtaagcccggatatccgttttcacagaaatgttaaaaatattataaataatcaggtatccagctaatatgacaaatagaatcatgataattaaagaagaaaatgaaaatgaatcctcttcaaagagattatatgccggattgacttccattcctgtcccagctttcgtaaatcccgctgctctagatatcttttccgttttcttttccagattccaaaggttcttgtaccagacagaatactctttccctccattgtagatgccattttctaattcttcctgcgtaacgggataacgattctcctttgcataggcttcggatacccagaccatctgacctaaaacagctttatccccctgccagaatccacatatctgaaacgtatctgtcttatattgtttcagcatgggatttacttcccaggtcagcgttacttcttccccaatctttggtgtaacacccagagattccaatatcgtgctgctaagtgctacttcattttctttctccggcagtcttcctgtagttggcagacaattaaaactttctgccatattttcatctgcatatcggacctctacggaaaatccaaaccgttcgtccattccagctcccagaaaaataccggaaccatatcgttccacatcttcatcctgttctattgttttttgcaatctctccgcatcttcttctgacaaattctgcgcaatagcatgggatgaatccataaattgcttaatttccgttgctcttttggaaagtatcatggatacactccccacaaagaggcttgtaaataacagtgatgtcaacatgattgcaataacagcaataatatttcttgctcggttcattttcataaaacgtttcgtcaataatcgtaacgtttctttattctctacttttaccatataatcgccctcactataccaaaccactgtctgaaacaatttttccgtcttctatctgtaaaatccggtctgccatctgggcaatctcttcattatgggtaatcataacgatggtctggtgaaaacgcttactggttactttcagaagccctaatacatcctgacttgttttcgaatccaaatttccagtcggctcgtcagcgagcaaaatggctggttttgcagctaaagcccttgcaattgccactctctgttgctgtccaccggatagagcgcttggcaggttttccaattttgtccgaatacccagtgtatcaataatttcatctacataacctttttctaccttttttccatccagtttcacaggaagaacaatattttcccatacattcaacatcggaaccaagttatactgttgaaatacaaatccaatatttctacgcctaaaaatagtaagcttttcatctgtcatatggcttaaattctgtccgtcaacaatgacctgaccggatgttggattatctaatcctccaatcatatgaagcatcgtagactttccgctcccagaagttccaacaatcgctacaaactcccccttttccacttctaaatttacaccatcaagggctttgacttctgtttctccttgtccatatatttttcttaaattcactgcttttaatatattcatgccatcctcccatcaaaaaagcctgtattgatctttacaatacagactttatcataacaatgtctccatcttgtttctgaaatatcaccgttttgatactattccttttttgatatcgggagaaacacagaaaaggtagagcccttttctctctctgatgtcacttttatataccccttttgtgcctgaatgatctctcttgcaaggaataagccaattcctactcctggctggtctgccactgacagactccgataaaaccgtccaaatatctttggtatttcttctttttctattccaatgccatcatcaatgatatcaatctttacaaagaaagaattctgctcggcttttacctgaacatttcccccacatgctgtgtatttaatcgcattatctacaatatttccgagtgcctccacggtccattttggatcacatcgaacatgcaaatccgtgtcacataggctcagagtaatattcttctcccttacttttacgttaaactgctgctgtacggatgcaaacatctgtgcaatagtagtatcctccgaatgtactgcgataattccactctccatccgtgacaatttgaccaatgattgtatcaggaaatctaatttctctgtctgctccaaaatggtagctatctcctcctgattttcatgatttgtttcagagagtatttcaccataaattttcaaatttgaaataggagtcaaggtctgatgcgcaatgtcggaaataagtttctgtatcacttctttttgttcctgttggttctttcttgccagaaagctactgtctaaatgttgtttcatgctgttttcaagagcagaatacttttcttctgatatttctgtccgttccagttctccatctatagcacaatccagcatttgctgcagccggttcaaaagctttttttctttctgataaaaaatgctatgccaaaagattccacttaaaacaaatattcctacaatcaatataattagttctatcatccattcaccgcccaggtataaccaattccatagactgtcttgatatattcaggcttctgcgtatcatcttctaatttgtccctgaggcgtttgactgcaacagtcagagcatgagcatccacaaactctgtatctccctgccatacctcgtcaatcagatattcccgtttcaatacttttcctctgttttcacacagcactctaaggagcttttgatctgtcttactaagttcaataggttctccatctttgaaaaattccattttatcgaaatagaactcaaatccatcaagctccatagaatttttagctgctgcctctttatttctaagctgcacagacactcttgcacgcaaaaccatcaagctaaacggtttcgtaatataatcatttgccccagcttccaatcctgttacaatatctacttccatgttatttactgtaagcaaaataatcgacacctgactgtttttccttatttctcttacaaaatcaatcccattcccatccggcaagttcacatctaataaaaccaatgtgatatcttcctttttcaagatttctctagcttcctgcaaagttctgcactgataaaagaaataagcatcattctttaaagccagacggattccatcatttaattttttgtcatcttcaacaatcagtaacttttcactcatattttctctgctttcttacaaattacactaattgtatcattgccagttttataaatcaaatcattaagtcaaaagctccgacagaatttatcttataaacagcaaaaagctcccgaaggagctttccacgctttcaatatacactaattctttcatcacaatctcttctgcagcattccatatttgtttttcctctgcttcactatacaataccgttgtaaaaaccaatgtccaaagtaggaaaaatttgagtaaattccgacacttattttatgcagttctatctttatgagatttcatcaacatcataatacttaaaatcccggaagcaggcacttcctcctgtttcctctgccgcatagcagaacagaccaaaccggcaaccagtaaaatgatccagtttgaagtacagcttatgcacggttccgatgggtagccagtctcccttatttacccggtaatagcagcgtgcttcatccttcatgttacagaaatctgcttcaagacgaaaatccatctggtgtgattcaacaacagttccttccgtcatatccaatataccatcttcttttttatccagcataaggacttcatattttccatgacgttttgtaatgccaactgcagcataacagccctgcaacgcacacaaacctgcgacatcgccctctttcaatgcagaagcatcaacagtaacctcagctgcgcaggacggataactcatcctttgcgtaagcgtatttactgcctgtgtaagctctgtacaaacttcccgtgttgtaattgtataggttccctgcaatgcatccagatgatagtaccgtggatctggatcatgattaaactgccagcgcggaagcagcccattacggaaatcatcacttcccactaatggctgataaatatatcctggtctggtactgtgaacctctatttcttccggcacatgtccgttctgtccaaaaaacggaaaatgatccttccaggtaaccggaagcagaataggaatccgtccaactgctccggaatcctgaaacagcattgcataccactttccatccggcgtatccactattcctccctgtgccacgccctgtccacaatatccacgatcatcacaaagtacatctccacccgtgaattctccttccagagaatcactgtaaaagcatgcttccgtccgcatccagcggtctctcagggaatgaaccagaaaaatataataatagccgtttattttttgaatatgagaaccctcatagcctagctccgggttcttatgatcactgactaaaagacgatgtaatccgtccttctttggtgcagtcaaatcttcattcaattctgtaatccagatttcatcatttccatatacaatatagcttctgccatcctcatcaaataataaagagccgtcatgataaaagccttctatcagctgctttttccatggaccatctattttttccgaagtatacaaataagtcttacgggtatcatttgccacaaagcagatataaaatcggccttcatgatagcgcagggaagctgcccacatgccctgtccgtaaatattctgaccgcttttcagttgctgcgcatccgtatgatccaacgtctcatagacataagtcacatgctcccagtgcaccagatcaaaagactgcagaatctcacagcccggcataaagtgcatggttgttgataccatataataggtgtcttctacgcggatcacgtccagatctggataatccaatcttgttataggatttacattcattgtttattcctttctgttttatctccatattctttctttgttctattctatttttactattttatctttgtttcttatctatacattaacagtagtatgctttttagttgtacgtaaaatgatatgccctagcaccatgactctttaatgacacactaaggctctttggctcttccacgtgctctccgctccaaagctccgttccatttactccatcataaatctccagatcggcaagcggtatggatatgtcactgtctttatcacccagattaaataccgcgacataatatccaccctttgtatctgctgcaatccacaatgcatgctctataccatcgatttcacgtctccacacctgatgcgaatgccgtgcatttacatgcatggcaagtatttcagaattggttaccagattcatagtgaattcgtcaaaccctgtcagctctcctcccagcatcaaaggagaacgcatgatactccagagtgtcagcatggtgatctgctcatcctgtgtgaaattcgtccagttattcacatcatatacctgccgtatcggtccgaccggaagcatatcggcatccggccagtgccctgcacctgcatgggtgcaccatttttctgctcttgaaaacatatcatataacagttcccacttatcccagaaatcatcggtgattctccacatattggaaatctgcttataaagctctgccttttctaaaagagcaggtcccggcgacagacttaaaaccatggggcttccgcaaccatgcaatgctttgctcagcataatcagttcggattcctcatgtggcagttcccgtgcaatatcatcacatttaataaaatccacaccccaggaagcatataattcaaaaatactgttatagtattcccgtgccccgtctttctcaggatctacaccatacatatccgtattccaggcacagatactgtttgttttggcaatttcccgggcatgtctgtcactgttcatgattttcgtgttctgatgtacagcctgtcgtggaatccctctcataatatgaatgccgaacttcaatccaagagaatggacatattctgccaatggtccaaagcccgcaccgtttgctgcggaaggaaaacgatttactgcgggaagcagtcttccatactcatccattactacatccgcaaaaggatgatactcattggttgcagcataaggctcataccattggatatccaccacaatatattcccaaccgtactccttcagatgctcagccataaattcagcgttccgtcgtacgatatcttctgtaacagccgctccataacaatcccagctgttccaccccataggtgctgttttcatcttcatctgttttataccctctcgatatcctgttaattctgtccgtaatatgcatttgcaccatgcttgcggaaataatgcttatcctgtaattcctgcggggcaggtgctacctgcggatgaatcagctcggttcgatatgccatcttggcaacctcttcaagaaccaccgcattgtggatggcctcctttgcatccttgccccaggaaaaaggatcatgattcttgcacaacactgcaggaactgccattacatccttcttcatgcgtttaaattccgaaacaatcaggtgtccggtattttcttcgtaagcagagttaatctcttccttcgtcagacatctcacacaggggatttctccgtagaaataatccgcatgagtcgtaccataacagggaattgggtctatgtcaatacttttgacaccaaaagttgaacttttctcccagcataacatatgccgagagaattatttcttaggctgctagagccatggttgtcgagacacgggtgtataaatat

SEQ ID NO: 1055 - DNA, 3885 bp, Unknown
  gut microbiota DNA sequence
cggcaggttgcgcacgtattacacaattgcttgagattggcgtgtgttgttgtatccagatgcaggatcagcgttgctgtcttaagcggccggagcatctgcccctcggtaagctggatgccatccggggcaagccgcccataaatctgtgggagcaggtcaagggaataggtatctcccagaaaagataattctgcaagatacaggcggctctgacgttctaccacatgtgcaaactcttcataagcctttgacaaaagcatcaggctgatgcagtccacaatgtaagcctcctggatctgttcatggttcagatataattccgacagttcatccactccgtttccaagcgtcacaaacccataggcatagtgaggcagagaaaccccgtctaaatcctgatccagagagtaatacgcataggattcaaccaggggaagaagtgccgtataaattgcctgaatatggggcaggtcatccggagggaaatggaaacggctgcaaaattcgttccagtcaccggaggataatccgggagtaagtttacatttcatgggatacatcctccttatcggaagctgccataacggctgcaatttcctgaaagcggtccgtgaccttatcatagttctttcggtgatggggaaagccacagtttatgcaggatttgataccattttttaaatattcacagtttccaccacaggatttcccgagtgtatagaggggacaataacaaaacaggcagttaaagtccgcctccggaattcctttatggcatggaaaatattcacattttttattttgaaaaaacttataatattcgctcaaaatggtttcctccaatcaaagcacaatcatagcataattatatcggaacaacaagcggatcgcaagaaatgcgaatgacataaaaattgtatttcagtgggaaatgataccttttgccccttttatcattacattatttacatctttttaagagcgcaggtatagtggctcaggcaattgagggtttgaagcaaaaagttgaaaattaaataaaaaatacttgacttaaagttaactttaagtggtatattatgatagataaaatcggaaggagaatttattatatgtatatcgaaaagattaacggaccagaagatgtgaagaaattaaatatagaagagatgacagctctcgcagaagaaatgcgtcatgcattattaaagagggcaagtattcacggcgggcattttggcccgaattttggcatggtagaggcaatcattgcactgcattatgtttttgagtccccaaaggacaaaatggtatttgatgtttcccatcagacctatccgcacaagatgctgaccggtcgaaaagatgcctatttatatgaagaacattacgacgacgtgacgggatacagctgtccgcaggaaagtgaacatgaccattttacggtcggacatacctctacatccgtcagtctggcatgcggtctggcaaaggcaagggatcttcgtggggaaagtgcaaatgtgatcgcaattatcggagacggttctttaagcggaggagaagccttagaaggaatggattttgcggcagaattagacagcaacatgatcattgtagtaaatgacaatgatatgtcaattgcagaaaaccatggaggactttattcaaatctgaaattactccgcgagacaaacggacaggcagagtgcaatttatttaaagccatgggacttgattatgtctatgtggatcatggaaatgacttaagggaactgatcggggctttcaaacaggtaaaagacagtaagaaaccggttgttgtccacattaatacattaaagggaaaaggttataaaccggcagaagagcataaggaagaatggcactggcatcttccatttgatattgagaccggaaaatcccattttccggaagtggaagattattcttcggtgacctgtgaatatctgattgaaaagatgaaaaaggatccgacagttgttacaattacatccggaaccccgacgattctcggatttacgcaggagaaaaggaaacaggccggccggcagtttgtagatgtgggaatcgcggaggagacagcggtagcacttgcttccggaattgccaaaggtggcggaaagccggtatacggtgtgtattccagctttatccagaggacgtatgaccagatttcacaggatctgtgtattgacgggaatccggcaacgattgttgtgtatacgggatcggtatttggcatgacggatgttacccatctgggactgcaggatattccgatgctttctaatattccgggactggtttatctggcaccgacaacaaaggaagaatatctgtcaatgcttgactggagtgtggagcagaaggaaatgccggttgcgatcaaacttccgggcggagacatgatttcggatggcagagaagtcacaaaagactggagccagctcaacacctatgaggtaacggaaaagggaagcaaaattgcactgatcggactcggaacattttattccctggcactgcagaccgcagaaatgctggagaaaaaaggtattcatgcaacggtaatcaacccgtattatattaccggactggataagggactgctggagaagctgaaggcagaccatgacacggtagttacactggaagatggcatcatgaatggtggtttcggagaaaaaatcgcaagattttatggaagcagtgatatgaaagtctataattacggattgaaaaaagaattccttgaccggtatgatgtaaatgaggtattaaaagagaatcatctgacagcagagcagattgtaaatgacgtattatagaaggcagaaataaacaacaaaccttgtgagaatcgacacaatatggtaaaatataacatactagagcttattttgcatagtggttagaatagcgggctcatggaaggagcggtatcatatgaagaataaagattcgaaagcaaggatgcagatgattttcgggatacttttgtttgcgtttatttttatggcagagttgtatgccatggtcaatttcccgaaaatgtttattgttctggctgttttggctgtagcagatctgatttgcctttatgtggcaataaacgggattatctcagtatatgagacaaaatatacccggagagaagaacagtatgagagcattttcaaatccgaaaaggcatcgtatcttatgctgaaaaaatattttgaggaaatatcggtgaagcttgcatatatggaagaggcatctaagattccgacagaggaaattgtcaatgcacagaagggaatagcgaaagtaattatcaagcggtcccatgagaataccgatgcattgatgaattcatacgaacagctgctggaccggtttgatacgttccagaaaggaatggatgggttcggtacagttgcgggtgcttataaggacgagattctttcagcctgtaaggatgaaatttcttcggtgcagaaggatggaaaagaacaggaacattcacaggataaagagatagccgcaaagctgcaggaaatcattattgcaatgaaagatatggaactgcgcctgaatcagaccattatgaacagtcagaaagtggttgtttcccagccgcaggtttctgtacctgtggcaacacctgtagagccacagccggcaccgcagaatcatgtggaagaaacaccggtagagccggagatctcaccagagccggaagaaagtatggagccggaaccggagatttcgccggatctggaagaaaacccggaaccggaaattttgccggatctggaggagagcctggaaccggagatttcgctggagccggaagaagatatggaaccggagatt

SEQ ID NO: 1056 - DNA, 2377 bp, Unknown
  gut microbiota DNA sequence
ccgctccgactgctccccattctacttctaattatttgcttttttccacctgatacgaaggcactaaccgtttcaccaccagcttcatctgtggatcatcttcatatgccgtcttcttcagatctttcaaatgttcaaaaaactcttccctgtcaaattcaatcggttttccgataaaaatcagatcattctccgttttctgaagtccttcctcttctttcagacactcttcaaacatcttttcccccggtcgaagccctgtatacacaatcgggatatccacatccggttcaaatccggataacttgatcagatttcttgccatatcatcgatttttaccggctctcccatatccagcacaaagatttctccgccctttgcgtaagcacctgcctgtaagacaagcgatacagcttccggaatcgtcataaaataacgaataatattcttatcggtaacggtaaccggtccgccctctgcaatctgctttttgaaaagaggaatcacacttccgttacttcccagtacatttccgaagcgaaccgctacataattggttttcgggaaacgatgctgcattccctgaataatcatctcacagatacgtttggatgctcccatgatattggtcggatttacggctttatccgtagaaatcaataccatgcgctccgttccgtttcttcctgctgccatagccacattataagtaccgaatacattgtttttaattgcctcattcggactgtcctccatgagtggcacatgcttatgtgccgctgcatgaaaaacaatcgccggtttataatccgaaaatacggtatccacacgatgagtatttctcacagatccaatcagcacaaccaaattcagattcgggaatttctttttcagttcctgctgaaggtcatacgtggtattttcataaatatcaaatatcaccagctgcgaaggatgatgcgccgcgatctggcggcagagttcacttccgatggaaccaccgccaccggttacaagtacaacctttcccgcaatgtatcccatgacctcatccagatttgtcttcaccgactcccgtcccagtaaatcttcaatttccacctcacggaaatttgagacacttacttcgtcattcacaatctgcgccatactaggcagaatcttaattttgcatcctgtgtttttacacaattccaggatctttttctttcgatctcccggcagattcgggatggcaataaagatttcctgcacttcatatttttctgctgcccagggaattttgctgtcatttcccacaatcggagctcccagaatggtgcttccaatcttattcttgtctgcatcaatcacgcataccacacgattgcggatcagcggactgttttccatattttttatcaggaaattagcactgtctcctgctccaatcaccatggtagcaatggcatgtctggatgcgtctcccagataactgtgtcgtatgatacgcagtccccggtatacaaaacggcttccggacaccagtgccagcaaaaagaaaaaatacaaaatataataagaacgtggcatattccattggaacatatgcatccccagactctgtattgcagcactgagcagacacgcaatcactacatttaacagttcctgcacactcgcgtattcccacagactattatacagatgcataataaaaaatatcacgatggttacaatcatatttacccagaaatattgcagtgctgtctctaaaaaaggaattccctgctcactctttaaactgaaatcaaaacgtgtccagatagaaaggatttccgccagaaagattgccaatatatcgtaaattaccaacaatacgattcgtatatattttgccgtttctccccgaaaccggttcttcatttgttgcatgccaaaattactccctataatctgctcattttcatgacttgtttgattttctctgttttcttgactgtttctttccggactgcttctttgcagaagtttctgttgtcactgctttttccgttttaaggtcgttctgttccacgacaacatcatttttctcagaaaccggttcttttacgaaaagattttctttcttgaccagcatccggttcaccgcaagtcccaggccaagcatgccccagaataccggagcggtacatacattggaatcatttgcgatacctgcaatcatgtacaccagcactgccgcaaataatccaaatccaacccagctgatactctcgtgcagatccactctgcggtaaatgcgtatcgactgtaccagataccagaacagaaataccagaagtgccagggtaccgatcagtccggtttccacccactgctgcaaataccagcaat

SEQ ID NO: 1057 - DNA, 671 bp, Unknown
  gut microbiota DNA sequence
ccaccggcatataacacatatgcaacaatgcccactatagatttcctatttatgggcttttcttgttctcaaaacgttaacaaagagataataatcagaacactcggaacccttgtaaacactggtttacaggggtttctttttacccaatttcaagcatttggtgcttattaaaaatagataagaagcaggacgatagggatgaagcccaatgtcctgcttcttatttcactctgtgcgaacagtaatatatttttgatttctactgtttggcttgtttggaattgtcattttaagtgtaccggaatctagtaaaggccgtagatatttcttggtgaaatttttgttgtttttatatccacaataatctgcaatttcagcttttgaatgaggagttgaacaaaaaacaagaaactcatcaaaagtggtaacttgggtcttaacttgggtcttaacttgggtcttaacttggtttatatccatgatggagtaatcatgatggtaatttacattttttaatataactctgaaatcggttgccgttgaggaaaattcaggcttatatgcctctgaatatccaggcagcttttcggtttcactgacgattttgcgtaggccgcttccacggcgttccatgtacttcatgcggtggaacaggtcagcaatcacag

SEQ ID NO: 1058 - DNA, 2304 bp, Unknown
  gut microbiota DNA sequence
ttgtcggattgtaaaggcagagccttacgcaaggtgcaggagaaagactccgctcgggttaagggcgaagcgccttagccggtcaagggtgcaaccattgcccagttagtggcgtttcgccactaagtactgggtattgcttgtagcaaagcttcacaagattaagcaacttcgttgcaattcccttcgggaaaagaactaaatattgttacgataaacagactgagtagagagatttacttggtctttttttatggaaagaaaggaaagattagcatgaaagcaactaggcacaatggacggtcaggcgagcatggaacctatgacgcaaagcacaatgaccgcagatttgatgtagaaaatagtgagcatattgacgcagagagaacgaagatgaatgtgtactgggattgttatcaggggtacagcctgcagaatgataaggacgagcgggcgagattcacttttacggaaatagaaaaagcatattatgttgagaaatattcagaccatgtggacggtcagaatgagagaaaccggaaagcaagacactatgaccgagtaaaaacgattgatgctattcttgaaaataataaaacgtgtccggaagaaactttattacagcttggaaacatggacggtgcggtgtctgctgatgtgcttgcacaggtcagtgcagaatatttcgaggaatttaacagacggtatggttcccatgttcatatactggacagggctttgcatcttgatgaagcaacaccacatattcatgaacggcatgtatttgatgttgtgaatcagtatggagaattatgtccccaacaggataaggcattggaagaacttggctttgaacttccgaagccgaatgagaaaaagggaaagtacaataaccggaagatggtttttgatgaagagtgcagaaaactatttatcagcatctgtcagaatcatggactgacgattgatgttgagccggtgtatggcggtgcaagctatctggagaagcaggattttatcatcatgaatcagaagaaacgcattgaggaaaaacaggctgttcttgatggtcttgtgatgaagatagaggacgtaaacgcagtcattgaagaagcagtaggccttgcttatgaaaaggcttgtgaggttgtcacaaagcgtgtgaaagaggaaacagtgaagcatgatgttgatgtcgtaaaggactatggagagcttttacagcaacagccgaaagataaactcagtgataaatcaaagtcggtggcttccaaggtcgtaaatgcgattgttgccaaactagaaaaagcatcacaggcacttttgggaaatatcatctctgccctgaatgagccgaaaaataaggttaggttctctggtctgggatgggaaagaacgtatcaaggatgtgcttcatcacttccttggagccgatcagaacaattatgtctatgaagcaatgaaagtccttctgttaggggcaatttcaagggtataccgacctggaacgaagtttgaatatatgctgattctggtgggtggtcagggagccggaaagtcaacgtttttcagattcctagccatgaatgattcatggtttacggatgatttgaagaaacttgatgatgaaaatgtgttccggaagatgcaggggcatttaatcatagaactgtcagaaatgatagcaacagtcagtgcaaggagcattgaggatataaagtcattcatcagcagacagagcgacatttacaaggttcctttcttgataatttcaagggggacagggtttgttccaaaatgctttggaaagaagctcttcacagggattatgagccaaagagaattgaattgaaacagatttgcgacattatgaataattcggtaacagactggattatgagtgatggtgccatgcatttcggtgtctatggcaaacagcgtggctgggttcgtgccggtttctctcagggaatccccgacaaagcggacagcgatggttttatggcagtaccgaagcaactggaattagagataccattcaagtaacagaattgatgatgttagctttttgttactggttctgttacccagtgaaagtattgattttactgggttttctcttgtaggtaacaaaagtaacaagaaaatagaaaaataaataaaacacaggtagcagatacaggtagggtgatttgagaggtcttttcggtcatgttaccttttttgttacctgtcccttgtagggggaatcttggaaaggagaggtacgaatgcaggaagagaaaacagcggaaaataaagcaa

SEQ ID NO: 1059 - DNA, 309 bp, Unknown
  gut microbiota DNA sequence
ttttacctcaatgtattccacctcaaggggcaccggttccggttcatcctccgtctgcaggtggaacagatccaactgtcccgggaactgttcatgccggatctcactggtggagccaaaaagtctggtcttcaggtagtccaactgtgcctgaaggttagcgatcagttgatccttttcgctgtctttggcatcacgttcctgcagcatttcctgcagggaacggataagctcgttctgagtgctgattgtattattcagttgtgaaatcgtatccttaagctctaagagctggatatctcttactcc

SEQ ID NO: 1060 - DNA, 733 bp, Unknown
  gut microbiota DNA sequence
tcgcataataatcaatacgctccagctttggctctgtataacgcagttctgtccggatgggttcgtgtccgataggaatcatcattgttccacaaacatcacacgttttctgttcttccgtaagagtatctacataaacattctctgtcggaagatcagcaaagacctcatcataagcagctttcgatttacgggccttcttgtgtgcttttacctcaatgtattccacctcaaggggcaccggttccggttcatcctccgtctgcaggtggaacagatccagctgtcccgggagctgttcatgccggatctcactggtggagccaaaaagtctggtcttcaggtagtccaactgtgcctgaaggttggcgatcagttgatccttttcgctgtctttggcatcacgttcctgcagcattttctgcagggaacggatgagctcattctgagtgctgattgtattattcagttgtgaaatcgtatccttaagctctaagagctggatatctcttactcctgaaggcattgtttttttgctccttttctatggttcaattataccataaaacaaacgaaaaatcctgaaaaatcaagcatttccggtactttttattgcccttggctgctcgatttcaagaccggacataagccagtcaaactacctccatgtaatgggttttacctcattacggttgcgcggccaacggtattttcctacgttggcatcaagtcg

SEQ ID NO: 1061 - DNA, 562 bp, Unknown
  gut microbiota DNA sequence
cgctccttttctatggttcaattataccataaaacaagcggaaaatcccgaaaaatcaagcatttccggtattttttatcgcctttggctgctcgatttcaagaccggacataagccagtcaaattgcctccatgtaatgggttttacctcattacggttgcgcggccaacggtattttcctacgttggcatcaagtcgcttatataaaagtacaaatccttcacgttcatgaagaagcacttttattcgatcactacgtctgccacagaagagatagattgcatttggcctggaagggtccatattcagctggtcttttacgaccgcgcataatccatcaatggacttgcgcatatctgtataaccacagatcacataaatcccgtctgcgacagtgatgtcccctaacatgtccctgtcacagctttaaggatctgtgacagcagcttcgggtcaacatcatttgaaatttttattgaaacagtcccgagcatgacctcgatggcggggcagggttcttccagcggaagcattgtgctttcgacagttggaatgcccggg

SEQ ID NO: 1062 - DNA, 2501 bp, Unknown
  gut microbiota DNA sequence
tcccaagcatatattaactgctatcctcactatatcgtatgtcacaaaaaagaaaagcctatatgcacaaacggtcgattttcatacacaagtggtcaatttttgactttttatagactaggcttgacttttcattattttaattttatatttatttcaattacataatattaaacaaatgagggaatataaaatgaaggaaattgcttacctaatttctcattatatagaggcatttattatttttcagtattgtcattgtatatttaaacaaaaaaaatctaattcttctgtgtttttgggatttactttgtgttattcctttttatttggaatttttcattttcagaatatttatgtaaacattattgcctccattcttgctccattgtttttgatcagttatttatatgacgttccaaaaatatatgctttttttcactcgcttgttctttacctgtcaatggcattaggtgaattagccggagcctccctgctctccttactctcagatcattattggaatacatggtcgacagacattcacctgttatttttatcaactatactatgtaaaacattatatctttgcatagtattcatcctgatatgcttccaaaagaaatggcctataaccactcccatttctcccgatcacggttctttttttctagctgctataactttctgttctatgtttgtcagcatcctgttatatatttttggcttacagtttccagaaagttccttaagcaattgcataatttttattacaacagtgttgctcctcgtcatattatttctggtttatgcactctacaactacaacaataaacgcaactctgatctgctgcaattaaaacttcagctgcaaaaagagcaaaatcttgcggaatataacaccgcactgatttcacaggacactgcccgacggacactgatccacgacatccggaatcatctgctttccatttccatcttaaatcagcagaaacgatattccaaacttgaccaatatatccagacactcatacactccgaacagttggcaccctccattcgcatctgtgataataacctgctcaacgcaacactgcttcgttatcagacctcctgccacgcaaaaggtatccgatttgaagttgcaattgaaaatcactccattgactttctttcggatactgacctgactgcacttttctgcaatctgcttgataacgcggtaacggctgccgataaagttccttctggatggatttctctccatgtggaacttttttctcccttgcatggcattttgcttaccatgaagaattcatgtatggacagacctccgcaaaatttcaggcatgaatggctgacaaccaaaaaagagtcctccacgcacggtttcggtatgaagagtatccgcagaattgccgatacttatcatggagaattacaaactgcttacctcgatcatgaacatatattccagacgatcctaactatgtatccacagaaagaacaggtgacccatgcgcattttgatttgtgatgataaccctatatttttagatgaacttcaggaactgttaaacgattattttgccaaaaataatctcacgtttccatctcctgtatgctatccggacggaaactctgtcctttcggatactggagaaattgatatgttgtttttagatatggaactgcccggacatgatggaatctatgtaggtaatatgttaaaaaaaacacacccttataccataattcttgcagtcacttctcatcccgattttcttgatcccgccatgcattttggctgctttgcctatctgacaaaaccaattgaccatgcacggtttttccgaaatatggatgctgccattgtgaaatattatgaacaatcctcccggattaccattcagaccaccaccggatttgttcccgttcaaacccgcgatattatttttgtcgaatcagaaaaacgacactctgttgtacacactttgtatggtatctatcactgtatccagccatttgctttttggcaagatcagctctctcaaccgtacttttatgtcacacaccgaagtatacttgtaaatttttcccatataaaagaagtgcagaatgaccgtatccttatggacaatggacaatacgcttacataagccgcaggcgaatgacagattttcgaaaaactcttgccgcatattatgccggtatgcatttttcaacatagggcataaaaaaagacgtgcagtgcacgccttttcatcctactgtaaatatccatccttaacgatatctgaaagcttctctgtcggaaccgaaaattctaccaggcccatatatcccggagctacctcatacttatcaaagacaaacgttaactctccattgtcgctgatataaaaatccgcatcatccttaatctgcttaaaatcccattccggttgatcatcatccagaaaatatgccttactgctgtcctctttcatctgggcacgca
